United States Patent Application Publication US 2023/0026259 A1 - sequence listing, part 39

SEQ ID NO: 127256 - DNA, 3959 bp, Homo sapiens
  Payload ID: 4908
  Gene Symbol: DCBLD2
  Gene Name: discoidin, CUB and LCCL domain containing 2
  Uniprot ID: Q96PD2
  ENST ID: ENST00000326857
  CDS Start-End: 1-2370
atggcgagccgggcggtggtgagagccaggcgctgcccgcagtgtccccaagtccgggccgcggccgccgcccccgcctgggccgcgctccccctctcccgctccctccctccctgctccaactcctcctccttctccatgcctctgttcctcctgctcttacttgtcctgctcctgctgctcgaggacgctggagcccagcaaggtgatggatgtggacacactgtactaggccctgagagtggaacccttacatccataaactacccacagacctatcccaacagcactgtttgtgaatgggagatccgtgtaaagatgggagagagagttcgcatcaaatttggtgactttgacattgaagattctgattcttgtcactttaattacttgagaatttataatggaattggagtcagcagaactgaaataggcaaatactgtggtctggggttgcaaatgaaccattcaattgaatcaaaaggcaatgaaatcacattgctgttcatgagtggaatccatgtttctggacgcggatttttggcctcatactctgttatagataaacaagatctaattacttgtttggacactgcatccaattttttggaacctgagttcagtaagtactgcccagctggttgtctgcttccttttgctgagatatctggaacaattcctcatggatatagagattcctcgccattgtgcatggctggtgtgcatgcaggagtagtgtcaaacacgttgggcggccaaatcagtgttgtaattagtaaaggtatcccctattatgaaagttctttggctaacaacgtcacatctgtggtgggacacttatctacaagtctttttacatttaagacaagtggatgttatggaacactggggatggagtctggtgtgatcgcggatcctcaaataacagcatcatctgtgctggagtggactgaccacacagggcaagagaacagttggaaacccaaaaaagccaggctgaaaaaacctggaccgccttgggctgcttttgccactgatgaataccagtggttacaaatagatttgaataaggaaaagaaaataacaggcattataaccactggatccaccatggtggagcacaattactatgtgtctgcctacagaatcctgtacagtgatgatgggcagaaatggactgtgtacagagagcctggtgtggagcaagataagatatttcaaggaaacaaagattatcaccaggatgtgcgtaataactttttgccaccaattattgcacgttttattagagtgaatcctacccaatggcagcagaaaattgccatgaaaatggagctgctcggatgtcagtttattcctaaaggtcgtcctccaaaacttactcaacctccacctcctcggaacagcaatgacctcaaaaacactacagcccctccaaaaatagccaaaggtcgtgccccaaaatttacgcaaccactacaacctcgcagtagcaatgaatttcctgcacagacagaacaaacaactgccagtcctgatatcagaaatactaccgtaactccaaatgtaaccaaagatgtagcgctggctgcagttcttgtccctgtgctggtcatggtcctcactactctcattctcatattagtgtgtgcttggcactggagaaacagaaagaaaaaaactgaaggcacctatgacttaccttactgggaccgggcaggtttttatttaatggtctctttggcttgccgtcacaatgaaggttggtggaaaggaatgaagcagtttcttcctgcaaaagcagtggaccatgaggaaaccccagttcgctatagcagcagcgaagttaatcacctgagtccaagagaagtcaccacagtgctgcaggctgactctgcagagtatgctcagccactggtaggaggaattgttggtacacttcatcaaagatctacctttaaaccagaagaaggaaaagaagcaggctatgcagacctagatccttacaactcaccagggcaggaagtttatcatgcctatgctgaaccactcccaattacggggcctgagtatgcaaccccaatcatcatggacatgtcagggcaccccacaacttcagttggtcagccctccacatccactttcaaggctacggggaaccaacctcccccactagtgggaacttacaatacacttctctccaggactgacagctgctcctcagcccaggcccagtatgataccccgaaagctgggaagccaggtctacctgccccagacgaattggtgtaccaggtgccacagagcacacaagaagtatcaggagcaggaagggatggggaatgtgatgtttttaaagaaatcctttgaagatgatgctgctttttacaaagcatcgttttaaagcacatggccttttttttttaattattagtggtagtaatatatagaatgtattacataactgtcactgaagtggttggggaaaatgtggtgactgaggtacaggaaactactaatcttgccatcttgctttaaggtgttatggtggcacagttactgctcgcctgttaaatttcaaatgtcctgtttgatactactgtagaacactatttttaatacagaaaaagctccctataatgcacttcagagaaattaaaaatcacagagtatttattaccaatgctgcaggtacattaatgaactcgagatggctctgtaagcctgactggcaataacgcacggtactgttcttgaaatacctaatggcttgaaattctagtctgtttgtgaaagatgggtactatcatgatttcctcttctattcctatattcttttctggattttttttaataattagtgatataagcattgtttttattgcagccatatccacttatccatcttaagatctgtagctgggattttctgacttgtaatgagcagggggattgctttttcactttgtgacactctttagagctttaatgcttcacagtatatggcctggtctcatccttgcgtgttccacttgaggccctttggtgtcttgccccattcttgtgtttataaaatgtttgagtatttctgatgagtgatgcttgccttagtctcatgaattcagatcccttcatgtcctttaagtatgctcctcaatgtgtaaacaggaacaactttatgatttgaaagctttaaaggagattcttctcccacccccaactttatttgcaatgggatttttcctaggagagttatgaaaagttgaaggcttctaagggaatactgtaaacatgacccacttatatttatcacagtgaaaggcaaaattattcactcagaagtaatataaattacctctttaaaaagtaaccagaatttgtcctttttggttttatacattcacaaacatatacatttttcttgagtctcaaggtattttatatttttagtcagaaaaaataatttttcatttcagttttccataaactgttacacaaaatataaacctaacgtgtatttttcaggactgcgtgatcgtgcactttgtgtggtaagaggtttgagtagtcctatatgtcacctagggaacagacattatagcttactagcaaatgaatattcatgccttgtttttgatacctcctggcagcttccatgtcaccacttgttcatacctgcccagagctagttttagacatggcaaaatagaaatcatctgtaatttattagctaacaatgtaaaaccatcttttaaagccttcagactgtcaagacgacatgagcagctcaccatatgataaaaatacataaatttgacattccctcttccataaacctttgtttgtagatttaatgttgaacagtacttttccataaagttctagtcacttctgttggcctgagccaccagattatgatgttgccagaattcactcaatttgaataaagatgaacagta

SEQ ID NO: 127257 - DNA, 554 bp, Homo sapiens
  Payload ID: 4908
  Gene Symbol: DCBLD2
  Gene Name: discoidin, CUB and LCCL domain containing 2
  ENST ID: ENST00000449482
  CDS Start-End: 229-554
gctcttacttgtcctgctcctgctgctcgaggacgctggagcccagcaagttatggaggctagaattctgacagcagggtgtgcagagggccatgctctttcctaagactctaaggtgatggatgtggacacactgtactaggccctgagagtggaacccttacatccataaactacccacagacctatcccaacagcactgtttgtgaatgggagatccgtgtaaagatgggagagagagttcgcatcaaatttggtgactttgacattgaagattctgattcttgtcactttaattacttgagaatttataatggaattggagtcagcagaactgaaataggcaaatactgtggtctggggttgcaaatgaaccattcaattgaatcaaaaggcaatgaaatcacattgctgttcatgagtggaatccatgtttctggacgcggatttttggcctcatactctgttatagataaacaaggtaattttcaccttttgcaatggttcctacagtttgtaatttctaacaacaaaaataaaatgctttttttaag

SEQ ID NO: 127258 - DNA, 7023 bp, Homo sapiens
  Payload ID: 4909
  Gene Symbol: DIP2A
  Gene Name: disco-interacting protein 2 homolog A
  Uniprot ID: Q14689
  ENST ID: ENST00000400274
  CDS Start-End: 234-4937
ccggccgggcgctcaggagcgcgcggggcagcggcggcgcggcggagccatccgcgctcgtgcccgcgcgggtgcgttgctgtcctggccgcgcccctgtcccgccgcctcccgctcctcgcctggcggatgtaggttgttggcctgaggggagctacgtagccgaggtttgcgctgccgccgccaggcccggtccggttccagcctctgcccggacgctagccggcctggccatggctgaccgcgggtgcccgctggaggcggcgccgctgcctgccgaggtgcgggagagcctggctgagctggagctggagctgtcggaaggtgacatcactcaaaaaggatatgaaaagaaaagggcaaagctgcttgcacgttatataccgcttattcaaggaatagacccatctctgcaagcagagaatagaattcctgggccctcacaaaccacggccgctgcacccaagcagcagaagtctcggcccaccgcctcgagggatgagcgcttccggtcagatgtccacactgaagccgtgcaagcagctttggccaaatacaaagagaggaagatgcctatgccttcgaagagacgttctgtccttgtgcattcgtctgtggaaacctacacccctccagacacgtcgtctgcctcagaagatgagggctctttacggcgacccgggcgactcacctccactccgctccagagccattccagcgtcgagccctggctcgaccgggtcattcagggctcgtccacctcatcctctgcatcctccacctcatctcacccgggagggagacccaccactgctcccagtgctgcagccacgccgggggccgccgctaccactgcactcgcaggcctcgaggcccacacccacatagatctgcattctgcccctcctgatgtcaccacgggcctcgtggagcattcgtactttgagcgtccacaggtggcttctgtgagaagtgttcctcgggggtgcagcgggagcatgctggaaacagcagatggtgtccctgtgaacagcagagtgtcctccaaaatccagcagcttctgaacaccctgaagaggccaaagcgccctccactgaaggagttctttgtggatgattttgaggaattgttggaagatccaaatcagccaaagcctgagggaagcgagacgagtgtgctgagaggggagcctctcactgcaggtgtcccccgaccgccgtcgctgttggccaccttgcagcgctggggcacaacacagcccaaatccccctgtctgactgccttggatacaactgggaaagccgtctacactctcacctatggtaaactttggagtcggagtttaaaactagcttatactctacttaataaactgacaagtaagaatgaacctctacttaaacctggagacagagtggcgctcgtgtttccgaatagtgaccctgtgatgttcatggttgcattttatgggtgtctcctggcagagctggttcctgtccccatagaagtgccattaacaagaaaggatgcaggcagccagcaggttgggtttctgctgggcagctgtggagtcttcttggccctgaccacagacgcttgtcagaaaggcctccccaaggcacagacaggagaggtggcagctttcaaaggttggcccccgctctcctggctagtgattgatgggaagcatctagccaagcccccaaaggactggcaccctctggcccaggacacagggactgggactgcctacattgagtataaaaccagcaaagaaggcagtacggtgggggtcacagtgtcccacgcatccctgctggcacagtgccgggctctgacccaggcgtgcgggtactcagaagctgaaacattaacaaacgtgctggatttcaaaagggatgctggtctgtggcatggcgtgttaacaagcgtcatgaacaggatgcacgtggtcagcgtcccctacgcgctgatgaaggcgaacccactctcctggatccagaaagtgtgcttctataaagctcgggccgcgctggtgaagtcgcgagacatgcactggtctctcctagctcagcggggccagagggacgtcagcctcagctcactgcgcatgctgattgtggccgatggtgccaacccgtggtcgatctcctcctgtgacgccttcctcaacgtcttccagtccagaggtctgaggccagaggtcatctgtccttgtgcaagttctcctgaggcgctgactgtcgccatccgcaggccacctgatctgggaggaccacctccaagaaaagcagtcctgtcgatgaacggtctaagttatggtgttatcagagtggatactgaagaaaagttgtcagtccttactgttcaggacgttggtcaggtgatgcctggagctaatgtatgtgttgtgaagttagaaggtaccccttatctttgtaaaactgatgaagtgggagaaatatgcgtcagttccagtgcaactggcacagcgtactatggattgcttggaatcacgaagaatgtgtttgaggcagttccggtcaccacaggaggagcacccatctttgacaggccattcaccaggacaggcctgctgggcttcatcgggcctgacaacctggtcttcatcgtgggcaaactggacgggctgatggtcactggagttcgcagacacaatgcagatgacgttgtggccaccgcactggccgtggagcccatgaagtttgtctacagaggcaggatcgctgtgttctctgtgaccgtgctgcacgacgaccggattgtcctggtggctgagcagcggccggatgcctcggaggaggacagcttccagtggatgagccgtgtgctgcaggccattgatagcatccaccaggtgggcgtgtactgtctggccctggttcctgccaacaccttgcccaaggctcctctcggagggattcacatttctgaaaccaaacagcgctttctggaagggacgctgcacccgtgtaatgtgctgatgtgccctcacacctgtgttaccaacctccccaaacctcgtcagaaacaaccagaggttggaccagcctcaatgatcgtggggaacctggttgctgggaagagaatcgctcaggcttccgggagagagctcgcccacctggaggacagcgaccaggcacggaagttcctgttcctggctgacgtgctgcagtggcgtgcccacaccactcctgaccacccgctgttcttgctgctgaacgccaagggcaccgtcacaagcactgcaacctgtgtccagctgcacaaaagggctgagagagtggccgcggctctgatggagaagggaagactgagtgttggggaccatgtggctctggtctacccaccaggggtggacctcattgccgcgttctatggctgcttgtactgtggctgcgtgcctgtcaccgtgcggcccccgcaccctcagaacctcggcaccacactgcccaccgtcaagatgatcgtggaggtcagcaagtctgcatgcgtcctcaccacgcaggctgtcacacggctgctcaggtccaaggaggctgctgctgccgtggacatcaggacctggcccaccatcctagacacagatgacatcccaaaaaagaagatagcaagcgttttcaggcccccctcccccgatgtcctcgcatacttggacttcagcgtgtcaaccactgggatattagcgggagtgaagatgtcgcacgcggccacaagcgccttatgccgctccataaagctgcagtgtgagctgtacccctcgcggcagatcgccatctgcctcgacccctactgtggccttggttttgccctgtggtgtctgtgcagtgtctactcgggacaccaatcagtgctggtgcccccgctggagctggagagcaacgtgtccctgtggctgtcggccgtcagccagtacaaggcccgcgtcaccttctgctcctactctgtgatggagatgtgcaccaagggcctaggcgcacagacgggtgtcctcaggatgaagggggtgaacctgtcatgtgtgcgcacgtgcatggtggtcgccgaggagcggcccaggattgcgctgacccagtccttctccaagctcttcaaggacctgggcctgccggcccgcgccgtaagcaccacgttcgggtgcagggtcaacgtggccatctgcctccagggcacagctggcccggaccccacaaccgtctacgtggacatgcgggcactgcgccatgacagggttcgtttggtagaacggggttctccgcacagcctgccattgatggagtctggaaagatcctccccggcgtgaaggtcatcatcgcacacaccgagaccaaaggacccttgggagactcacacctgggagagatctgggtaagcagcccccacaatgccaccgggtactacaccgtttacggggaggaggcgcttcatgccgaccacttcagtgcccggctgagttttggagacacacagaccatctgggcaaggaccggctaccttggcttccttcggcgaacagagctcactgatgccagtggagggcggcacgatgcactgtatgtggttgggtctctggatgaaactctggagctcagaggcatgcggtaccaccccatcgacattgagacctctgtcatccgagcacacaggagcatcgctgagtgtgccgtattcacctggaccaacctgctggtggtggtggtggagctggatgggctagagcaggatgccctggacctggtggccctggtgaccaacgtggtgctggaggagcactacctggtcgtgggagtggtggtcatcgtggacccaggggtgatccctatcaactctcggggtgagaagcagcgcatgcacctgcgggacggcttcctggctgaccagctggaccccatctatgtcgcctacaacatgtgagcgcagcacaccggcccaggtgccggagatgaatgagccccagcagtccaaggtgtgatgtgggaagacaccgcagagctcactcaccgggactcgcccttcctgtgctcttacagatccctctcaacaatccccgcatctccttttagaaagcacttcctgaattatttaaagaaatattttgaatctgccaagtacatttacaaaaacacggatgctggtattttaacagatggagagacaaggaaaggaaaggaaaggcctggcatgggcattgtgaggaatcacaggcaccgaggttgttctctgctgtactgcaagtttgcactttctttaggctaaaaatatagttcctgatttttaaaattcagttatttattcccacttcaaatgacaagttcatatatagaatttacgggagaaacttgagaccatttacggggagaaacttgattctgggaagatagcagagtacaaaccagctgcctcacttctgtttcacagggaggctgatggaaaaaggaagcaagctggacccatcctccctgctcacagagggcactgtggtcacacacagtgcctcctctgccagttcctttattgaaagaggtgtgctggctggccacggtggcttacacctgtaatcccagcactttgggaggccgaggcgagcagatcacgaggtcaggagaccgagaccatcctggctaacatggtgaaaccctgtctctactaaaaatacaaaaaattagccgggtgtggtggtgggcgcctgtagtcccagctacttgggaggctgaggcaggagaatggtatgaaccagggaggcggagcttgcagtgagccgagatcacgctactgcactccagcctgggtgacagcacgagatgccgtcttaaaaaaacaaaaaagaggtgtgctgcttgtcagcatgtattgtcacggacactcaataagtgccattttggactgtcaaatttagatgctttgtttcagaaagataagccagcatttagttttaaatcactttcctggtttgtaacttgatgctgtttagttaaattgctagttttcctaacactacaatattaattcttctcgtggaagtgtactgatttattatttttattccaagtcagcagatttggaagcattgtggtaaagtctaaggttttcatatccatagtgctgtttggtgagtaccggcagtacagttgaggggagcagggaacagcattgccccgtattgaaggtggagatggttacattcttcactgctttttgcattttgagttgtgtgcctataaaatttggccaaaccattttattattttgttcaaacttgactaagctgagtgatctaaaattatacagaacctaaatcaaagaagagaatgtaaagtcctttagttacttctaagaatttgaagtcaagcacgaatctaagacatagattatttttatatagctaatgaagagtatgttacgaaattgttgggtttttggggtattgagggtggcaaattttgtgaatcatgcatgcttcacagaaacaaccaggtttttccagaattagtctggatcagtgcctaacaaagctgttattaattctccacacatgagtctggctaactgggccagctctcatgttttactcctgtctggctacaaatagcactgtgcatagtagccctgtttccccatggtgttggactgtggtaaagtatgttgtgacatactggaattctaataatcctgttgtaagtatgtacagaatctatgtaacttattgttgacatacagaggtttgggaagtagtctaatggacattccttacaatagaatggctgggaagggaaagaaaaaaaaaaaaaaactacctaactccaatcttaatgttgtagttttatagcaaacaaaaattgtcagctttttgtattgaaaggtcagtggtggtaagacaaggtgtcttgtaaattaagattttaagaagtgcattaaaatgttttagaattactctgggaattctgtatatcacactaaaatttttatatcattatgttaataaaagttattgactttgtaa

SEQ ID NO: 127259 - DNA, 6967 bp, Homo sapiens
  Payload ID: 4909
  Gene Symbol: DIP2A
  Gene Name: disco-interacting protein 2 homolog A
  Uniprot ID: Q14689
  ENST ID: ENST00000417564
  CDS Start-End: 22-4737
cggacgctagccggcctggccatggctgaccgcgggtgcccgctggaggcggcgccgctgcctgccgaggtgcgggagagcctggctgagctggagctggagctgtcggaaggtgacatcactcaaaaaggatatgaaaagaaaagggcaaagctgcttgcacgttatataccgcttattcaaggaatagacccatctctgcaagcagagaatagaattcctgggccctcacaaaccacggccgctgcacccaagcagcagaagtctcggcccaccgcctcgagggatgagcgcttccggtcagatgtccacactgaagccgtgcaagcagctttggccaaatacaaagagaggaagatgcctatgccttcgaagagacgttctgtccttgtgcattcgtctgtggaaacctacacccctccagacacgtcgtctgcctcagaagatgagggctctttacggcgacccgggcgactcacctccactccgctccagagccattccagcgtcgagccctggctcgaccgggtcattcagggctcgtccacctcatcctctgcatcctccacctcatctcacccgggagggagacccaccactgctcccagtgctgcagccacgccgggggccgccgctaccactgcactcgcaggcctcgaggcccacacccacatagatctgcattctgcccctcctgatgtcaccacgggcctcgtggagcattcgtactttgagcgtccacaggtggcttctgtgagaagtgttcctcgggggtgcagcgggagcatgctggaaacagcagatggtgtccctgtgaacagcagagtgtcctccaaaatccagcagcttctgaacaccctgaagaggccaaagcgccctccactgaaggagttctttgtggatgattttgaggaattgttggaagttcagcaaccagatccaaatcagccaaagcctgagggaagcgagacgagtgtgctgagaggggagcctctcactgcaggtgtcccccgaccgccgtcgctgttggccaccttgcagcgctggggcacaacacagcccaaatccccctgtctgactgccttggatacaactgggaaagccgtctacactctcacctatggtaaactttggagtcggagtttaaaactagcttatactctacttaataaactgacaagtaagaatgaacctctacttaaacctggagacagagtggcgctcgtgtttccgaatagtgaccctgtgatgttcatggttgcattttatgggtgtctcctggcagagctggttcctgtccccatagaagtgccattaacaagaaaggatgcaggcagccagcaggttgggtttctgctgggcagctgtggagtcttcttggccctgaccacagacgcttgtcagaaaggcctccccaaggcacagacaggagaggtggcagctttcaaaggttggcccccgctctcctggctagtgattgatgggaagcatctagccaagcccccaaaggactggcaccctctggcccaggacacagggactgggactgcctacattgagtataaaaccagcaaagaaggcagtacggtgggggtcacagtgtcccacgcatccctgctggcacagtgccgggctctgacccaggcgtgcgggtactcagaagctgaaacattaacaaacgtgctggatttcaaaagggatgctggtctgtggcatggcgtgttaacaagcgtcatgaacaggatgcacgtggtcagcgtcccctacgcgctgatgaaggcgaacccactctcctggatccagaaagtgtgcttctataaagctcgggccgcgctggtgaagtcgcgagacatgcactggtctctcctagctcagcggggccagagggacgtcagcctcagctcactgcgcatgctgattgtggccgatggtgccaacccgtggtcgatctcctcctgtgacgccttcctcaacgtcttccagtccagaggtctgaggccagaggtcatctgtccttgtgcaagttctcctgaggcgctgactgtcgccatccgcaggccacctgatctgggaggaccacctccaagaaaagcagtcctgtcgatgaacggtctaagttatggtgttatcagagtggatactgaagaaaagttgtcagtccttactgttcaggacgttggtcaggtgatgcctggagctaatgtatgtgttgtgaagttagaaggtaccccttatctttgtaaaactgatgaagtgggagaaatatgcgtcagttccagtgcaactggcacagcgtactatggattgcttggaatcacgaagaatgtgtttgaggcagttccggtcaccacaggaggagcacccatctttgacaggccattcaccaggacaggcctgctgggcttcatcgggcctgacaacctggtcttcatcgtgggcaaactggacgggctgatggtcactggagttcgcagacacaatgcagatgacgttgtggccaccgcactggccgtggagcccatgaagtttgtctacagaggcaggatcgctgtgttctctgtgaccgtgctgcacgacgaccggattgtcctggtggctgagcagcggccggatgcctcggaggaggacagcttccagtggatgagccgtgtgctgcaggccattgatagcatccaccaggtgggcgtgtactgtctggccctggttcctgccaacaccttgcccaaggctcctctcggagggattcacatttctgaaaccaaacagcgctttctggaagggacgctgcacccgtgtaatgtgctgatgtgccctcacacctgtgttaccaacctccccaaacctcgtcagaaacaaccagaggttggaccagcctcaatgatcgtggggaacctggttgctgggaagagaatcgctcaggcttccgggagagagctcgcccacctggaggacagcgaccaggcacggaagttcctgttcctggctgacgtgctgcagtggcgtgcccacaccactcctgaccacccgctgttcttgctgctgaacgccaagggcaccgtcacaagcactgcaacctgtgtccagctgcacaaaagggctgagagagtggccgcggctctgatggagaagggaagactgagtgttggggaccatgtggctctggtctacccaccaggggtggacctcattgccgcgttctatggctgcttgtactgtggctgcgtgcctgtcaccgtgcggcccccgcaccctcagaacctcggcaccacactgcccaccgtcaagatgatcgtggaggtcagcaagtctgcatgcgtcctcaccacgcaggctgtcacacggctgctcaggtccaaggaggctgctgctgccgtggacatcaggacctggcccaccatcctagacacagatgacatcccaaaaaagaagatagcaagcgttttcaggcccccctcccccgatgtcctcgcatacttggacttcagcgtgtcaaccactgggatattagcgggagtgaagatgtcgcacgcggccacaagcgccttatgccgctccataaagctgcagtgtgagctgtacccctcgcggcagatcgccatctgcctcgacccctactgtggccttggttttgccctgtggtgtctgtgcagtgtctactcgggacaccaatcagtgctggtgcccccgctggagctggagagcaacgtgtccctgtggctgtcggccgtcagccagtacaaggcccgcgtcaccttctgctcctactctgtgatggagatgtgcaccaagggcctaggcgcacagacgggtgtcctcaggatgaagggggtgaacctgtcatgtgtgcgcacgtgcatggtggtcgccgaggagcggcccaggattgcgctgacccagtccttctccaagctcttcaaggacctgggcctgccggcccgcgccgtaagcaccacgttcgggtgcagggtcaacgtggccatctgcctccagggcacagctggcccggaccccacaaccgtctacgtggacatgcgggcactgcgccatgacagggttcgtttggtagaacggggttctccgcacagcctgccattgatggagtctggaaagatcctccccggcgtgaaggtcatcatcgcacacaccgagaccaaaggacccttgggagactcacacctgggagagatctgggtaagcagcccccacaatgccaccgggtactacaccgtttacggggaggaggcgcttcatgccgaccacttcagtgcccggctgagttttggagacacacagaccatctgggcaaggaccggctaccttggcttccttcggcgaacagagctcactgatgccagtggagggcggcacgatgcactgtatgtggttgggtctctggatgaaactctggagctcagaggcatgcggtaccaccccatcgacattgagacctctgtcatccgagcacacaggagcatcgctgagtgtgccgtattcacctggaccaacctgctggtggtggtggtggagctggatgggctagagcaggatgccctggacctggtggccctggtgaccaacgtggtgctggaggagcactacctggtcgtgggagtggtggtcatcgtggacccaggggtgatccctatcaactctcggggtgagaagcagcgcatgcacctgcgggacggcttcctggctgaccagctggaccccatctatgtcgcctacaacatgtgagcgcagcacaccggcccaggtgccggagatgaatgagccccagcagtccaaggtgtgatgtgggaagacaccgcagagctcactcaccgggactcgcccttcctgtgctcttacagatccctctcaacaatccccgcatctccttttagaaagcacttcctgaattatttaaagaaatattttgaatctgccaagtacatttacaaaaacacggatgctggtattttaacagatggagagacaaggaaaggaaaggaaaggcctggcatgggcattgtgaggaatcacaggcaccgaggttgttctctgctgtactgcaagtttgcactttctttaggctaaaaatatagttcctgatttttaaaattcagttatttattcccacttcaaatgacaagttcatatatagaatttacgggagaaacttgagaccatttacggggagaaacttgattctgggaagatagcagagtacaaaccagctgcctcacttctgtttcacagggaggctgatggaaaaaggaagcaagctggacccatcctccctgctcacagagggcactgtggtcacacacagtgcctcctctgccagttcctttattgaaagaggtgtgctggctggccacggtggcttacacctgtaatcccagcactttgggaggccgaggcgagcagatcacgaggtcaggagaccgagaccatcctggctaacatggtgaaaccctgtctctactaaaaatacaaaaaattagccgggtgtggtggtgggcgcctgtagtcccagctacttgggaggctgaggcaggagaatggtatgaaccagggaggcggagcttgcagtgagccgagatcacgctactgcactccagcctgggtgacagcacgagatgccgtcttaaaaaaacaaaaaagaggtgtgctgcttgtcagcatgtattgtcacggacactcaataagtgccattttggactgtcaaatttagatgctttgtttcagaaagataagccagcatttagttttaaatcactttcctggtttgtaacttgatgctgtttagttaaattgctagttttcctaacactacaatattaattcttctcgtggaagtgtactgatttattatttttattccaagtcagcagatttggaagcattgtggtaaagtctaaggttttcatatccatagtgctgtttggtgagtaccggcagtacagttgaggggagcagggaacagcattgccccgtattgaaggtggagatggttacattcttcactgctttttgcattttgagttgtgtgcctataaaatttggccaaaccattttattattttgttcaaacttgactaagctgagtgatctaaaattatacagaacctaaatcaaagaagagaatgtaaagtcctttagttacttctaagaatttgaagtcaagcacgaatctaagacatagattatttttatatagctaatgaagagtatgttacgaaattgttgggtttttggggtattgagggtggcaaattttgtgaatcatgcatgcttcacagaaacaaccaggtttttccagaattagtctggatcagtgcctaacaaagctgttattaattctccacacatgagtctggctaactgggccagctctcatgttttactcctgtctggctacaaatagcactgtgcatagtagccctgtttccccatggtgttggactgtggtaaagtatgttgtgacatactggaattctaataatcctgttgtaagtatgtacagaatctatgtaacttattgttgacatacagaggtttgggaagtagtctaatggacattccttacaatagaatggctgggaagggaaagaaaaaaaaaaaaaaactacctaactccaatcttaatgttgtagttttatagcaaacaaaaattgtcagctttttgtattgaaaggtcagtggtggtaagacaaggtgtcttgtaaattaagattttaagaagtgcattaaaatgttttagaattactctgggaattctgtatatcacactaaaatttttatatcattatgttaataaaagttattgactttgtaattctgcattttgaaatgtgtgaaaagggtctttaaattaccccgaataggttgtatcttattttgctttttttctgactataaaagcagttatgcttatagcataaaatctagaaagcacattaaagtataaagaaaattaaaa

SEQ ID NO: 127260 - DNA, 3044 bp, Homo sapiens
  Payload ID: 4909
  Gene Symbol: DIP2A
  Gene Name: disco-interacting protein 2 homolog A
  Uniprot ID: Q14689
  ENST ID: ENST00000457905
  CDS Start-End: 183-2852
ccgcgctcgtgcccgcgcgggtgcgttgctgtcctggccgcgcccctgtcccgccgcctcccgctcctcgcctggcggatgtaggttgttggcctgaggggagctacgtagccgaggtttgcgctgccgccgccaggcccggtccggttccagcctctgcccggacgctagccggcctggccatggctgaccgcgggtgcccgctggaggcggcgccgctgcctgccgaggtgcgggagagcctggctgagctggagctggagctgtcggaaggtgacatcactcaaaaaggatatgaaaagaaaagggcaaagctgcttgcacgttatataccgcttattcaaggaatagacccatctctgcaagcagagaatagaattcctgggccctcacaaaccacggccgctgcacccaagcagcagaagtctcggcccaccgcctcgagggatgagcgcttccggtcagatgtccacactgaagccgtgcaagcagctttggccaaatacaaagagaggaagatgcctatgccttcgaagagacgttctgtccttgtgcattcgtctgtggaaacctacacccctccagacacgtcgtctgcctcagaagatgagggctctttacggcgacccgggcgactcacctccactccgctccagagccattccagcgtcgagccctggctcgaccgggtcattcagggctcgtccacctcatcctctgcatcctccacctcatctcacccgggagggagacccaccactgctcccagtgctgcagccacgccgggggccgccgctaccactgcactcgcaggcctcgaggcccacacccacatagatctgcattctgcccctcctgatgtcaccacgggcctcgtggagcattcgtactttgagcgtccacaggtggcttctgtgagaagtgttcctcgggggtgcagcgggagcatgctggaaacagcagatggtgtccctgtgaacagcagagtgtcctccaaaatccagcagcttctgaacaccctgaagaggccaaagcgccctccactgaaggagttctttgtggatgattttgaggaattgttggaagttcagcaaccagatccaaatcagccaaagcctgagggaagcgagacgagtgtgctgagaggggagcctctcactgcaggtgtcccccgaccgccgtcgctgttggccaccttgcagcgctggggcacaacacagcccaaatccccctgtctgactgccttggatacaactgggaaagccgtctacactctcacctatggtaaactttggagtcggagtttaaaactagcttatactctacttaataaactgacaagtaagaatgaacctctacttaaacctggagacagagtggcgctcgtgtttccgaatagtgaccctgtgatgttcatggttgcattttatgggtgtctcctggcagagctggttcctgtccccatagaagtgccattaacaagaaaggatgcaggcagccagcaggttgggtttctgctgggcagctgtggagtcttcttggccctgaccacagacgcttgtcagaaaggcctccccaaggcacagacaggagaggtggcagctttcaaaggttggcccccgctctcctggctagtgattgatgggaagcatctagccaagcccccaaaggactggcaccctctggcccaggacacagggactgggactgcctacattgagtataaaaccagcaaagaaggcagtacggtgggggtcacagtgtcccacgcatccctgctggcacagtgccgggctctgacccaggcgtgcgggtactcagaagctgaaacattaacaaacgtgctggatttcaaaagggatgctggtctgtggcatggcgtgttaacaagcgtcatgaacaggatgcacgtggtcagcgtcccctacgcgctgatgaaggcgaacccactctcctggatccagaaagtgtgcttctataaagctcgggccgcgctggtgaagtcgcgagacatgcactggtctctcctagctcagcggggccagagggacgtcagcctcagctcactgcgcatgctgattgtggccgatggtgccaacccgtggtcgatctcctcctgtgacgccttcctcaacgtcttccagtccagaggtctgaggccagaggtcatctgtccttgtgcaagttctcctgaggcgctgactgtcgccatccgcaggccacctgatctgggaggaccacctccaagaaaagcagtcctgtcgatgaacggtctaagttatggtgttatcagagtggatactgaagaaaagttgtcagtccttactgttcaggacgttggtcaggtgatgcctggagctaatgtatgtgttgtgaagttagaaggtaccccttatctttgtaaaactgatgaagtgggagaaatatgcgtcagttccagtgcaactggcacagcgtactatggattgcttggaatcacgaagaatgtgtttgaggcagttccggtcaccacaggaggagcacccatctttgacaggccattcaccaggacaggcctgctgggcttcatcgggcctgacaacctggtcttcatcgtgggcaaactggacgggctgatggtcactggagttcgcagacacaatgcagatgacgttgtggccaccgcactggccgtggagcccatgaagtttgtctacagaggcaggatcgctgtgttctctgtgaccgtgctgcacgacgaccggattgtcctggtggctgagcagcggccggatgcctcggaggaggacagcttccagtggatgagccgtgtgctgcaggtgggcgccccggcacggcctatggttcggtgaatctcccaagctggcacccccactccactccaagtgccaagtggttggcttgtcccgcccggtcctccctggctccagctttgtttatctgtatttttcattgcaaattgacaaattacagctgtatgtatttacgggatacaaagtgatgttataatttatgaatacaatatagaataattaatatatcca

SEQ ID NO: 127261 - DNA, 2760 bp, Homo sapiens
  Payload ID: 4909
  Gene Symbol: DIP2A
  Gene Name: disco-interacting protein 2 homolog A
  Uniprot ID: Q14689
  ENST ID: ENST00000435722
  CDS Start-End: 76-2601
gtagccgaggtttgcgctgccgccgccaggcccggtccggttccagcctctgcccggacgctagccggcctggccatggctgaccgcgggtgcccgctggaggcggcgccgctgcctgccgaggtgcgggagagcctggctgagctggagctggagctgtcggaaggtgacatcactcaaaaaggatatgaaaagaaaagggcaaagctgcttgcacgttatataccgcttattcaaggaatagacccatctctgcaagcagagaatagaattcctgggccctcacaaaccacggccgctgcacccaagcagcagaagtctcggcccaccgcctcgagggatgagcgcttccggtcagatgtccacactgaagccgtgcaagcagctttggccaaatacaaagagaggaagatgcctatgccttcgaagagacgttctgtccttgtgcattcgtctgtggaaacctacacccctccagacacgtcgtctgcctcagaagatgagggctctttacggcgacccgggcgactcacctccactccgctccagagccattccagcgtcgagccctggctcgaccgggtcattcagggctcgtccacctcatcctctgcatcctccacctcatctcacccgggagggagacccaccactgctcccagtgctgcagccacgccgggggccgccgctaccactgcactcgcaggcctcgaggcccacacccacatagatctgcattctgcccctcctgatgtcaccacgggcctcgtggagcattcgtactttgagcgtccacaggtggcttctgtgagaagtgttcctcgggggtgcagcgggagcatgctggaaacagcagatggtgtccctgtgaacagcagagtgtcctccaaaatccagcagcttctgaacaccctgaagaggccaaagcgccctccactgaaggagttctttgtggatgattttgaggaattgttggaagttcagcaaccagatccaaatcagccaaagcctgagggaagcgagacgagtgtgctgagaggggagcctctcactgcaggtgtcccccgaccgccgtcgctgttggccaccttgcagcgctggggcacaacacagcccaaatccccctgtctgactgccttggatacaactgggaaagccgtctacactctcacctatggtaaactttggagtcggagtttaaaactagcttatactctacttaataaactgacaagtaagaatgaacctctacttaaacctggagacagagtggcgctcgtgtttccgaatagtgaccctgtgatgttcatggttgcattttatgggtgtctcctggcagagctggttcctgtccccatagaagtgccattaacaagaaaggatgcaggcagccagcaggttgggtttctgctgggcagctgtggagtcttcttggccctgaccacagacgcttgtcagaaaggcctccccaaggcacagacaggagaggtggcagctttcaaaggttggcccccgctctcctggctagtgattgatgggaagcatctagccaagcccccaaaggactggcaccctctggcccaggacacagggactgggactgcctacattgagtataaaaccagcaaagaaggcagtacggtgggggtcacagtgtcccacgcatccctgctggcacagtgccgggctctgacccaggcgtgcgggtactcagaagctgaaacattaacaaacgtgctggatttcaaaagggatgctggtctgtggcatggcgtgttaacaagcgtcatgaacaggatgcacgtggtcagcgtcccctacgcgctgatgaaggcgaacccactctcctggatccagaaagtgtgcttctataaagctcgggccgcgctggtgaagtcgcgagacatgcactggtctctcctagctcagcggggccagagggacgtcagcctcagctcactgcgcatgctgattgtggccgatggtgccaacccgtggtcgatctcctcctgtgacgccttcctcaacgtcttccagtccagaggtctgaggccagaggtcatctgtccttgtgcaagttctcctgaggcgctgactgtcgccatccgcaggccacctgatctgggaggaccacctccaagaaaagcagtcctgtcgatgaacggtctaagttatggtgttatcagagtggatactgaagaaaagttgtcagtccttactgttcaggacgttggtcaggtgatgcctggagctaatgtatgtgttgtgaagttagaaggtaccccttatctttgtaaaactgatgaagtgggagaaatatgcgtcagttccagtgcaactggcacagcgtactatggattgcttggaatcacgaagaatgtgtttgaggcagttccggtcaccacaggaggagcacccatctttgacaggccattcaccaggacaggcctgctgggcttcatcgggcctgacaacctggtcttcatcgtgggcaaactggacgggctgatggtcactggagttcgcagacacaatgcagatgacgttgtggccaccgcactggccgtggagcccatgaagtttgtctacagaggcaggtgatgcgctgcggacccccacgccgggagtagattccttcatttgcagctcgggaagtctttgtgcagtagatggaaagcccagcaaacttgaattcacaaagcctaaaaattgttgtacatcagaaaactcctaaagtaaaaggaaaatatttgcagcaat

SEQ ID NO: 127262 - DNA, 2711 bp, Homo sapiens
  Payload ID: 4909
  Gene Symbol: DIP2A
  Gene Name: disco-interacting protein 2 homolog A
  Uniprot ID: Q14689
  ENST ID: ENST00000466639
  CDS Start-End: 156-2552
gctgtcctggccgcgcccctgtcccgccgcctcccgctcctcgcctggcggatgtaggttgttggcctgaggggagctacgtagccgaggtttgcgctgccgccgccaggcccggtccggttccagcctctgcccggacgctagccggcctggccatggctgaccgcgggtgcccgctggaggcggcgccgctgcctgccgaggtgcgggagagcctggctgagctggagctggagctgtcggaaggtgacatcactcaaaaaggatatgaaaagaaaagggcaaagctgcttgcacgttatataccgcttattcaaggaatagacccatctctgcaagcagagaatagaattcctgggccctcacaaaccacggccgctgcacccaagcagcagaagtctcggcccaccgcctcgagggatgagcgcttccggtcagatgtccacactgaagccgtgcaagcagctttggccaaatacaaagagaggaagatgcctatgccttcgaagagacgttctgtccttgtgcattcgtctgtggaaacctacacccctccagacacgtcgtctgcctcagaagatgagggctctttacggcgacccgggcgactcacctccactccgctccagagccattccagcgtcgagccctggctcgaccgggtcattcagggctcgtccacctcatcctctgcatcctccacctcatctcacccgggagggagacccaccactgctcccagtgctgcagccacgccgggggccgccgctaccactgcactcgcaggcctcgaggcccacacccacataggtgtccctgtgaacagcagagtgtcctccaaaatccagcagcttctgaacaccctgaagaggccaaagcgccctccactgaaggagttctttgtggatgattttgaggaattgttggaagttcagcaaccagatccaaatcagccaaagcctgagggaagcgagacgagtgtgctgagaggggagcctctcactgcaggtgtcccccgaccgccgtcgctgttggccaccttgcagcgctggggcacaacacagcccaaatccccctgtctgactgccttggatacaactgggaaagccgtctacactctcacctatggtaaactttggagtcggagtttaaaactagcttatactctacttaataaactgacaagtaagaatgaacctctacttaaacctggagacagagtggcgctcgtgtttccgaatagtgaccctgtgatgttcatggttgcattttatgggtgtctcctggcagagctggttcctgtccccatagaagtgccattaacaagaaaggatgcaggcagccagcaggttgggtttctgctgggcagctgtggagtcttcttggccctgaccacagacgcttgtcagaaaggcctccccaaggcacagacaggagaggtggcagctttcaaaggttggcccccgctctcctggctagtgattgatgggaagcatctagccaagcccccaaaggactggcaccctctggcccaggacacagggactgggactgcctacattgagtataaaaccagcaaagaaggcagtacggtgggggtcacagtgtcccacgcatccctgctggcacagtgccgggctctgacccaggcgtgcgggtactcagaagctgaaacattaacaaacgtgctggatttcaaaagggatgctggtctgtggcatggcgtgttaacaagcgtcatgaacaggatgcacgtggtcagcgtcccctacgcgctgatgaaggcgaacccactctcctggatccagaaagtgtgcttctataaagctcgggccgcgctggtgaagtcgcgagacatgcactggtctctcctagctcagcggggccagagggacgtcagcctcagctcactgcgcatgctgattgtggccgatggtgccaacccgtggtcgatctcctcctgtgacgccttcctcaacgtcttccagtccagaggtctgaggccagaggtcatctgtccttgtgcaagttctcctgaggcgctgactgtcgccatccgcaggccacctgatctgggaggaccacctccaagaaaagcagtcctgtcgatgaacggtctaagttatggtgttatcagagtggatactgaagaaaagttgtcagtccttactgttcaggacgttggtcaggtgatgcctggagctaatgtatgtgttgtgaagttagaaggtaccccttatctttgtaaaactgatgaagtgggagaaatatgcgtcagttccagtgcaactggcacagcgtactatggattgcttggaatcacgaagaatgtgtttgaggcagttccggtcaccacaggaggagcacccatctttgacaggccattcaccaggacaggcctgctgggcttcatcgggcctgacaacctggtcttcatcgtgggcaaactggacgggctgatggtcactggagttcgcagacacaatgcagatgacgttgtggccaccgcactggccgtggagcccatgaagtttgtctacagaggcaggtgatgcgctgcggacccccacgccgggagtagattccttcatttgcagctcgggaagtctttgtgcagtagatggaaagcccagcaaacttgaattcacaaagcctaaaaattgttgtacatcagaaaactcctaaagtaaaaggaaaatatttgcagcaat

SEQ ID NO: 127263 - DNA, 8593 bp, Homo sapiens
  Payload ID: 4910
  Gene Symbol: DIP2B
  Gene Name: disco-interacting protein 2 homolog B
  Uniprot ID: Q9P265
  ENST ID: ENST00000301180
  CDS Start-End: 35-4765
tcttgtcttccggagtgtggctggcggagctgggatggcggaacgaggcctggagccgtcgccggccgcggtggcggcgctgccgcctgaagtgcgggcgcagctggcggagctggagctggagctctcggagggggacatcacccagaagggctatgaaaagaaaaggtccaaactcctatctccttacagcccgcagacacaagaaactgattcagcagtacagaaagaacttagaaaccagacacctgctccatctgcagctcaaacttctgctccctctaagtaccaccgaactcgatctgggggagccagggatgaacgatatcgatcagatatccacacagaagcagttcaggctgcactggcaaagcataaagaacagaagatggctttgcccatgccaaccaaaaggcgatccacatttgttcagtctcctgcagatgcctgcacacctcctgacacatcttcggcctctgaggatgagggctctctgagacgccaagctgcgctctctgctgccttgcaacagagcttacagaatgctgagtcctggatcaaccgttcaattcagggatcgtccacttcttcatccgcatcttctacgctgtcccacggagaggtcaaaggaaccagtgggtctctagctgatgtatttgccaatactcgaatagagaatttctctgctcctcctgatgtcactacaactacctcttcctcctcatcatcttcctcaattcgcccagcaaacattgacctgcccccctcggggatagttaaaggcatgcacaaaggatccaacaggtccagccttatggatacagctgatggtgttcctgtcagtagcagagtatctacaaaaatccagcagcttctgaacactctgaaacgacccaaaaggcctcccttaaaggaattttttgtggatgactctgaagaaattgtggaagtacctcagccagaccccaaccagcccaagccggagggacggcagatgacccctgtgaaaggagagcctttaggagtcatctgtaactggcctcctgctcttgaatctgccctgcagcgctggggtaccactcaagcaaaatgctcctgtctgactgcactggacatgacagggaaaccagtttacactcttacatatggaaagttgtggagcagaagtttaaagttggcctacacacttcttaataaactggggaccaaaaatgaacctgtgttaaaacctggagacagggtagccctggtttaccccaacaatgatccagtcatgtttatggtggctttctatggatgcctcctggcagaagtgattccagtgcctatagaggtacctcttaccagaaaggatgctggaggtcagcagattggcttcttgctaggaagctgtggtattgccttagctcttaccagtgaagtttgtctaaaaggactgccaaaaacccagaatggagaaattgtacagtttaaaggttggccccggctcaaatgggttgtaacagattccaagtacctttcaaagccaccgaaagactggcagccacacatctcacctgctgggacagaaccggcatacattgagtataaaacaagcaaagaagggagtgtaatgggagttacagtatcccggcttgcaatgttgtctcactgccaagctctgtcgcaggcctgcaattattctgaaggggaaacaatagtaaatgtcttagactttaagaaggatgctgggctgtggcacggcatgtttgcgaatgtaatgaataagatgcacacaatcagcgtaccctactctgttatgaaaacctgtcctctctcttgggtccaaagagtacatgctcacaaagccaaggtagctttagtaaaatgtcgggacttgcactgggctatgatggcacatcgggaccaaagagacgtgagcttgagttccctccgaatgttaattgtgactgatggagctaacccctggtccgtgtcatcctgtgatgccttcctgagtctgttccaaagtcatggactgaagcctgaggccatctgtccgtgcgccacgtctgctgaagccatgactgtagcaatccgcaggcctggagttccaggagcccctttgccaggaagagccattctctcaatgaatggattgagctatggggtaatacgggtcaatactgaagataaaaattcagcactgacggtccaggatgtagggcatgtaatgcctggtgggatgatgtgcattgtgaaaccagatggacctccccagctctgcaaaacagatgaaattggagaaatctgtgttagctccagaactggaggcatgatgtactttgggcttgctggtgtgacaaaaaatacatttgaggtaattccagtgaattctgcaggctctcctgttggggatgtgccattcatccgatcaggattgctggggtttgtagggccgggtagtttggtgttcgtggttgggaaaatggatggcttactgatggttagtggtcgaagacataatgctgatgacattgttgctactggattggctgtagaatcaataaagactgtttatagaggaagaattgctgtgttttctgtgtctgtattttatgatgagcgcattgtggtggttgcggaacaaagacctgatgcttctgaggaagatagtttccagtggatgagccgcgtgctgcaggcgatcgatagcattcatcaagtgggggtttattgtcttgctctggtgccagccaatacattgccaaaaactccactaggaggaatccatatatctcagacgaaacaactctttctggagggatcactgcatccttgcaacatcctcatgtgcccccatacatgtgtgacaaacttgccaaagccccggcaaaaacaaccaggtgtaggccctgcttccgtgatggttgggaatctggttgctggaaaacgtatagcacaagctgctggaagggatctgggacaaatagaagagaatgatttggtgaggaagcaccagtttctggcagagatcctacagtggcgagcccaggcgactcctgaccatgtactcttcatgctgttaaatgccaagggaaccactgtatgcacagccagctgccttcagcttcataagcgagcagagaggattgcatctgttcttggtgataagggacatctaaatgcaggagataatgtggtgttgctctatccacctggcattgagttaatcgccgccttctatggctgcctgtatgcgggctgtatacctgtgaccgtcagacctccacatgctcagaacctcacggccacgctgcccactgtccgaatgattgttgatgtcagcaaagcagcctgtattctcaccagtcagaccctaatgaggctactgaggtcccgagaggcagcagcagctgtggatgtgaaaacctggccaaccatcattgacacagatgatttacccaggaaaaggttacctcagctgtataaaccgcccactcctgagatgttggcatatcttgattttagtgtctccacaactggcatgcttacaggagtgaagatgtcccactctgcagtgaacgctctgtgtcgagccatcaagctccagtgtgagttgtactcttctcggcagatcgccatctgccttgacccttactgtggacttggcttcgcgctctggtgtctctgcagtgtctattcaggccaccagtctgtcttaattcctcctatggagttagagaacaaccttttcctctggctctccacagtcaaccagtacaaaataagggacactttctgctcctattcagtgatggagctctgcaccaaaggtcttgggaaccaagtggaagtgctaaagaccagagggatcaacctctcctgcgtccggacctgtgtggtggtggcggaggagaggccccgcgttgcactccagcagtccttctctaagctcttcaaagacatcgggctgtccccgcgggctgtcagcaccacttttggatcaagagtcaatgtagcaatatgtttacagggaacctcagggcctgatccgactactgtgtatgtggatctgaaatcactaagacatgacagggttcgtctcgtggaacgtggcgcccctcagagtttgcttctctcagagtctggaaagattttacctggagtgaaagtggttattgttaatcctgagaccaaagggccggttggagactctcaccttggagagatttgggtgaacagtccccatacagccagcggctactacaccatctatgatagcgagactcttcaagctgatcatttcaacactcgcctcagctttggagatgcagctcagacactctgggctcggacaggataccttggttttgtccgccggaccgagctcacagcggccactggagagcgtcatgatgcattgtatgtggtgggagcgctggatgaaacactggagctgagaggattacgataccacccaattgatattgagacctcggtgtcccggatccacagaagcattgctgaatgtgccgtgttcacatggaccaacttgcttgtggtggttgtggaactgtgcggctctgaacaggaagccctagatctggtcccattagtgaccaacgtggtcctggaagagcattacctcatcgttggcgtcgtggttgtggtggacccaggtgtcatcccgatcaactccagaggagagaagcagaggatgcacctccgtgatagcttcctagctgaccagttagaccccatctacgtggcttataacatgtaaccagccttgtggggactgcagtgggccattctgaagaatcacaaagacagaagacctctggctaagagcaggcttcaaacgatgtgaaataagctgagatggctacatgatattcttcatctcatcctgtgggattctgcaatcataaaacacaggaaaggggaattctgtgatggcaaatgaaaaaaatgttaacatttggtagacatgtgctttgacatagcgtgagcagcacattactaaagcaattacatgcatgttgcatttttttcatctgttgtacatagttgtatttttatctaatgccattttagaattttctaagggaatttaatgaattcacatgaaaggggtagtctgagtgacacagttccccactccgtactgtattttgccattctgccgtagctagatgttctgtggggtttgttaacatggaactactcagctttctttcagtcaacccataagcaaatcagataacccactgactatgagaattactttatatagataattcttgactgtaaaacattttgaccagtgttttacaacatgtacataagaatacacataattcaactagagatttgaagaattggcttgtatagttataacaaccacagtagaaacatttctactttgagagaatttcaatattctcttaatgttgtgtaattgattaggtaactaaaaagcgcaaattgttggcaggttttgctgcacattgttctatgtctttgttggctggtgtattttataaactaaagctgcctatgtttctttttaaagctcgcattcccagaatcagcttaggcttctatgaattcagcctgtttctaaaagctgaaaatctcagtttaaaaatcaaaatgttaacacaaagctaagattcatcagagcccaccctattctaaggaaccacaataacttactctggccccagtgttaaaacgatctttcagatttagagtgactatgtaagaatttaggatttcctcttttccaggcacattgtaaactgtgtctacagtttatccatataacttctcttctgaaaactgaggagtgtcctctgttcttccagttcacgagggcagggggtttaaaacaagaatgataggccaggaaggcagtggggatccaccatcacatggaactgtaaggccatataactacacaaaactgaccaatctgggttgccaaagcagccaggcttatgctgaaaccggggaagtctgacatatgcaggaaactcttttgaaataactttggtgcccaggccaagtagaatgagatgagactgagtttggcctctggctcggtttcctttctttggtctgatacttcatgtatttgaatatagttaaatcgtattatttttttcttaacagaaatatttttaaaaatgaaaaagtactcaaaagtgagaagagttaacttgtcaaagcagaatggttctctttgacccactctggtctattgtgtaaatatttatttagactattttaataatacatattatttaccccactgtaacatcatgtaaactaagtatgtttttaaacaatttttaagacttgtaattaccctgaaaataaggtttataatgcaaagaccagctcctttgcggtggcagtgctctagggctgccattacacggtcttgtgatgtgactaaaagccactttgtgactcccttcatgtaatcctcttttcctccccactcctccacagagggcagagctcaggacatttgccagttccagatctctttttcagcattttcatggaattaatttacacgtaatgagggaagtcctaggatggatagaaaaaaagcacttacattggggcacacaggaaatcccagtgtctagcaatggtttggtttgcagagaacacagcctgatacttaattttcttaaaactatttttaatgatccactaaacaaagcaggggatcctgaagctgatataaataagtctagctctataatccccaagttctaaaagttatggttagatgctattctgtgggttgctttgataattcttactaacacagattagggtataggcatctagagatgcactgtccactgtaaatactataatgagagccacatctgtaatttaaatgtttctagtaaccacatttttttaaaagtaaaaagaaacccatggtattgatttaaatatattttatttaacccaatagctcaaaaacactatcatttcaacataggatcaatataaaaattattaatgagttattttactttttttcatattaggcctttgaaattcagtgtgtattaaacacatctcaattcaaaccatcaccatatttcaagtctttgtagccaaatgtgactagtggctaccatattagacagtgcagatctatactcattccttcaaatacattactctgttaatctcaaagtgtggccaactcccatttacttagaggctgattatctagttttgtagttcctcaggcctctaatttattttttgctttctgctttattgatcttttgcatgtcccccaaagccagaatctgctcatggaggaaggaaggctaagaactgtccttgaggaacttcatcagtaactctggtaaagcatcctgtggagggagaggagagcccagtcatttgcttagatggtgtttgtgggatcacctgcagatttaaagcctactctgccacagactcgagtaagaaaatgttctcttgatgacacagtgctcctactctatccacattaagtagcacttttgtggtagaactgattcttaaggcaggcctgaaaggccattactaatagaaacacagcctttccaatcctctggaacatattctgtctgggtttttaatgtctgtggaaaaaaactaaacaagtctctgtctcagttaagagaaatctattggtctgaaggtttctgaacctctttctggttctcagcagaagtaactgaagtagatcaggaaggggctgcctcaggaaaattcctagatcctaggaattcagtgagaccctgggaaggaccagcatgctaatcagtgtcagtgaatccacagtctttacttcctgcctcataaagggccaggtctccccagtaccaagtcctttcctcatgaagttgtgttgcctcaggctgtttagggaccattgcctgtcttggtcacatgagtctgtctccttactttagtccctgggcaatccttgcttaatgcttttgttgactcaacaagggcccgaggccttaggttttctattaaggtctctgccccaggcatggtgctctatatcttggccaaataaattactttccttgaatatccaggaatcttttagtctaaagcaatgaggagttatcacctcatcctcaaactccaacaagatctatgccttagtgttgtttttgttgtctgctttgatgtaaaagcaagagtatttggagcaagaagctgcaatgcgccaaatacacaataggccttttctttatcattcatacgacatttctggtttaggtgtatgtagttgggccatgttacttgtccagaggaagagactaaagatataagaataattttttagtcctaaatgctgttttgtttactttctgtcaagatatttacccgtgtcaaattcaaactacagtactgtgtaattatgtataaagtttttttatttatttgaagttagactagatatacgtttttaaatttaacatctggctggacagtgttctattaactcattgaatgtgtttcctttgtcttgtgttaataaatattgatgcctgattctgtttaa

SEQ ID NO: 127264 - DNA, 3514 bp, Homo sapiens
  Payload ID: 4910
  Gene Symbol: DIP2B
  Gene Name: disco-interacting protein 2 homolog B
  ENST ID: ENST00000546732
  CDS Start-End: 1-193
agctcttaccagtgaagtttgtctaaaaggactgccaaaaacccagaatggagaaattgtacagtttaaaggttggccccggctcaaatgggttgtaacagattccaagtacctttcaaagccaccgaaagactggcagccacacatctcacctgctgggacagaaccggcatacattgaggggaaacaatagtaaatgtcttagactttaagaaggatgctgggctgtggcacggcatgtttgcgaatgtaatgaataagatgcacacaatcagcgtaccctactctgttatgaaaacctgtcctctctcttgggtccaaagagtacatgctcacaaagccaaggtagctttagtaaaatgtcgggacttgcactgggctatgatggcacatcgggaccaaagagacgtgagcttgagttccctccgaatgttaattgtgactgatggagctaacccctggtccgtgtcatcctgtgatgccttcctgagtctgttccaaagtcatggactgaagcctgaggccatctgtccgtgcgccacgtctgctgaagccatgactgtagcaatccgcaggcctggagttccaggagcccctttgccaggaagagccattctctcaatgaatggattgagctatggggtaatacgggtcaatactgaagataaaaattcagcactgacggtccaggatgtagggcatgtaatgcctggtgggatgatgtgcattgtgaaaccagatggacctccccagctctgcaaaacagatgaaattggagaaatctgtgttagctccagaactggaggcatgatgtactttgggcttgctggtgtgacaaaaaatacatttgaggtaattccagtgaattctgcaggctctcctgttggggatgtgccattcatccgatcaggattgctggggtttgtagggccgggtagtttggtgttcgtggttgggaaaatggatggcttactgatggttagtggtcgaagacataatgctgatgacattgttgctactggattggctgtagaatcaataaagactgtttatagaggaagaattgctgtgttttctgtgtctgtattttatgatgagcgcattgtggtggttgcggaacaaagacctgatgcttctgaggaagatagtttccagtggatgagccgcgtgctgcaggcgatcgatagcattcatcaagtgggggtttattgtcttgctctggtgccagccaatacattgccaaaaactccactaggaggaatccatatatctcagacgaaacaactctttctggagggatcactgcatccttgcaacatcctcatgtgcccccatacatgtgtgacaaacttgccaaagccccggcaaaaacaaccaggtgtaggccctgcttccgtgatggttgggaatctggttgctggaaaacgtatagcacaagctgctggaagggatctgggacaaatagaagagaatgatttggtgaggaagcaccagtttctggcagagatcctacagtggcgagcccaggcgactcctgaccatgtactcttcatgctgttaaatgccaagggaaccactgtatgcacagccagctgccttcagcttcataagcgagcagagaggattgcatctgttcttggtgataagggacatctaaatgcaggagataatgtggtgttgctctatccacctggcattgagttaatcgccgccttctatggctgcctgtatgcgggctgtatacctgtgaccgtcagacctccacatgctcagaacctcacggccacgctgcccactgtccgaatgattgttgatgtcagcaaagcagcctgtattctcaccagtcagaccctaatgaggctactgaggtcccgagaggcagcagcagctgtggatgtgaaaacctggccaaccatcattgacacagatgatttacccaggaaaaggttacctcagctgtataaaccgcccactcctgagatgttggcatatcttgattttagtgtctccacaactggcatgcttacaggagtgaagatgtcccactctgcagtgaacgctctgtgtcgagccatcaagctccagtgtgagttgtactcttctcggcagatcgccatctgccttgacccttactgtggacttggcttcgcgctctggtgtctctgcagtgtctattcaggccaccagtctgtcttaattcctcctatggagttagagaacaaccttttcctctggctctccacagtcaaccagtacaaaataagggacactttctgctcctattcagtgatggagctctgcaccaaaggtcttgggaaccaagtggaagtgctaaagaccagagggatcaacctctcctgcgtccggacctgtgtggtggtggcggaggagaggccccgcgttgcactccagcagtccttctctaagctcttcaaagacatcgggctgtccccgcgggctgtcagcaccacttttggatcaagagtcaatgtagcaatatgtttacagggaacctcagggcctgatccgactactgtgtatgtggatctgaaatcactaagacatgacagggttcgtctcgtggaacgtggcgcccctcagagtttgcttctctcagagtctggaaagattttacctggagtgaaagtggttattgttaatcctgagaccaaagggccggttggagactctcaccttggagagatttgggtgaacagtccccatacagccagcggctactacaccatctatgatagcgagactcttcaagctgatcatttcaacactcgcctcagctttggagatgcagctcagacactctgggctcggacaggataccttggttttgtccgccggaccgagctcacagcggccactggagagcgtcatgatgcattgtatgtggtgggagcgctggatgaaacactggagctgagaggattacgataccacccaattgatattgagacctcggtgtcccggatccacagaagcattgctgaatgtgccgtgttcacatggaccaacttgcttgtggtggttgtggaactgtgcggctctgaacaggaagccctagatctggtcccattagtgaccaacgtggtcctggaagagcattacctcatcgttggcgtcgtggttgtggtggacccaggtgtcatcccgatcaactccagaggagagaagcagaggatgcacctccgtgatagcttcctagctgaccagttagaccccatctacgtggcttataacatgtaaccagccttgtggggactgcagtgggccattctgaagaatcacaaagacagaagacctctggctaagagcaggcttcaaacgatgtgaaataagctgagatggctacatgatattcttcatctcatcctgtgggattctgcaatcataaaacacaggaaaggggaattctgtgatggcaaatgaaaaaaatgttaacatttggtagacatgtgctttgacatagcgtgagcagcacattactaaagcaattacatgc

SEQ ID NO: 127265 - DNA, 7888 bp, Homo sapiens
  Payload ID: 4911
  Gene Symbol: DIP2C
  Gene Name: disco-interacting protein 2 homolog C
  Uniprot ID: Q9Y2E4
  ENST ID: ENST00000280886
  CDS Start-End: 91-4761
ctcggtgcggttccgccgggcgcgaggagccgccgagacctccgcctgcgaacaaagaggaggccgtgcggggcgcggcgcccgcggagcatggcggaccgcagcctggagggcatggcgctgcccctggaggtgcgggcgcgcctggccgagctggagctggagctgtcggaaggtgacatcacacaaaaaggatatgaaaagaagaggtcaaagttaattggagcctaccttccgcagcctccgagggtggaccaagctttgccgcaagaacgccgggctcctgtcactccttcctccgcctctcgctaccaccgccgacggtcttcagggtcacgagatgagcgctatcggtcagacgtccacacggaagctgtccaggcggctctggccaaacacaaagagcggaagatggcagtgcctatgccttccaaacgcaggtccctggtcgtgcagacctcgatggacgcctacacccctccagatacctcttctggctcagaagatgaaggctcagtgcagggggactcccagggcacccccacctccagccagggcagcatcaatatggagcactggatcagccaggccatccacggctccaccacgtccaccacctcctcgtcctctacgcagagcgggggcagcggggctgcccacaggctggcggacgtcatggctcagacccacatagaaaatcattctgcacctcctgacgtaaccacgtacacctcagagcactcgatacaggtggagagaccgcagggttccacggggtcccggacagcgcccaagtacggcaacgccgagctcatggagaccggggatggagtaccagtaagtagccgggtgtcagcaaaaatccagcagcttgtcaataccctcaaacgaccgaaacgaccacctttacgagaattctttgtcgatgactttgaagaattattagaagttcaacaaccggatccgaaccaaccaaagccggagggggcccagatgctggccatgcgcggagagcagctgggcgtggtcacgaactggccgccgtcgctggaggccgcactgcagaggtggggcaccatctcgcccaaggcgccctgcctgaccaccatggacaccaacgggaagcccctctacatcctcacttacggcaagctgtggacaagaagtatgaaggtcgcttacagcattctacacaaattaggcacaaagcaggaacccatggtccggcctggagatagggtggcactggtgttccccaacaatgatccggctgccttcatggcggctttctacggctgcctgctggccgaggtggtccccgtgcccatcgaggtgccgctcaccaggaaggacgcagggagccagcagataggtttcttgcttggaagctgtggagttactgtagccttgactagtgacgcctgccataaaggacttccaaaaagcccaacgggagagatcccacagtttaaaggttggccaaagctgctgtggtttgtcacagagtctaaacatctctccaaaccgccccgagactggttcccacacattaaagatgccaataacgacactgcgtatattgagtacaagacgtgtaaggatggcagtgtgctgggtgtgacggtgacgaggactgcgctgctgacacactgccaggccctgacgcaggcgtgtggctacacggaagctgaaaccattgtgaatgtgctggatttcaagaaggacgtcgggctctggcatggcatcctgacaagcgtcatgaacatgatgcatgtgatcagcatcccgtactcgctgatgaaggtgaaccctctctcctggatccagaaggtctgccagtacaaagcaaaagtggcgtgtgtgaaatcgagggatatgcattgggcattagtagcacacagagatcagagagacatcaacctctcctctctgcgaatgctgatagtggcggacggcgcgaacccctggtctatttcttcttgcgatgcatttctcaatgtcttccaaagtaaaggccttcgacaggaggtcatctgtccttgtgccagctcgccagaggccctcactgtggccatccggaggcccacggatgacagtaaccagcccccgggccggggtgtcctctccatgcatggactgacctatggggtcattcgtgtggactcggaagagaagctgtccgtgctcaccgtgcaggatgtcggcctcgtgatgcctggagccatcatgtgttcagtgaagccagacggggttcctcagctgtgcagaacggatgagatcggggagctgtgtgtgtgtgcagttgcgacgggcacgtcctactatggcctctctggcatgaccaagaacacctttgaggtgtttcccatgacaagctccggggctccgatcagtgaatacccattcataaggacaggcttgctggggttcgtgggtcccggaggcctcgtcttcgtggtgggcaagatggatggcctcatggtggtcagcgggcgcaggcacaacgccgacgacatcgtggccactgcgctggccgtagaacccatgaagtttgtctaccggggaaggatagccgtgttctcggtgaccgtgctgcacgacgagaggatcgtgatcgtggctgagcagaggcctgactccacggaagaggacagtttccagtggatgagccgtgtgctgcaggcgattgacagtatacatcaagttggagtttattgcctggccttggtgccagcaaacaccctccccaaaaccccgcttggtgggatccatttatcagaaacaaaacagctttttctggagggctctctgcacccctgcaatgtcctaatgtgcccccacacctgcgtcacaaacttgcctaagcctcgacagaagcagccagaaatcggccctgcctctgtgatggtggggaacctggtctctgggaagagaatcgcccaggccagtggcagagacctgggtcagatcgaagataacgaccaggcacgcaagttcctgttcctctcagaggtcttgcagtggagagcacagaccaccccggaccacatcctctacacgctgctcaactgtcggggtgcgatagcgaactcgctgacctgcgtgcagctgcacaagagagctgagaagatcgccgtgatgctgatggagaggggccaccttcaggacggcgaccacgtggccttggtctaccccccaggaatagacctgatagcagcgttttatggttgcctgtacgcaggctgtgtgccaataaccgtccgtcccccgcacccacagaacatcgcgacgacgttgcctaccgtcaagatgattgtggaggtgagtcgctctgcctgtctgatgacgacacagctgatctgtaagttgctgcggtccagggaggcggcggcggctgtggacgtcaggacgtggcccctcatcctggacacagatgatttgccaaagaagcggcctgcccagatctgcaaaccttgcaacccagacactcttgcatatctcgacttcagcgtgtccacaactgggatgctagctggcgtaaagatgtctcacgcagccaccagtgccttctgccgttccattaagctgcagtgtgaactttacccctctagagaagtggccatctgcctggacccttactgtggactgggatttgtcctctggtgcctctgcagtgtgtattctgggcaccagtccatcctgatcccgccctctgagctggaaaccaaccccgccttgtggcttcttgccgtgagtcagtacaaagtccgagacacgttttgctcctactccgtgatggagctgtgcaccaaggggctgggctcgcaaacagagtccctcaaggcgcgagggctggacttgtcccgagtgaggacctgcgtggttgtggcggaagagaggcctcggatcgcactcacacagtcgttctcaaagctgtttaaggacctgggccttcacccgcgggccgtcagcacctcgttcggttgcagggtgaacctggcgatttgcttgcagggaacctcaggacctgacccaaccactgtctacgtggacatgagagccctgagacacgacagagtccgcttagtggaaagaggatcccctcatagtctgcccctgatggaatcgggaaagatacttccaggggttcggattataattgccaacccagaaacaaaaggaccgctgggggactcacaccttggagagatttgggttcacagtgcccacaatgccagcggttatttcactatttacggagacgaatccctccagtcagatcacttcaactcaagactaagttttggagacacccagaccatctgggcacgcacaggctacttggggttcctgcggagaactgagctcacagatgcaaatggagagcgccatgatgccctctacgtggtaggggcactggacgaagccatggagctgcggggcatgcggtaccacccaatcgacattgagacctcggtcatcagagcccataaaagcgttacggaatgtgctgtgtttacctggacaaatttgttggtggttgtggttgagctggatgggtcggaacaagaagccttggacctggttcccttggtgaccaacgtggtcctggaggagcactacctgatcgtcggagtggtggtcgtggtggacatcggcgtcatccccatcaactcccgtggggagaagcagcgcatgcacctgcgagacgggtttttggcagaccagctagaccccatctatgtggcctacaacatgtagtctcgtctcttggcttccatggacttttctagagatgtagacattgttctccgtgtccactgaagcgtgcagacacagggcaacactcaccagaatacagccatttgtggtgagagtggaggaggaagaggaggaggaagaggacttctcacagcagccacgattggcatgggggtgaaatgtgaatttaccactgaatttcgctcagaaggactttggattactgccttcagtttgttggaaaagcccatttcaaaactttcttttcttttctttcttttttaattattggataataagtgctttcttcgtaaatgtggtattttgttaagccgaaatagcaattaaaaaaatatcctgccctccagatgggttcttttaaacaatttatgtagtgtgacaaagaattgttttctctgttttaatgtgtcatgaaatcttaatgacatggatctgttactaatttaagccattgctagatctcatccttttaggaaagtttgaggtacgagaaaaccttccaaatagcaccttccaattagataatagcagctttctttgtcagaaatgtgctgaagaaacaaaggctggtatacggccttcgaagttagtatagaatgagaagaaattataaataaggtgtatttcggcaattatcttgcaaatatctttgtactaaactaaaaagataaaataagttaacttcctcaatatgtaattatgtacaaaacgtttaatttattttgatctctttagaactataaaagagaaaaacattcaagaatattaaagtcttgtaatgtttgctaatataaaaaagtgttgtattatcttgcgtggatagtatcacaacaaatatatatatatgaaatataaattcactaatgaacaaaggagattttaaagtttaagatgcagaacttgtcacttgcatggtgtgccccccgtactcacatacactctgctgttgccagcagtcgcagaccgcaggagccctgtctaaaagtttcttctagaaccagagaccagcaagtgaaattattgccatctcaaggatggcaaaagaattcaaagctcaatgtgcactatttttttctttgctgtgggacaacagtgaatgtgtttatgccagcgtgtgctgatgatactgaggggctttaggttggcaaatagcactgttttcttagctgcaagaattcattgcacaatgtttttcatcatttttgttaatgtcatctttttttggtccttgctacgaaaaggaatgcgattctgtggtcattcgcactgggttgcattgattccccctctgatggccaatgtggagtggacaaagtgtccggaactcacatcggtgatcgtcccctcgtcttaagacccagcccgctctgtgtgagcctctggggctccctcgctcagtgagcacagttccccgggggttcatgccagagctccggctgaagcaagaagtcctccagctgcgtcgtttgccgcctgtggacgagtgcgccccagtttctgccctggcagctcctggccacaccttctcagagctcacctgtgcacttctaaattgaattggcccacggtgtccaaccaagaaggagcatctgcactccgagaaagatgtgttctgtaactgccccagtgtgaccccgcagtggctctcggtgctagatatgcatgactaagattgatgctgggcaaaatgtagatgatctttcattatgttgtgggcagcgtctttctctgcctttgctatatgcagtcagcagtaagccttttgctaaaagagttttgtttgacttctgagatccaaggctgattgttgttaaaaaaaaaaaaaaaaaaaaagtggcacatttaaaaaaatgtgtctgcatatgtggtgcatccttccatctccacaaaccatttgattcttgaaatattgtttgacctcattgctgtgtgtgaatatttctccacatgcttcagatgcacattcctagtctctgcttcctaaggggggaaccaccacacattggggggaaaaaagacattttcctacacccacccaccttgttgaaagggaggtaggtttggggcttcaggccaggcactgactatgaaacattagctgcagtgtgcaggacagctttgaggtccagctgaagtcaggaagcaaaacaaatgtagatgtcacttcaaacataatttcaactgtcaccagatcaactctacattcaaggagtgtggacgctgcagtgcagttgtgagggcagttagcagccgcctcttctgcatcctgtcaactctgattagttagagtttaggctcaaaagagttggtggactgagattgaaatttggttgtgcaagagaaaggaaaggagacacttagtaccaccagtttcagcaataaagaagggtcattctgtattcaaaattgtactgtagataaatcattcatgagattgtaaaaaatgtttgtcttgtgaccttgtgcttttgaagtcagacaaaaccgtgtaatcaacttgcacaaaaagagggtacacagtgaacatataaacacagacctaatcaaacaggagcagattcctcatggtgcttgtttattatatatatttaatcctgcttgacactttacccaagggagatggtcccttttatcagttgaatgttagcagcgttatttcagagtgtggtgactggttagagaaactcatgtactcaaccagccacagtttcaaacaaaatttttatgtgcaaaggacagcaaccttcttgtatgttaaaccaccagtacgctttgtacatctgtgataacgcctgttttatattcaaatgaacaaataaaagcttttatttttgttgctctgaaaatagcagtttcttaattggtcccctggaaagatgtctgggacagctttaatcccgggaaggaagtgactcctacagggaaatgtatctgactctgtttacataatttgttgcattacttagtacagataatcatactttgaaaaatgtttaaattttgatgtgggcatttattgctaaaaataattcctatggcaacaaatgttttgtgaaatgttttttttaattcttttaaatatatctaaatatatttgttcacattt

SEQ ID NO: 127266 - DNA, 7749 bp, Homo sapiens
  Payload ID: 4911
  Gene Symbol: DIP2C
  Gene Name: disco-interacting protein 2 homolog C
  ENST ID: ENST00000381496
  CDS Start-End: 1-4614
actgaacttcattttccttctcttgcaggtgacatcacacaaaaaggatatgaaaagaagaggtcaaagttaattggagcctaccttccgcagcctccgagggtggaccaagctttgccgcaagaacgccgggctcctgtcactccttcctccgcctctcgctaccaccgccgacggtcttcagggtcacgagatgagcgctatcggtcagacgtccacacggaagctgtccaggcggctctggccaaacacaaagagcggaagatggcagtgcctatgccttccaaacgcaggtccctggtcgtgcagacctcgatggacgcctacacccctccagatacctcttctggctcagaagatgaaggctcagtgcagggggactcccagggcacccccacctccagccagggcagcatcaatatggagcactggatcagccaggccatccacggctccaccacgtccaccacctcctcgtcctctacgcagagcgggggcagcggggctgcccacaggctggcggacgtcatggctcagacccacatagaaaatcattctgcacctcctgacgtaaccacgtacacctcagagcactcgatacaggtggagagaccgcagggttccacggggtcccggacagcgcccaagtacggcaacgccgagctcatggagaccggggatggagtaccagtaagtagccgggtgtcagcaaaaatccagcagcttgtcaataccctcaaacgaccgaaacgaccacctttacgagaattctttgtcgatgactttgaagaattattagaagttcaacaaccggatccgaaccaaccaaagccggagggggcccagatgctggccatgcgcggagagcagctgggcgtggtcacgaactggccgccgtcgctggaggccgcactgcagaggtggggcaccatctcgcccaaggcgccctgcctgaccaccatggacaccaacgggaagcccctctacatcctcacttacggcaagctgtggacaagaagtatgaaggtcgcttacagcattctacacaaattaggcacaaagcaggaacccatggtccggcctggagatagggtggcactggtgttccccaacaatgatccggctgccttcatggcggctttctacggctgcctgctggccgaggtggtccccgtgcccatcgaggtgccgctcaccaggaaggacgcagggagccagcagataggtttcttgcttggaagctgtggagttactgtagccttgactagtgacgcctgccataaaggacttccaaaaagcccaacgggagagatcccacagtttaaaggttggccaaagctgctgtggtttgtcacagagtctaaacatctctccaaaccgccccgagactggttcccacacattaaagatgccaataacgacactgcgtatattgagtacaagacgtgtaaggatggcagtgtgctgggtgtgacggtgacgaggactgcgctgctgacacactgccaggccctgacgcaggcgtgtggctacacggaagctgaaaccattgtgaatgtgctggatttcaagaaggacgtcgggctctggcatggcatcctgacaagcgtcatgaacatgatgcatgtgatcagcatcccgtactcgctgatgaaggtgaaccctctctcctggatccagaaggtctgccagtacaaagcaaaagtggcgtgtgtgaaatcgagggatatgcattgggcattagtagcacacagagatcagagagacatcaacctctcctctctgcgaatgctgatagtggcggacggcgcgaacccctggtctatttcttcttgcgatgcatttctcaatgtcttccaaagtaaaggccttcgacaggaggtcatctgtccttgtgccagctcgccagaggccctcactgtggccatccggaggcccacggatgacagtaaccagcccccgggccggggtgtcctctccatgcatggactgacctatggggtcattcgtgtggactcggaagagaagctgtccgtgctcaccgtgcaggatgtcggcctcgtgatgcctggagccatcatgtgttcagtgaagccagacggggttcctcagctgtgcagaacggatgagatcggggagctgtgtgtgtgtgcagttgcgacgggcacgtcctactatggcctctctggcatgaccaagaacacctttgaggtgtttcccatgacaagctccggggctccgatcagtgaatacccattcataaggacaggcttgctggggttcgtgggtcccggaggcctcgtcttcgtggtgggcaagatggatggcctcatggtggtcagcgggcgcaggcacaacgccgacgacatcgtggccactgcgctggccgtagaacccatgaagtttgtctaccggggaaggatagccgtgttctcggtgaccgtgctgcacgacgagaggatcgtgatcgtggctgagcagaggcctgactccacggaagaggacagtttccagtggatgagccgtgtgctgcaggcgattgacagtatacatcaagttggagtttattgcctggccttggtgccagcaaacaccctccccaaaaccccgcttggtgggatccatttatcagaaacaaaacagctttttctggagggctctctgcacccctgcaatgtcctaatgtgcccccacacctgcgtcacaaacttgcctaagcctcgacagaagcagccagaaatcggccctgcctctgtgatggtggggaacctggtctctgggaagagaatcgcccaggccagtggcagagacctgggtcagatcgaagataacgaccaggcacgcaagttcctgttcctctcagaggtcttgcagtggagagcacagaccaccccggaccacatcctctacacgctgctcaactgtcggggtgcgatagcgaactcgctgacctgcgtgcagctgcacaagagagctgagaagatcgccgtgatgctgatggagaggggccaccttcaggacggcgaccacgtggccttggtctaccccccaggaatagacctgatagcagcgttttatggttgcctgtacgcaggctgtgtgccaataaccgtccgtcccccgcacccacagaacatcgcgacgacgttgcctaccgtcaagatgattgtggaggtgagtcgctctgcctgtctgatgacgacacagctgatctgtaagttgctgcggtccagggaggcggcggcggctgtggacgtcaggacgtggcccctcatcctggacacagatgatttgccaaagaagcggcctgcccagatctgcaaaccttgcaacccagacactcttgcatatctcgacttcagcgtgtccacaactgggatgctagctggcgtaaagatgtctcacgcagccaccagtgccttctgccgttccattaagctgcagtgtgaactttacccctctagagaagtggccatctgcctggacccttactgtggactgggatttgtcctctggtgcctctgcagtgtgtattctgggcaccagtccatcctgatcccgccctctgagctggaaaccaaccccgccttgtggcttcttgccgtgagtcagtacaaagtccgagacacgttttgctcctactccgtgatggagctgtgcaccaaggggctgggctcgcaaacagagtccctcaaggcgcgagggctggacttgtcccgagtgaggacctgcgtggttgtggcggaagagaggcctcggatcgcactcacacagtcgttctcaaagctgtttaaggacctgggccttcacccgcgggccgtcagcacctcgttcggttgcagggtgaacctggcgatttgcttgcagggaacctcaggacctgacccaaccactgtctacgtggacatgagagccctgagacacgacagagtccgcttagtggaaagaggatcccctcatagtctgcccctgatggaatcgggaaagatacttccaggggttcggattataattgccaacccagaaacaaaaggaccgctgggggactcacaccttggagagatttgggttcacagtgcccacaatgccagcggttatttcactatttacggagacgaatccctccagtcagatcacttcaactcaagactaagttttggagacacccagaccatctgggcacgcacaggctacttggggttcctgcggagaactgagctcacagatgcaaatggagagcgccatgatgccctctacgtggtaggggcactggacgaagccatggagctgcggggcatgcggtaccacccaatcgacattgagacctcggtcatcagagcccataaaagcgttacggaatgtgctgtgtttacctggacaaatttgttggtggttgtggttgagctggatgggtcggaacaagaagccttggacctggttcccttggtgaccaacgtggtcctggaggagcactacctgatcgtcggagtggtggtcgtggtggacatcggcgtcatccccatcaactcccgtggggagaagcagcgcatgcacctgcgagacgggtttttggcagaccagctagaccccatctatgtggcctacaacatgtagtctcgtctcttggcttccatggacttttctagagatgtagacattgttctccgtgtccactgaagcgtgcagacacagggcaacactcaccagaatacagccatttgtggtgagagtggaggaggaagaggaggaggaagaggacttctcacagcagccacgattggcatgggggtgaaatgtgaatttaccactgaatttcgctcagaaggactttggattactgccttcagtttgttggaaaagcccatttcaaaactttcttttcttttctttcttttttaattattggataataagtgctttcttcgtaaatgtggtattttgttaagccgaaatagcaattaaaaaaatatcctgccctccagatgggttcttttaaacaatttatgtagtgtgacaaagaattgttttctctgttttaatgtgtcatgaaatcttaatgacatggatctgttactaatttaagccattgctagatctcatccttttaggaaagtttgaggtacgagaaaaccttccaaatagcaccttccaattagataatagcagctttctttgtcagaaatgtgctgaagaaacaaaggctggtatacggccttcgaagttagtatagaatgagaagaaattataaataaggtgtatttcggcaattatcttgcaaatatctttgtactaaactaaaaagataaaataagttaacttcctcaatatgtaattatgtacaaaacgtttaatttattttgatctctttagaactataaaagagaaaaacattcaagaatattaaagtcttgtaatgtttgctaatataaaaaagtgttgtattatcttgcgtggatagtatcacaacaaatatatatatatgaaatataaattcactaatgaacaaaggagattttaaagtttaagatgcagaacttgtcacttgcatggtgtgccccccgtactcacatacactctgctgttgccagcagtcgcagaccgcaggagccctgtctaaaagtttcttctagaaccagagaccagcaagtgaaattattgccatctcaaggatggcaaaagaattcaaagctcaatgtgcactatttttttctttgctgtgggacaacagtgaatgtgtttatgccagcgtgtgctgatgatactgaggggctttaggttggcaaatagcactgttttcttagctgcaagaattcattgcacaatgtttttcatcatttttgttaatgtcatctttttttggtccttgctacgaaaaggaatgcgattctgtggtcattcgcactgggttgcattgattccccctctgatggccaatgtggagtggacaaagtgtccggaactcacatcggtgatcgtcccctcgtcttaagacccagcccgctctgtgtgagcctctggggctccctcgctcagtgagcacagttccccgggggttcatgccagagctccggctgaagcaagaagtcctccagctgcgtcgtttgccgcctgtggacgagtgcgccccagtttctgccctggcagctcctggccacaccttctcagagctcacctgtgcacttctaaattgaattggcccacggtgtccaaccaagaaggagcatctgcactccgagaaagatgtgttctgtaactgccccagtgtgaccccgcagtggctctcggtgctagatatgcatgactaagattgatgctgggcaaaatgtagatgatctttcattatgttgtgggcagcgtctttctctgcctttgctatatgcagtcagcagtaagccttttgctaaaagagttttgtttgacttctgagatccaaggctgattgttgttaaaaaaaaaaaaaaaaaaaaagtggcacatttaaaaaaatgtgtctgcatatgtggtgcatccttccatctccacaaaccatttgattcttgaaatattgtttgacctcattgctgtgtgtgaatatttctccacatgcttcagatgcacattcctagtctctgcttcctaaggggggaaccaccacacattggggggaaaaaagacattttcctacacccacccaccttgttgaaagggaggtaggtttggggcttcaggccaggcactgactatgaaacattagctgcagtgtgcaggacagctttgaggtccagctgaagtcaggaagcaaaacaaatgtagatgtcacttcaaacataatttcaactgtcaccagatcaactctacattcaaggagtgtggacgctgcagtgcagttgtgagggcagttagcagccgcctcttctgcatcctgtcaactctgattagttagagtttaggctcaaaagagttggtggactgagattgaaatttggttgtgcaagagaaaggaaaggagacacttagtaccaccagtttcagcaataaagaagggtcattctgtattcaaaattgtactgtagataaatcattcatgagattgtaaaaaatgtttgtcttgtgaccttgtgcttttgaagtcagacaaaaccgtgtaatcaacttgcacaaaaagagggtacacagtgaacatataaacacagacctaatcaaacaggagcagattcctcatggtgcttgtttattatatatatttaatcctgcttgacactttacccaagggagatggtcccttttatcagttgaatgttagcagcgttatttcagagtgtggtgactggttagagaaactcatgtactcaaccagccacagtttcaaacaaaatttttatgtgcaaaggacagcaaccttcttgtatgttaaaccaccagtacgctttgtacatctgtgataacgcctgttttatattcaaatgaacaaataaaagcttttatttttgttgctctgaaaatagcagtttcttaattggtcccctggaaagatgtctgggacagctttaatcccgggaaggaagtgactcctacagggaaatgtatctgactctgtttacataatttgttgcattacttagtacagataatcatactttgaaaaatgtttaaattttgatgtgggcatttattgctaaaaataattcctatggcaacaaatgttttgtgaaatgttttttttaattcttttaaatatatctaaatatatttgttcacattttgctgcaa

SEQ ID NO: 127267 - DNA, 757 bp, Homo sapiens
  Payload ID: 4911
  Gene Symbol: DIP2C
  Gene Name: disco-interacting protein 2 homolog C
  ENST ID: ENST00000421992
  CDS Start-End: 1-721
gacgcaggcgtgtggctacacggaagctgaaaccattgtgaatgtgctggatttcaagaaggacgtcgggctctggcatggcatcctgacaagcgtcatgaacatgatgcatgtgatcagcatcccgtactcgctgatgaaggtgaaccctctctcctggatccagaaggtctgccagtacaaagcaaaagtggcgtgtgtgaaatcgagggatatgcattgggcattagtagcacacagagatcagagagacatcaacctctcctctctgcgaatgctgatagtggcggacggcgcgaacccctggtctatttcttcttgcgatgcatttctcaatgtcttccaaagtaaaggccttcgacaggaggtcatctgtccttgtgccagctcgccagaggccctcactgtggccatccggaggcccacggatgacagtaaccagcccccgggccggggtgtcctctccatgcatggactgacctatggggtcattcgtgtggactcggaagagaagctgtccgtgctcaccgtgcaggatgtcggcctcgtgatgcctggagccatcatgtgttcagtgaagccagacggggttcctcagctgtgcagaacggatgagatcggggagctgtgtgtgtgtgcagttgcgacgggcacgtcctactatggcctctctggcatgaccaagaacacctttgagcatacttccaacaagggcaaataacattttatgaatgaagagagattactttaaaactaa

SEQ ID NO: 127268 - DNA, 646 bp, Homo sapiens
  Payload ID: 4911
  Gene Symbol: DIP2C
  Gene Name: disco-interacting protein 2 homolog C
  ENST ID: ENST00000434695
  CDS Start-End: 1-391
cgtgagtcagtacaaagtccgagacacgttttgctcctactccgtgatggagctgtgcaccaaggggctgggctcgcaaacagagtccctcaaggcgcgagggctggacttgtcccgagtgaggacctgcgtggttgtggcggaagagaggcctcggatcgcactcacacagtcgttctcaaagctgtttaaggacctgggccttcacccgcgggccgtcagcacctcgttcggttgcagggtgaacctggcgatttgcttgcagtgctgggattacaggcatgagccaccacgcccagccccaaaatgttttaagatggtttacaaggaaggagtacgctcagtaggagaagataaaatacgtgaaaaaagaaccaaaacatggagatgaaagaaaaacagcgcaggaaagggacagaatgaagaacagagttggcgtgctggtgttttccacaaggcttctgaagcgtgccaccgtccttacctcggcaccagggcggggcctgacacgtggtggatattgaatgaatgtgcgccgtgggagtgttgagcacggttctgtattcttaataggaaatggcaatatgttcttgtgcagaagacaattctgtcaatatgaccgctaaatcaaaattcagtattctaa

SEQ ID NO: 127269 - DNA, 4961 bp, Homo sapiens
  Payload ID: 4911
  Gene Symbol: DIP2C
  Gene Name: disco-interacting protein 2 homolog C
  ENST ID: ENST00000634311
  CDS Start-End: 91-4959
ctcggtgcggttccgccgggcgcgaggagccgccgagacctccgcctgcgaacaaagaggaggccgtgcggggcgcggcgcccgcggagcatggcggaccgcagcctggagggcatggcgctgcccctggaggtgcgggcgcgcctggccgagctggagctggagctgtcggaaggtgacatcacacaaaaaggatatgaaaagaagaggtcaaagttaattggagcctaccttccgcagcctccgacagcgaatggagctgccgtggttcggtgtagactgcagcacagtgaaggagcgccgaggagaacattccgctctgcccacatcggggtgtgcgacgtccgagaagctgcggctcgggagcgggtggccagcaccgcagggaaccggcctctgttttactttcgtttcggggtggaccaagctttgccgcaagaacgccgggctcctgtcactccttcctccgcctctcgctaccaccgccgacggtcttcagggtcacgagatgagcgctatcggtcagacgtccacacggaagctgtccaggcggctctggccaaacacaaagagcggaagatggcagtgcctatgccttccaaacgcaggtccctggtcgtgcagacctcgatggacgcctacacccctccagatacctcttctggctcagaagatgaaggctcagtgcagggggactcccagggcacccccacctccagccagggcagcatcaatatggagcactggatcagccaggccatccacggctccaccacgtccaccacctcctcgtcctctacgcagagcgggggcagcggggctgcccacaggctggcggacgtcatggctcagacccacatagaaaatcattctgcacctcctgacgtaaccacgtacacctcagagcactcgatacaggtggagagaccgcagggttccacggggtcccggacagcgcccaagtacggcaacgccgagctcatggagaccggggatggagtaccagtaagtagccgggtgtcagcaaaaatccagcagcttgtcaataccctcaaacgaccgaaacgaccacctttacgagaattctttgtcgatgactttgaagaattattagaagttcaacaaccggatccgaaccaaccaaagccggagggggcccagatgctggccatgcgcggagagcagctgggcgtggtcacgaactggccgccgtcgctggaggccgcactgcagaggtggggcaccatctcgcccaaggcgccctgcctgaccaccatggacaccaacgggaagcccctctacatcctcacttacggcaagctgtggacaagaagtatgaaggtcgcttacagcattctacacaaattaggcacaaagcaggaacccatggtccggcctggagatagggtggcactggtgttccccaacaatgatccggctgccttcatggcggctttctacggctgcctgctggccgaggtggtccccgtgcccatcgaggtgccgctcaccaggaaggacgcagggagccagcagataggtttcttgcttggaagctgtggagttactgtagccttgactagtgacgcctgccataaaggacttccaaaaagcccaacgggagagatcccacagtttaaaggttggccaaagctgctgtggtttgtcacagagtctaaacatctctccaaaccgccccgagactggttcccacacattaaagatgccaataacgacactgcgtatattgagtacaagacgtgtaaggatggcagtgtgctgggtgtgacggtgacgaggactgcgctgctgacacactgccaggccctgacgcaggcgtgtggctacacggaagctgaaaccattgtgaatgtgctggatttcaagaaggacgtcgggctctggcatggcatcctgacaagcgtcatgaacatgatgcatgtgatcagcatcccgtactcgctgatgaaggtgaaccctctctcctggatccagaaggtctgccagtacaaagcaaaagtggcgtgtgtgaaatcgagggatatgcattgggcattagtagcacacagagatcagagagacatcaacctctcctctctgcgaatgctgatagtggcggacggcgcgaacccctggtctatttcttcttgcgatgcatttctcaatgtcttccaaagtaaaggccttcgacaggaggtcatctgtccttgtgccagctcgccagaggccctcactgtggccatccggaggcccacggatgacagtaaccagcccccgggccggggtgtcctctccatgcatggactgacctatggggtcattcgtgtggactcggaagagaagctgtccgtgctcaccgtgcaggatgtcggcctcgtgatgcctggagccatcatgtgttcagtgaagccagacggggttcctcagctgtgcagaacggatgagatcggggagctgtgtgtgtgtgcagttgcgacgggcacgtcctactatggcctctctggcatgaccaagaacacctttgaggtgtttcccatgacaagctccggggctccgatcagtgaatacccattcataaggacaggcttgctggggttcgtgggtcccggaggcctcgtcttcgtggtgggcaagatggatggcctcatggtggtcagcgggcgcaggcacaacgccgacgacatcgtggccactgcgctggccgtagaacccatgaagtttgtctaccggggaaggatagccgtgttctcggtgaccgtgctgcacgacgagaggatcgtgatcgtggctgagcagaggcctgactccacggaagaggacagtttccagtggatgagccgtgtgctgcaggcgattgacagtatacatcaagttggagtttattgcctggccttggtgccagcaaacaccctccccaaaaccccgcttggtgggatccatttatcagaaacaaaacagctttttctggagggctctctgcacccctgcaatgtcctaatgtgcccccacacctgcgtcacaaacttgcctaagcctcgacagaagcagccagaaatcggccctgcctctgtgatggtggggaacctggtctctgggaagagaatcgcccaggccagtggcagagacctgggtcagatcgaagataacgaccaggcacgcaagttcctgttcctctcagaggtcttgcagtggagagcacagaccaccccggaccacatcctctacacgctgctcaactgtcggggtgcgatagcgaactcgctgacctgcgtgcagctgcacaagagagctgagaagatcgccgtgatgctgatggagaggggccaccttcaggacggcgaccacgtggccttggtctaccccccaggaatagacctgatagcagcgttttatggttgcctgtacgcaggctgtgtgccaataaccgtccgtcccccgcacccacagaacatcgcgacgacgttgcctaccgtcaagatgattgtggaggtgagtcgctctgcctgtctgatgacgacacagctgatctgtaagttgctgcggtccagggaggcggcggcggctgtggacgtcaggacgtggcccctcatcctggacacagatgatttgccaaagaagcggcctgcccagatctgcaaaccttgcaacccagacactcttgcatatctcgacttcagcgtgtccacaactgggatgctagctggcgtaaagatgtctcacgcagccaccagtgccttctgccgttccattaagctgcagtgtgaactttacccctctagagaagtggccatctgcctggacccttactgtggactgggatttgtcctctggtgcctctgcagtgtgtattctgggcaccagtccatcctgatcccgccctctgagctggaaaccaaccccgccttgtggcttcttgccgtgagtcagtacaaagtccgagacacgttttgctcctactccgtgatggagctgtgcaccaaggggctgggctcgcaaacagagtccctcaaggcgcgagggctggacttgtcccgagtgaggacctgcgtggttgtggcggaagagaggcctcggatcgcactcacacagtcgttctcaaagctgtttaaggacctgggccttcacccgcgggccgtcagcacctcgttcggttgcagggtgaacctggcgatttgcttgcagcctcacaggctgtggaccctggccgagcagggaacctcaggacctgacccaaccactgtctacgtggacatgagagccctgagacacgacagagtccgcttagtggaaagaggatcccctcatagtctgcccctgatggaatcgggaaagatacttccaggggttcggattataattgccaacccagaaacaaaaggaccgctgggggactcacaccttggagagatttgggttcacagtgcccacaatgccagcggttatttcactatttacggagacgaatccctccagtcagatcacttcaactcaagactaagttttggagacacccagaccatctgggcacgcacaggctacttggggttcctgcggagaactgagctcacagatgcaaatggagagcgccatgatgccctctacgtggtaggggcactggacgaagccatggagctgcggggcatgcggtaccacccaatcgacattgagacctcggtcatcagagcccataaaagcgttacggaatgtgctgtgtttacctggacaaatttgttggtggttgtggttgagctggatgggtcggaacaagaagccttggacctggttcccttggtgaccaacgtggtcctggaggagcactacctgatcgtcggagtggtggtcgtggtggacatcggcgtcatccccatcaactcccgtggggagaagcagcgcatgcacctgcgagacgggtttttggcagaccagctagaccccatctatgtggcctacaacatgtagtc

SEQ ID NO: 127270 - DNA, 6683 bp, Homo sapiens
  Payload ID: 4912
  Gene Symbol: DLGAP1
  Gene Name: discs, large (Drosophila) homolog-associated protein 1
  Uniprot ID: O14490
  ENST ID: ENST00000315677
  CDS Start-End: 597-3530
attaacatgcacccaggggcgggtcaccagcccagccttgcagccccagcccgccgcgtcccggcgctcagcctccgctccagaggcgagcgctgcgcttcgggcgccgcaatctccaggacacggcctcgcggacaccttccgcctcggggaatcggcagcataggcggcgcgaacggccgccgccgcctcggctcctctctcgagtccttcccgtcacctcgctgagagccggtcctggtcgcggggacatctctctccttcctccgaggctcgtgggaccaacggacggacgcagccagcgagggccggactgcgggacgcggccagagcagttgaacatcagatacccagagtgacatcaggttaaaaaaaagcctgcaatttggatcttttcctgactcggaagcaaggaaaatggacaattgataatcaaaggctaaatctcttctgggatccactgaatgccactagagggtctgctcgagagaattcctgattgaatgacaacggcgctaagaacaatccctgcccaagacgggtctggagcctgacttccgggtgtccatgaccctggcggctgcttccggtccgccatgaaagggctatcaggcagccgcagccatcaccacggggtcacctgcgactcggcctgtgactcgctgtcgcaccactccgaccgcaagccctacctgctgagcccagtggagcaccaccccgcagaccacccatactacacccagcggaactccttccaggctgagtgcgtgggccccttcagcgacccgctggccagcagcaccttcccccgcaggcactacacctcgcagcaagagctgaaggacgagtgtgccctggtgccccgcaccctggccaccaaggcgaaccgcatccccgccaacctgctggaccagttcgagcggcagctgccactcagccgcgatggctatcacaccctgcagtacaagcgcacggccgtggagcaccgcagcgacagccccggccgcatccgccacctggtgcactcggtccagaagctcttcaccaagtcgcactccctggaggggccgtccaagggcagcgtcaacgggggcaaggccagccctgacgaggcgcaggcggcgcgctatggcaaacgcagcaagagcaaggagcggcgcgcggagcccaaggcccggcccagcacctccccgggctggtggagctcggacgacaacctggatggtgacatgtgcatctaccacgccccctcgggcgtgatgaccatgggcaggtgccccgaccgctcggcctcacagtacttcctggaggcctacaacaccatcagcgagcaggcggtgaaggcctcccggagcaacaacgacgtcaagtgctccacctgcgccaacctgccggtcagcctggacaccccgctgctgaagaagagcgcctggtcctccacgctcaccgtgagccgggcccgggaggtttaccagaaggcctcggtgaacatggaccaggccatggtgaagtccgagtcgtgtcagcaagaacgctcctgccagtacctgcaggttccacaagatgaatggacagggtacaccccacgaggtaaagatgatgaaattccatgccgaagaatgcggagtggcagttatatcaaggccatgggggatgaagacagtggagactcagacacgagtcctaagccttctccaaaagttgctgcgcggagagaaagctatctcaaggctactcagccatcccttacagaactcaccacactcaaaatctccaatgaacactcacccaaactccagatccggagtcatagttacctgagggcagtgagtgaagtctccatcaaccggagcctggacagcctggaccctgcaggcttgctcacatcaccaaagttccgctccaggaatgagagctacatgcgagccatgagcaccatcagccaggtgagcgagatggaagtgaacgggcagttcgagtccgtgtgcgagtccgtgttcagcgagctggagtcgcaggccgtggaagcgctggacctgcccatgcccggctgcttccgcatgcggagccacagctatgtgcgggccattgagaaaggctgctcccaggacgacgagtgcgtgtccctgaggtcgtcctcgccgccgcgcaccaccaccaccgttaggaccatccagagcagcacggtgtcatcttgcattacaacatataagaagacaccacctccagtcccacccagaactaccacgaaacctttcatttctatcacagcccagagtagcacagagtcagcccaggatgcctacatggacggacagggccagcgaggagatattatcagccagtctggactcagcaactccaccgagagcctggacagtatgaaggctctgacagccgccatcgaagctgcaaacgcccagatccatggccctgccagtcaacacatgggcaataacactgccaccgtcaccaccacgactaccatagccaccgtcaccacggaggacaggaagaaggaccactttaagaaaaatcgatgcctgtctatcgggatacaggtggatgatgctgaagaacctgacaaaacaggggagaataaagcacccagtaagttccagtccgtgggagtgcaagtagaagaagagaagtgcttccgcaggttcactcgatccaacagtgtgacgacagcagtacaggccgacctggacttccatgataatctggaaaattctctggaatctatagaggacaattcgtgtcctggccccatggccagacagttctcccgcgatgccagcacctccacagtcagcattcagggctcaggaaaccattaccatgcctgtgccgccgatgatgactttgacacggattttgacccctctattctgcctcctccggacccctggattgactctatcactgaagaccctctggaggccgtgcaaaggtcagtgtgccaccgggatggccactggttcctgaagcttctccaggcagagcgagaccgcatggaggggtggtgtcaacagatggagcgggaagaacgggaaaacaacctgcccgaagacattctaggaaaaatccgaaccgcagtgggcagtgcccaacttctcatggcccagaaattctaccagttcagagaactgtgtgaagaaaacctgaatcctaatgctcatccaagacccacctcccaggatttggcggggttttgggacatgctgcagttgtccatagaaaatattagtatgaaatttgatgaacttcatcagttaaaggccaataattggaaacagatggatcctcttgacaagaaggagagaagggcccctcctccagtgccaaagaagccggcgaagggccccgcgccgctgatccgggagcgctcgctggagagctcgcagcgccaggaggcccgcaagcgcctgatggccgccaagcgcgccgcgtccgtccgccagaactcggccaccgagagcgccgagagcatcgagatctacatccccgaggcgcagacccggctctgagcgccccgcagcccggccgccgccgccaagcatctgtcccctcctcccccggccgctcctctgccggctgcctctccccctccgagcccgtccgctcccgagctcggtgacttccactgtcgcggtgtagttgtccacctcgcaggagccgccccccgggcccccctcagccccccacttcccgtacccgtttgcccatctccttcttcaccgagcttcgccccctgtcctgatgccgtcgccctgcctcatactgagatccaaccctttattttctgggcaaagccaaacccacctgtgtagaagtgatgcctttaggtcacccgccgtcctcagttctctcgagctagtctgttcagcaatataaaaccatagggtatttcagaaatccagtatcacagggtgatcctttgggacttaccgtcttccacgtgaaagaaactaggcctccgattccctttatttcccctaaatggttattcttttaaaaaagcagatggagcactttattcccaacctcagaaatcacaccatctcactggaatccatgagggacacagagagaggggaccaagcctggcctgggggtgggggacctggatgtgtagcaaggatgggagaagcgaaatctgcaggtgctgggggcacctgcacactcacagctgcacaaactgcctcactgttacttcatcaatcacagcttcaaatgtctcaatcagcagaagattgtaaattcgatctttcagggaaattaatctattctgaaaggcaataacatgaagcaaggcaaaggaggcactgatggtttagtatactacataagggatttttttgttctattattaagaaaatctagacctgaaatgttttctcaactcttattgtactgtgtatatttatattgttgtcgtggcggctgtttttaaagggaaagtgttggttctattaatttgttaagtgtccatccaggtgggcctacctgattccacatatataagtacatatctgcttataaagcgctgtaaatggcagcaaggctgtttttggagaagagtttgggttttcctaccatccctttgaatgctacacatccgtctattttaacccaagtagttcgtatttcagatatattttctcctttcatctcctctcactactgcagagtccagtaatacctagcataggattctgtcctgtgtcaaatggctaaaataaatttttgccccaatagacatgctgcctcattcaaaagagctgccgctgtcatcttgaggttccaggtagtgagagaagaaactcgacctgccagggtcaacagccatgaagaggtggggggagtcatgattcataaacactgaaagaagtcaaggcttttggcagagagtgttgatttagatttttagtcttgattgatgggcagtatgcatcggtgtctagctgaagttgtctttaaatgcccttactcgtcacagtttaaacacttaggatgtggcaatcttaagtatcaatggcattttatgtccagctaacatcctaaagcattagaaattaaaaacgaaagacttttaaaaacatacatcaaacatgcttgcaccagagaagctttttaaaataatacactctcatagccaggtgctaatttaattttacttatgaaattaagagaggtgatgggttctagcaacagatattttcacggacatattctaaaaccactagagaattcgctacctctcagagccatcgatgctttgagctacctttataaacagggcacaaatgtttactgctgtggtttacaagaaaagggctactcacttattttgaaaccaacgaaccaacttttaactagggtgaacaaagcactcaaagtgctttgtgaaattggagcatacagagattttgagcttcaagtatttgctagttttaaaaagaatacaccttttctttaccttgtagcagcaattaaaagtcacacaaagcttgcatcgagtagggccaactgccacttgggtagcctatggtcacattcaatactgagaatgacttggaactcacagattaatatgaaagaagcagcgttcatcccaagacccatgctcacaattacagctccgtgccctgaggtagagttgagatttggattaagaaatagatttctaatacgactcaagatcatcctacaatattttctttggaaactaatttagcccatgatattttaaagagagacaagagaaggcctatttatcttgtctaagtgaacggcatttgtatattcataagctatttttggtaagaattttaaatcttttagctcaaggcctacagggcatcatgatctttgccttccttgaaaatacaatttaaattgtacaaacactttataaaaagctaattattggtgttagaacatgaccccacacaatgctgcttgacccctgaaactgacattcatgagcataacctttgttacattgttctttttgatgtaatttgtagaaatgttttttagttcgtaatggaaaatgtatgtaccctgaaaaattacttattttgtttaactttggtataaaggtgttgggcattttcttggggagggggggattacaaaagaagtttgtctcccacatcaaaaaacgttcaaagaaattaagtatttattatattttttgcagatgtttccatacaattcacataacctttttgtaaagagagatgaagaaatggattaaagatttttaatatttgaaatggtaaatagaactaatttattgtaatatatttctgttatttatagatgtttccttaatgttttactgtgcattaccactttcatttaagccttatccttgtgaatttaccatttcttttttaaaacatgtctagatgcatattttaaataactggaatgtaaatcactagcatatctgaattcccaaatgtaatttttaaaaattattttggtttggaaaaaaaagattcatttgaaagccttcagatggaggggtgggaacatttttatggctttatgaattggaatttcataggcttatttacctagattgtgtgtgaacaaaaaaatattgtaaatagatgaatgtttcccataatgtaaaaagaagaaattaataaaataattaatgcactgct

SEQ ID NO: 127271 - DNA, 2188 bp, Homo sapiens
  Payload ID: 4912
  Gene Symbol: DLGAP1
  Gene Name: discs, large (Drosophila) homolog-associated protein 1
  Uniprot ID: O14490
  ENST ID: ENST00000400145
  CDS Start-End: 15-1898
agctgagatgaataatgaacttaattttccataaagacattctgtttggcattccagctaataaggttccacaagatgaatggacagggtacaccccacgaggtaaagatgatgaaattccatgccgaagaatgcggagtggcagttatatcaaggccatgggggatgaagacagtggagactcagacacgagtcctaagccttctccaaaagttgctgcgcggagagaaagctatctcaaggctactcagccatcccttacagaactcaccacactcaaaatctccaatgaacactcacccaaactccagatccggagtcatagttacctgagggcagtgagtgaagtctccatcaaccggagcctggacagcctggaccctgcaggcttgctcacatcaccaaagttccgctccaggaatgagagctacatgcgagccatgagcaccatcagccaggtgagcgagatggaagtgaacgggcagttcgagtccgtgtgcgagtccgtgttcagcgagctggagtcgcaggccgtggaagcgctggacctgcccatgcccggctgcttccgcatgcggagccacagctatgtgcgggccattgagaaaggctgctcccaggacgacgagtgcgtgtccctgaggtcgtcctcgccgccgcgcaccaccaccaccgttaggaccatccagagcagcacggtgtcatcttgcattacaacatataagaagacaccacctccagtcccacccagaactaccacgaaacctttcatttctatcacagcccagagtagcacagagtcagcccaggatgcctacatggacggacagggccagcgaggagatattatcagccagtctggactcagcaactccaccgagagcctggacagtatgaaggctctgacagccgccatcgaagctgcaaacgcccagatccatggccctgccagtcaacacatgggcaataacactgccaccgtcaccaccacgactaccatagccaccgtcaccacggaggacaggaagaaggaccactttaagaaaaatcgatgcctgtctatcgggatacaggtggatgatgctgaagaacctgacaaaacaggggagaataaagcacccagtaagttccagtccgtgggagtgcaagtagaagaagagaagtgcttccgcaggttcactcgatccaacagtgtgacgacagcagtacaggccgacctggacttccatgataatctggaaaattctctggaatctatagaggacaattcgtgtcctggccccatggccagacagttctcccgcgatgccagcacctccacagtcagcattcagggctcaggaaaccattaccatgcctgtgccgccgatgatgactttgacacggattttgacccctctattctgcctcctccggacccctggattgactctatcactgaagaccctctggaggccgtgcaaaggtcagtgtgccaccgggatggccactggttcctgaagcttctccaggcagagcgagaccgcatggaggggtggtgtcaacagatggagcgggaagaacgggaaaacaacctgcccgaagacattctaggaaaaatccgaaccgcagtgggcagtgcccaacttctcatggcccagaaattctaccagttcagagaactgtgtgaagaaaacctgaatcctaatgctcatccaagacccacctcccaggatttggcggggttttgggacatgctgcagttgtccatagaaaatattagtatgaaatttgatgaacttcatcagttaaaggccaataattggaaacagatggatcctcttgacaagaaggtagaacaatgtagattttgtatggttcatttaaaaacctgcacaaacactggacagtctaaataggcttctgcattcagtcctgctgtttacaatgtgaaatggagctgatatcatattaatttcattgtaatgacaatgtttacatagtaatcatttgggatattatctgtaatatgtttcaggcatatttttaaagaaaaacctgtctttgtgaattggaaaatgggaatgtggctttttttgttaattaaactttaagttaaaccattttagtcactggaaggaactgcctccattttgctttttaaactaaaataaatgacatcttcagtgcatgaatccatagaacaaga

SEQ ID NO: 127272 - DNA, 5258 bp, Homo sapiens
  Payload ID: 4912
  Gene Symbol: DLGAP1
  Gene Name: discs, large (Drosophila) homolog-associated protein 1
  Uniprot ID: O14490
  ENST ID: ENST00000400147
  CDS Start-End: 78-2105
cacttagaatcggcaaatcatagagagaagctaaatgctctcagctgcactataccaaatcaaagctgagatgaataatgaacttaattttccataaagacattctgtttggcattccagctaataaggttccacaagatgaatggacagggtacaccccacgaggtaaagatgatgaaattccatgccgaagaatgcggagtggcagttatatcaaggccatgggggatgaagacagtggagactcagacacgagtcctaagccttctccaaaagttgctgcgcggagagaaagctatctcaaggctactcagccatcccttacagaactcaccacactcaaaatctccaatgaacactcacccaaactccagatccggagtcatagttacctgagggcagtgagtgaagtctccatcaaccggagcctggacagcctggaccctgcaggcttgctcacatcaccaaagttccgctccaggaatgagagctacatgcgagccatgagcaccatcagccaggtgagcgagatggaagtgaacgggcagttcgagtccgtgtgcgagtccgtgttcagcgagctggagtcgcaggccgtggaagcgctggacctgcccatgcccggctgcttccgcatgcggagccacagctatgtgcgggccattgagaaaggctgctcccaggacgacgagtgcgtgtccctgaggtcgtcctcgccgccgcgcaccaccaccaccgttaggaccatccagagcagcacggtgtcatcttgcattacaacatataagaagacaccacctccagtcccacccagaactaccacgaaacctttcatttctatcacagcccagagtagcacagagtcagcccaggatgcctacatggacggacagggccagcgaggagatattatcagccagtctggactcagcaactccaccgagagcctggacagtatgaaggctctgacagccgccatcgaagctgcaaacgcccagatccatggccctgccagtcaacacatgggcaataacactgccaccgtcaccaccacgactaccatagccaccgtcaccacggaggacaggaagaaggaccactttaagaaaaatcgatgcctgtctatcgggatacaggtggatgatgctgaagaacctgacaaaacaggggagaataaagcacccagtaagttccagtccgtgggagtgcaagtagaagaagagaagtgcttccgcaggttcactcgatccaacagtgtgacgacagcagtacaggccgacctggacttccatgataatctggaaaattctctggaatctatagaggacaattcgtgtcctggccccatggccagacagttctcccgcgatgccagcacctccacagtcagcattcagggctcaggaaaccattaccatgcctgtgccgccgatgatgactttgacacggattttgacccctctattctgcctcctccggacccctggattgactctatcactgaagaccctctggaggccgtgcaaaggtcagtgtgccaccgggatggccactggttcctgaagcttctccaggcagagcgagaccgcatggaggggtggtgtcaacagatggagcgggaagaacgggaaaacaacctgcccgaagacattctaggaaaaatccgaaccgcagtgggcagtgcccaacttctcatggcccagaaattctaccagttcagagaactgtgtgaagaaaacctgaatcctaatgctcatccaagacccacctcccaggatttggcggggttttgggacatgctgcagttgtccatagaaaatattagtatgaaatttgatgaacttcatcagttaaaggccaataattggaaacagatggatcctcttgacaagaaggagagaagggcccctcctccagtgccaaagaagccggcgaagggccccgcgccgctgatccgggagcgctcgctggagagctcgcagcgccaggaggcccgcaagcgcctgatggccgccaagcgcgccgcgtccgtccgccagaactcggccaccgagagcgccgagagcatcgagatctacatccccgaggcgcagacccggctctgagcgccccgcagcccggccgccgccgccaagcatctgtcccctcctcccccggccgctcctctgccggctgcctctccccctccgagcccgtccgctcccgagctcggtgacttccactgtcgcggtgtagttgtccacctcgcaggagccgccccccgggcccccctcagccccccacttcccgtacccgtttgcccatctccttcttcaccgagcttcgccccctgtcctgatgccgtcgccctgcctcatactgagatccaaccctttattttctgggcaaagccaaacccacctgtgtagaagtgatgcctttaggtcacccgccgtcctcagttctctcgagctagtctgttcagcaatataaaaccatagggtatttcagaaatccagtatcacagggtgatcctttgggacttaccgtcttccacgtgaaagaaactaggcctccgattccctttatttcccctaaatggttattcttttaaaaaagcagatggagcactttattcccaacctcagaaatcacaccatctcactggaatccatgagggacacagagagaggggaccaagcctggcctgggggtgggggacctggatgtgtagcaaggatgggagaagcgaaatctgcaggtgctgggggcacctgcacactcacagctgcacaaactgcctcactgttacttcatcaatcacagcttcaaatgtctcaatcagcagaagattgtaaattcgatctttcagggaaattaatctattctgaaaggcaataacatgaagcaaggcaaaggaggcactgatggtttagtatactacataagggatttttttgttctattattaagaaaatctagacctgaaatgttttctcaactcttattgtactgtgtatatttatattgttgtcgtggcggctgtttttaaagggaaagtgttggttctattaatttgttaagtgtccatccaggtgggcctacctgattccacatatataagtacatatctgcttataaagcgctgtaaatggcagcaaggctgtttttggagaagagtttgggttttcctaccatccctttgaatgctacacatccgtctattttaacccaagtagttcgtatttcagatatattttctcctttcatctcctctcactactgcagagtccagtaatacctagcataggattctgtcctgtgtcaaatggctaaaataaatttttgccccaatagacatgctgcctcattcaaaagagctgccgctgtcatcttgaggttccaggtagtgagagaagaaactcgacctgccagggtcaacagccatgaagaggtggggggagtcatgattcataaacactgaaagaagtcaaggcttttggcagagagtgttgatttagatttttagtcttgattgatgggcagtatgcatcggtgtctagctgaagttgtctttaaatgcccttactcgtcacagtttaaacacttaggatgtggcaatcttaagtatcaatggcattttatgtccagctaacatcctaaagcattagaaattaaaaacgaaagacttttaaaaacatacatcaaacatgcttgcaccagagaagctttttaaaataatacactctcatagccaggtgctaatttaattttacttatgaaattaagagaggtgatgggttctagcaacagatattttcacggacatattctaaaaccactagagaattcgctacctctcagagccatcgatgctttgagctacctttataaacagggcacaaatgtttactgctgtggtttacaagaaaagggctactcacttattttgaaaccaacgaaccaacttttaactagggtgaacaaagcactcaaagtgctttgtgaaattggagcatacagagattttgagcttcaagtatttgctagttttaaaaagaatacaccttttctttaccttgtagcagcaattaaaagtcacacaaagcttgcatcgagtagggccaactgccacttgggtagcctatggtcacattcaatactgagaatgacttggaactcacagattaatatgaaagaagcagcgttcatcccaagacccatgctcacaattacagctccgtgccctgaggtagagttgagatttggattaagaaatagatttctaatacgactcaagatcatcctacaatattttctttggaaactaatttagcccatgatattttaaagagagacaagagaaggcctatttatcttgtctaagtgaacggcatttgtatattcataagctatttttggtaagaattttaaatcttttagctcaaggcctacagggcatcatgatctttgccttccttgaaaatacaatttaaattgtacaaacactttataaaaagctaattattggtgttagaacatgaccccacacaatgctgcttgacccctgaaactgacattcatgagcataacctttgttacattgttctttttgatgtaatttgtagaaatgttttttagttcgtaatggaaaatgtatgtaccctgaaaaattacttattttgtttaactttggtataaaggtgttgggcattttcttggggagggggggattacaaaagaagtttgtctcccacatcaaaaaacgttcaaagaaattaagtatttattatattttttgcagatgtttccatacaattcacataacctttttgtaaagagagatgaagaaatggattaaagatttttaatatttgaaatggtaaatagaactaatttattgtaatatatttctgttatttatagatgtttccttaatgttttactgtgcattaccactttcatttaagccttatccttgtgaatttaccatttcttttttaaaacatgtctagatgcatattttaaataactggaatgtaaatcactagcatatctgaattcccaaatgtaatttttaaaaattattttggtttggaaaaaaaagattcatttgaaagccttcagatggaggggtgggaacatttttatggctttatgaattggaatttcataggcttatttacctagattgtgtgtgaacaaaaaaatattgtaaatagatgaatgtttcccataatgtaaaaagaagaaattaataaaataattaatgcactgct

SEQ ID NO: 127273 - DNA, 5203 bp, Homo sapiens
  Payload ID: 4912
  Gene Symbol: DLGAP1
  Gene Name: discs, large (Drosophila) homolog-associated protein 1
  ENST ID: ENST00000400149
  CDS Start-End: 47-2050
accgagaaggaaagcactcccagagatgaaattttaggaaagcaaaatgatcgacctttttaaggctgagtgggtttcttcagtttgtgtgcaagtttcaagaaatggaaggactgaccaggtttgggttccacaagatgaatggacagggtacaccccacgaggtaaagatgatgaaattccatgccgaagaatgcggagtggcagttatatcaaggccatgggggatgaagacagtggagactcagacacgagtcctaagccttctccaaaagttgctgcgcggagagaaagctatctcaaggctactcagccatcccttacagaactcaccacactcaaaatctccaatgaacactcacccaaactccagatccggagtcatagttacctgagggcagtgagtgaagtctccatcaaccggagcctggacagcctggaccctgcaggcttgctcacatcaccaaagttccgctccaggaatgagagctacatgcgagccatgagcaccatcagccaggtgagcgagatggaagtgaacgggcagttcgagtccgtgtgcgagtccgtgttcagcgagctggagtcgcaggccgtggaagcgctggacctgcccatgcccggctgcttccgcatgcggagccacagctatgtgcgggccattgagaaaggctgctcccaggacgacgagtgcgtgtccctgaggtcgtcctcgccgccgcgcaccaccaccaccgttaggaccatccagagcagcacgggtgtcataaaactgagttctgcagttgaagcccagagtagcacagagtcagcccaggatgcctacatggacggacagggccagcgaggagatattatcagccagtctggactcagcaactccaccgagagcctggacagtatgaaggctctgacagccgccatcgaagctgcaaacgcccagatccatggccctgccagtcaacacatgggcaataacactgccaccgtcaccaccacgactaccatagccaccgtcaccacggaggacaggaagaaggaccactttaagaaaaatcgatgcctgtctatcgggatacaggtggatgatgctgaagaacctgacaaaacaggggagaataaagcacccagtaagttccagtccgtgggagtgcaagtagaagaagagaagtgcttccgcaggttcactcgatccaacagtgtgacgacagcagtacaggccgacctggacttccatgataatctggaaaattctctggaatctatagaggacaattcgtgtcctggccccatggccagacagttctcccgcgatgccagcacctccacagtcagcattcagggctcaggaaaccattaccatgcctgtgccgccgatgatgactttgacacggattttgacccctctattctgcctcctccggacccctggattgactctatcactgaagaccctctggaggccgtgcaaaggtcagtgtgccaccgggatggccactggttcctgaagcttctccaggcagagcgagaccgcatggaggggtggtgtcaacagatggagcgggaagaacgggaaaacaacctgcccgaagacattctaggaaaaatccgaaccgcagtgggcagtgcccaacttctcatggcccagaaattctaccagttcagagaactgtgtgaagaaaacctgaatcctaatgctcatccaagacccacctcccaggatttggcggggttttgggacatgctgcagttgtccatagaaaatattagtatgaaatttgatgaacttcatcagttaaaggccaataattggaaacagatggatcctcttgacaagaaggagagaagggcccctcctccagtgccaaagaagccggcgaagggccccgcgccgctgatccgggagcgctcgctggagagctcgcagcgccaggaggcccgcaagcgcctgatggccgccaagcgcgccgcgtccgtccgccagaactcggccaccgagagcgccgagagcatcgagatctacatccccgaggcgcagacccggctctgagcgccccgcagcccggccgccgccgccaagcatctgtcccctcctcccccggccgctcctctgccggctgcctctccccctccgagcccgtccgctcccgagctcggtgacttccactgtcgcggtgtagttgtccacctcgcaggagccgccccccgggcccccctcagccccccacttcccgtacccgtttgcccatctccttcttcaccgagcttcgccccctgtcctgatgccgtcgccctgcctcatactgagatccaaccctttattttctgggcaaagccaaacccacctgtgtagaagtgatgcctttaggtcacccgccgtcctcagttctctcgagctagtctgttcagcaatataaaaccatagggtatttcagaaatccagtatcacagggtgatcctttgggacttaccgtcttccacgtgaaagaaactaggcctccgattccctttatttcccctaaatggttattcttttaaaaaagcagatggagcactttattcccaacctcagaaatcacaccatctcactggaatccatgagggacacagagagaggggaccaagcctggcctgggggtgggggacctggatgtgtagcaaggatgggagaagcgaaatctgcaggtgctgggggcacctgcacactcacagctgcacaaactgcctcactgttacttcatcaatcacagcttcaaatgtctcaatcagcagaagattgtaaattcgatctttcagggaaattaatctattctgaaaggcaataacatgaagcaaggcaaaggaggcactgatggtttagtatactacataagggatttttttgttctattattaagaaaatctagacctgaaatgttttctcaactcttattgtactgtgtatatttatattgttgtcgtggcggctgtttttaaagggaaagtgttggttctattaatttgttaagtgtccatccaggtgggcctacctgattccacatatataagtacatatctgcttataaagcgctgtaaatggcagcaaggctgtttttggagaagagtttgggttttcctaccatccctttgaatgctacacatccgtctattttaacccaagtagttcgtatttcagatatattttctcctttcatctcctctcactactgcagagtccagtaatacctagcataggattctgtcctgtgtcaaatggctaaaataaatttttgccccaatagacatgctgcctcattcaaaagagctgccgctgtcatcttgaggttccaggtagtgagagaagaaactcgacctgccagggtcaacagccatgaagaggtggggggagtcatgattcataaacactgaaagaagtcaaggcttttggcagagagtgttgatttagatttttagtcttgattgatgggcagtatgcatcggtgtctagctgaagttgtctttaaatgcccttactcgtcacagtttaaacacttaggatgtggcaatcttaagtatcaatggcattttatgtccagctaacatcctaaagcattagaaattaaaaacgaaagacttttaaaaacatacatcaaacatgcttgcaccagagaagctttttaaaataatacactctcatagccaggtgctaatttaattttacttatgaaattaagagaggtgatgggttctagcaacagatattttcacggacatattctaaaaccactagagaattcgctacctctcagagccatcgatgctttgagctacctttataaacagggcacaaatgtttactgctgtggtttacaagaaaagggctactcacttattttgaaaccaacgaaccaacttttaactagggtgaacaaagcactcaaagtgctttgtgaaattggagcatacagagattttgagcttcaagtatttgctagttttaaaaagaatacaccttttctttaccttgtagcagcaattaaaagtcacacaaagcttgcatcgagtagggccaactgccacttgggtagcctatggtcacattcaatactgagaatgacttggaactcacagattaatatgaaagaagcagcgttcatcccaagacccatgctcacaattacagctccgtgccctgaggtagagttgagatttggattaagaaatagatttctaatacgactcaagatcatcctacaatattttctttggaaactaatttagcccatgatattttaaagagagacaagagaaggcctatttatcttgtctaagtgaacggcatttgtatattcataagctatttttggtaagaattttaaatcttttagctcaaggcctacagggcatcatgatctttgccttccttgaaaatacaatttaaattgtacaaacactttataaaaagctaattattggtgttagaacatgaccccacacaatgctgcttgacccctgaaactgacattcatgagcataacctttgttacattgttctttttgatgtaatttgtagaaatgttttttagttcgtaatggaaaatgtatgtaccctgaaaaattacttattttgtttaactttggtataaaggtgttgggcattttcttggggagggggggattacaaaagaagtttgtctcccacatcaaaaaacgttcaaagaaattaagtatttattatattttttgcagatgtttccatacaattcacataacctttttgtaaagagagatgaagaaatggattaaagatttttaatatttgaaatggtaaatagaactaatttattgtaatatatttctgttatttatagatgtttccttaatgttttactgtgcattaccactttcatttaagccttatccttgtgaatttaccatttcttttttaaaacatgtctagatgcatattttaaataactggaatgtaaatcactagcatatctgaattcccaaatgtaatttttaaaaattattttggtttggaaaaaaaagattcatttgaaagccttcagatggaggggtgggaacatttttatggctttatgaattggaatttcataggcttatttacctagattgtgtgtgaacaaaaaaatattgtaaatagatgaatgtttcccataatgtaaaaagaagaaattaataaaataattaatgcactgct

SEQ ID NO: 127274 - DNA, 5332 bp, Homo sapiens
  Payload ID: 4912
  Gene Symbol: DLGAP1
  Gene Name: discs, large (Drosophila) homolog-associated protein 1
  ENST ID: ENST00000400150
  CDS Start-End: 98-2179
ggtagaagtggagagagagagacagagggagcgagagagagagcaagacagaccgagaaggaaagcactcccagagatgaaattttaggaaagcaaaatgatcgacctttttaaggctgagtgggtttcttcagtttgtgtgcaagtttcaagaaatggaaggactgaccaggttccacaagatgaatggacagggtacaccccacgaggtaaagatgatgaaattccatgccgaagaatgcggagtggcagttatatcaaggccatgggggatgaagacagtggagactcagacacgagtcctaagccttctccaaaagttgctgcgcggagagaaagctatctcaaggctactcagccatcccttacagaactcaccacactcaaaatctccaatgaacactcacccaaactccagatccggagtcatagttacctgagggcagtgagtgaagtctccatcaaccggagcctggacagcctggaccctgcaggcttgctcacatcaccaaagttccgctccaggaatgagagctacatgcgagccatgagcaccatcagccaggtgagcgagatggaagtgaacgggcagttcgagtccgtgtgcgagtccgtgttcagcgagctggagtcgcaggccgtggaagcgctggacctgcccatgcccggctgcttccgcatgcggagccacagctatgtgcgggccattgagaaaggctgctcccaggacgacgagtgcgtgtccctgaggtcgtcctcgccgccgcgcaccaccaccaccgttaggaccatccagagcagcacgggtgtcataaaactgagttctgcagttgaagtgtcatcttgcattacaacatataagaagacaccacctccagtcccacccagaactaccacgaaacctttcatttctatcacagcccagagtagcacagagtcagcccaggatgcctacatggacggacagggccagcgaggagatattatcagccagtctggactcagcaactccaccgagagcctggacagtatgaaggctctgacagccgccatcgaagctgcaaacgcccagatccatggccctgccagtcaacacatgggcaataacactgccaccgtcaccaccacgactaccatagccaccgtcaccacggaggacaggaagaaggaccactttaagaaaaatcgatgcctgtctatcgggatacaggtggatgatgctgaagaacctgacaaaacaggggagaataaagcacccagtaagttccagtccgtgggagtgcaagtagaagaagagaagtgcttccgcaggttcactcgatccaacagtgtgacgacagcagtacaggccgacctggacttccatgataatctggaaaattctctggaatctatagaggacaattcgtgtcctggccccatggccagacagttctcccgcgatgccagcacctccacagtcagcattcagggctcaggaaaccattaccatgcctgtgccgccgatgatgactttgacacggattttgacccctctattctgcctcctccggacccctggattgactctatcactgaagaccctctggaggccgtgcaaaggtcagtgtgccaccgggatggccactggttcctgaagcttctccaggcagagcgagaccgcatggaggggtggtgtcaacagatggagcgggaagaacgggaaaacaacctgcccgaagacattctaggaaaaatccgaaccgcagtgggcagtgcccaacttctcatggcccagaaattctaccagttcagagaactgtgtgaagaaaacctgaatcctaatgctcatccaagacccacctcccaggatttggcggggttttgggacatgctgcagttgtccatagaaaatattagtatgaaatttgatgaacttcatcagttaaaggccaataattggaaacagatggatcctcttgacaagaaggagagaagggcccctcctccagtgccaaagaagccggcgaagggccccgcgccgctgatccgggagcgctcgctggagagctcgcagcgccaggaggcccgcaagcgcctgatggccgccaagcgcgccgcgtccgtccgccagaactcggccaccgagagcgccgagagcatcgagatctacatccccgaggcgcagacccggctctgagcgccccgcagcccggccgccgccgccaagcatctgtcccctcctcccccggccgctcctctgccggctgcctctccccctccgagcccgtccgctcccgagctcggtgacttccactgtcgcggtgtagttgtccacctcgcaggagccgccccccgggcccccctcagccccccacttcccgtacccgtttgcccatctccttcttcaccgagcttcgccccctgtcctgatgccgtcgccctgcctcatactgagatccaaccctttattttctgggcaaagccaaacccacctgtgtagaagtgatgcctttaggtcacccgccgtcctcagttctctcgagctagtctgttcagcaatataaaaccatagggtatttcagaaatccagtatcacagggtgatcctttgggacttaccgtcttccacgtgaaagaaactaggcctccgattccctttatttcccctaaatggttattcttttaaaaaagcagatggagcactttattcccaacctcagaaatcacaccatctcactggaatccatgagggacacagagagaggggaccaagcctggcctgggggtgggggacctggatgtgtagcaaggatgggagaagcgaaatctgcaggtgctgggggcacctgcacactcacagctgcacaaactgcctcactgttacttcatcaatcacagcttcaaatgtctcaatcagcagaagattgtaaattcgatctttcagggaaattaatctattctgaaaggcaataacatgaagcaaggcaaaggaggcactgatggtttagtatactacataagggatttttttgttctattattaagaaaatctagacctgaaatgttttctcaactcttattgtactgtgtatatttatattgttgtcgtggcggctgtttttaaagggaaagtgttggttctattaatttgttaagtgtccatccaggtgggcctacctgattccacatatataagtacatatctgcttataaagcgctgtaaatggcagcaaggctgtttttggagaagagtttgggttttcctaccatccctttgaatgctacacatccgtctattttaacccaagtagttcgtatttcagatatattttctcctttcatctcctctcactactgcagagtccagtaatacctagcataggattctgtcctgtgtcaaatggctaaaataaatttttgccccaatagacatgctgcctcattcaaaagagctgccgctgtcatcttgaggttccaggtagtgagagaagaaactcgacctgccagggtcaacagccatgaagaggtggggggagtcatgattcataaacactgaaagaagtcaaggcttttggcagagagtgttgatttagatttttagtcttgattgatgggcagtatgcatcggtgtctagctgaagttgtctttaaatgcccttactcgtcacagtttaaacacttaggatgtggcaatcttaagtatcaatggcattttatgtccagctaacatcctaaagcattagaaattaaaaacgaaagacttttaaaaacatacatcaaacatgcttgcaccagagaagctttttaaaataatacactctcatagccaggtgctaatttaattttacttatgaaattaagagaggtgatgggttctagcaacagatattttcacggacatattctaaaaccactagagaattcgctacctctcagagccatcgatgctttgagctacctttataaacagggcacaaatgtttactgctgtggtttacaagaaaagggctactcacttattttgaaaccaacgaaccaacttttaactagggtgaacaaagcactcaaagtgctttgtgaaattggagcatacagagattttgagcttcaagtatttgctagttttaaaaagaatacaccttttctttaccttgtagcagcaattaaaagtcacacaaagcttgcatcgagtagggccaactgccacttgggtagcctatggtcacattcaatactgagaatgacttggaactcacagattaatatgaaagaagcagcgttcatcccaagacccatgctcacaattacagctccgtgccctgaggtagagttgagatttggattaagaaatagatttctaatacgactcaagatcatcctacaatattttctttggaaactaatttagcccatgatattttaaagagagacaagagaaggcctatttatcttgtctaagtgaacggcatttgtatattcataagctatttttggtaagaattttaaatcttttagctcaaggcctacagggcatcatgatctttgccttccttgaaaatacaatttaaattgtacaaacactttataaaaagctaattattggtgttagaacatgaccccacacaatgctgcttgacccctgaaactgacattcatgagcataacctttgttacattgttctttttgatgtaatttgtagaaatgttttttagttcgtaatggaaaatgtatgtaccctgaaaaattacttattttgtttaactttggtataaaggtgttgggcattttcttggggagggggggattacaaaagaagtttgtctcccacatcaaaaaacgttcaaagaaattaagtatttattatattttttgcagatgtttccatacaattcacataacctttttgtaaagagagatgaagaaatggattaaagatttttaatatttgaaatggtaaatagaactaatttattgtaatatatttctgttatttatagatgtttccttaatgttttactgtgcattaccactttcatttaagccttatccttgtgaatttaccatttcttttttaaaacatgtctagatgcatattttaaataactggaatgtaaatcactagcatatctgaattcccaaatgtaatttttaaaaattattttggtttggaaaaaaaagattcatttgaaagccttcagatggaggggtgggaacatttttatggctttatgaattggaatttcataggcttatttacctagattgtgtgtgaacaaaaaaatattgtaaatagatgaatgtttcccataatgtaaaaagaagaaattaataaaataattaatgcactgct

SEQ ID NO: 127275 - DNA, 5257 bp, Homo sapiens
  Payload ID: 4912
  Gene Symbol: DLGAP1
  Gene Name: discs, large (Drosophila) homolog-associated protein 1
  Uniprot ID: O14490
  ENST ID: ENST00000400155
  CDS Start-End: 53-2104
agacagaccgagaaggaaagcactcccagagatgaaattttaggaaagcaaaatgatcgacctttttaaggctgagtgggtttcttcagtttgtgtgcaagtttcaagaaatggaaggactgaccaggttccacaagatgaatggacagggtacaccccacgaggtaaagatgatgaaattccatgccgaagaatgcggagtggcagttatatcaaggccatgggggatgaagacagtggagactcagacacgagtcctaagccttctccaaaagttgctgcgcggagagaaagctatctcaaggctactcagccatcccttacagaactcaccacactcaaaatctccaatgaacactcacccaaactccagatccggagtcatagttacctgagggcagtgagtgaagtctccatcaaccggagcctggacagcctggaccctgcaggcttgctcacatcaccaaagttccgctccaggaatgagagctacatgcgagccatgagcaccatcagccaggtgagcgagatggaagtgaacgggcagttcgagtccgtgtgcgagtccgtgttcagcgagctggagtcgcaggccgtggaagcgctggacctgcccatgcccggctgcttccgcatgcggagccacagctatgtgcgggccattgagaaaggctgctcccaggacgacgagtgcgtgtccctgaggtcgtcctcgccgccgcgcaccaccaccaccgttaggaccatccagagcagcacggtgtcatcttgcattacaacatataagaagacaccacctccagtcccacccagaactaccacgaaacctttcatttctatcacagcccagagtagcacagagtcagcccaggatgcctacatggacggacagggccagcgaggagatattatcagccagtctggactcagcaactccaccgagagcctggacagtatgaaggctctgacagccgccatcgaagctgcaaacgcccagatccatggccctgccagtcaacacatgggcaataacactgccaccgtcaccaccacgactaccatagccaccgtcaccacggaggacaggaagaaggaccactttaagaaaaatcgatgcctgtctatcgggatacaggtggatgatgctgaagaacctgacaaaacaggggagaataaagcacccagtaagttccagtccgtgggagtgcaagtagaagaagagaagtgcttccgcaggttcactcgatccaacagtgtgacgacagcagtacaggccgacctggacttccatgataatctggaaaattctctggaatctatagaggacaattcgtgtcctggccccatggccagacagttctcccgcgatgccagcacctccacagtcagcattcagggctcaggaaaccattaccatgcctgtgccgccgatgatgactttgacacggattttgacccctctattctgcctcctccggacccctggattgactctatcactgaagaccctctggaggccgtgcaaaggtcagtgtgccaccgggatggccactggttcctgaagcttctccaggcagagcgagaccgcatggaggggtggtgtcaacagatggagcgggaagaacgggaaaacaacctgcccgaagacattctaggaaaaatccgaaccgcagtgggcagtgcccaacttctcatggcccagaaattctaccagttcagagaactgtgtgaagaaaacctgaatcctaatgctcatccaagacccacctcccaggatttggcggggttttgggacatgctgcagttgtccatagaaaatattagtatgaaatttgatgaacttcatcagttaaaggccaataattggaaacagatggatcctcttgacaagaaggagagaagggcccctcctccagtgccaaagaagccggcgaagggccccgcgccgctgatccgggagcgctcgctggagagctcgcagcgccaggaggcccgcaagcgcctgatggccgccaagcgcgccgcgtccgtccgccagaactcggccaccgagagcgccgagagcatcgagatctacatccccgaggcgcagacccggctctgagcgccccgcagcccggccgccgccgccaagcatctgtcccctcctcccccggccgctcctctgccggctgcctctccccctccgagcccgtccgctcccgagctcggtgacttccactgtcgcggtgtagttgtccacctcgcaggagccgccccccgggcccccctcagccccccacttcccgtacccgtttgcccatctccttcttcaccgagcttcgccccctgtcctgatgccgtcgccctgcctcatactgagatccaaccctttattttctgggcaaagccaaacccacctgtgtagaagtgatgcctttaggtcacccgccgtcctcagttctctcgagctagtctgttcagcaatataaaaccatagggtatttcagaaatccagtatcacagggtgatcctttgggacttaccgtcttccacgtgaaagaaactaggcctccgattccctttatttcccctaaatggttattcttttaaaaaagcagatggagcactttattcccaacctcagaaatcacaccatctcactggaatccatgagggacacagagagaggggaccaagcctggcctgggggtgggggacctggatgtgtagcaaggatgggagaagcgaaatctgcaggtgctgggggcacctgcacactcacagctgcacaaactgcctcactgttacttcatcaatcacagcttcaaatgtctcaatcagcagaagattgtaaattcgatctttcagggaaattaatctattctgaaaggcaataacatgaagcaaggcaaaggaggcactgatggtttagtatactacataagggatttttttgttctattattaagaaaatctagacctgaaatgttttctcaactcttattgtactgtgtatatttatattgttgtcgtggcggctgtttttaaagggaaagtgttggttctattaatttgttaagtgtccatccaggtgggcctacctgattccacatatataagtacatatctgcttataaagcgctgtaaatggcagcaaggctgtttttggagaagagtttgggttttcctaccatccctttgaatgctacacatccgtctattttaacccaagtagttcgtatttcagatatattttctcctttcatctcctctcactactgcagagtccagtaatacctagcataggattctgtcctgtgtcaaatggctaaaataaatttttgccccaatagacatgctgcctcattcaaaagagctgccgctgtcatcttgaggttccaggtagtgagagaagaaactcgacctgccagggtcaacagccatgaagaggtggggggagtcatgattcataaacactgaaagaagtcaaggcttttggcagagagtgttgatttagatttttagtcttgattgatgggcagtatgcatcggtgtctagctgaagttgtctttaaatgcccttactcgtcacagtttaaacacttaggatgtggcaatcttaagtatcaatggcattttatgtccagctaacatcctaaagcattagaaattaaaaacgaaagacttttaaaaacatacatcaaacatgcttgcaccagagaagctttttaaaataatacactctcatagccaggtgctaatttaattttacttatgaaattaagagaggtgatgggttctagcaacagatattttcacggacatattctaaaaccactagagaattcgctacctctcagagccatcgatgctttgagctacctttataaacagggcacaaatgtttactgctgtggtttacaagaaaagggctactcacttattttgaaaccaacgaaccaacttttaactagggtgaacaaagcactcaaagtgctttgtgaaattggagcatacagagattttgagcttcaagtatttgctagttttaaaaagaatacaccttttctttaccttgtagcagcaattaaaagtcacacaaagcttgcatcgagtagggccaactgccacttgggtagcctatggtcacattcaatactgagaatgacttggaactcacagattaatatgaaagaagcagcgttcatcccaagacccatgctcacaattacagctccgtgccctgaggtagagttgagatttggattaagaaatagatttctaatacgactcaagatcatcctacaatattttctttggaaactaatttagcccatgatattttaaagagagacaagagaaggcctatttatcttgtctaagtgaacggcatttgtatattcataagctatttttggtaagaattttaaatcttttagctcaaggcctacagggcatcatgatctttgccttccttgaaaatacaatttaaattgtacaaacactttataaaaagctaattattggtgttagaacatgaccccacacaatgctgcttgacccctgaaactgacattcatgagcataacctttgttacattgttctttttgatgtaatttgtagaaatgttttttagttcgtaatggaaaatgtatgtaccctgaaaaattacttattttgtttaactttggtataaaggtgttgggcattttcttggggagggggggattacaaaagaagtttgtctcccacatcaaaaaacgttcaaagaaattaagtatttattatattttttgcagatgtttccatacaattcacataacctttttgtaaagagagatgaagaaatggattaaagatttttaatatttgaaatggtaaatagaactaatttattgtaatatatttctgttatttatagatgtttccttaatgttttactgtgcattaccactttcatttaagccttatccttgtgaatttaccatttcttttttaaaacatgtctagatgcatattttaaataactggaatgtaaatcactagcatatctgaattcccaaatgtaatttttaaaaattattttggtttggaaaaaaaagattcatttgaaagccttcagatggaggggtgggaacatttttatggctttatgaattggaatttcataggcttatttacctagattgtgtgtgaacaaaaaaatattgtaaatagatgaatgtttcccataatgtaaaaagaagaaattaataaaataattaatgcactgct

SEQ ID NO: 127276 - DNA, 2365 bp, Homo sapiens
  Payload ID: 4912
  Gene Symbol: DLGAP1
  Gene Name: discs, large (Drosophila) homolog-associated protein 1
  Uniprot ID: O14490
  ENST ID: ENST00000534970
  CDS Start-End: 62-2047
gctgtttagaactattgtaccgctgccagtgactgtctgtattagggttgggagcaggaacatggatttgaagacattaaaactgtttaattctcagttgagatgtggttggctcttatacatttggaataaagcatttatggcacatctcagggttccacaagatgaatggacagggtacaccccacgaggtaaagatgatgaaattccatgccgaagaatgcggagtggcagttatatcaaggccatgggggatgaagacagtggagactcagacacgagtcctaagccttctccaaaagttgctgcgcggagagaaagctatctcaaggctactcagccatcccttacagaactcaccacactcaaaatctccaatgaacactcacccaaactccagatccggagtcatagttacctgagggcagtgagtgaagtctccatcaaccggagcctggacagcctggaccctgcaggcttgctcacatcaccaaagttccgctccaggaatgagagctacatgcgagccatgagcaccatcagccaggtgagcgagatggaagtgaacgggcagttcgagtccgtgtgcgagtccgtgttcagcgagctggagtcgcaggccgtggaagcgctggacctgcccatgcccggctgcttccgcatgcggagccacagctatgtgcgggccattgagaaaggctgctcccaggacgacgagtgcgtgtccctgaggtcgtcctcgccgccgcgcaccaccaccaccgttaggaccatccagagcagcacggcccagagtagcacagagtcagcccaggatgcctacatggacggacagggccagcgaggagatattatcagccagtctggactcagcaactccaccgagagcctggacagtatgaaggctctgacagccgccatcgaagctgcaaacgcccagatccatggccctgccagtcaacacatgggcaataacactgccaccgtcaccaccacgactaccatagccaccgtcaccacggaggacaggaagaaggaccactttaagaaaaatcgatgcctgtctatcgggatacaggtggatgatgctgaagaacctgacaaaacaggggagaataaagcacccagtaagttccagtccgtgggagtgcaagtagaagaagagaagtgcttccgcaggttcactcgatccaacagtgtgacgacagcagtacaggccgacctggacttccatgataatctggaaaattctctggaatctatagaggacaattcgtgtcctggccccatggccagacagttctcccgcgatgccagcacctccacagtcagcattcagggctcaggaaaccattaccatgcctgtgccgccgatgatgactttgacacggattttgacccctctattctgcctcctccggacccctggattgactctatcactgaagaccctctggaggccgtgcaaaggtcagtgtgccaccgggatggccactggttcctgaagcttctccaggcagagcgagaccgcatggaggggtggtgtcaacagatggagcgggaagaacgggaaaacaacctgcccgaagacattctaggaaaaatccgaaccgcagtgggcagtgcccaacttctcatggcccagaaattctaccagttcagagaactgtgtgaagaaaacctgaatcctaatgctcatccaagacccacctcccaggatttggcggggttttgggacatgctgcagttgtccatagaaaatattagtatgaaatttgatgaacttcatcagttaaaggccaataattggaaacagatggatcctcttgacaagaaggagagaagggcccctcctccagtgccaaagaagccggcgaagggccccgcgccgctgatccgggagcgctcgctggagagctcgcagcgccaggaggcccgcaagcgcctgatggccgccaagcgcgccgcgtccgtccgccagaactcggccaccgagagcgccgagagcatcgagatctacatccccgaggcgcagacccggctctgagcgccccgcagcccggccgccgccgccaagcatctgtcccctcctcccccggccgctcctctgccggctgcctctccccctccgagcccgtccgctcccgagctcggtgacttccactgtcgcggtgtagttgtccacctcgcaggagccgccccccgggcccccctcagccccccacttcccgtacccgtttgcccatctccttcttcaccgagcttcgccccctgtcctgatgccgtcgccctgcctcatactgagatccaaccctttattttctgggcaaagccaaacccacctgtgtagaagtgatgcctttag

SEQ ID NO: 127277 - DNA, 5314 bp, Homo sapiens
  Payload ID: 4912
  Gene Symbol: DLGAP1
  Gene Name: discs, large (Drosophila) homolog-associated protein 1
  ENST ID: ENST00000515196
  CDS Start-End: 62-2161
gctgtttagaactattgtaccgctgccagtgactgtctgtattagggttgggagcaggaacatggatttgaagacattaaaactgtttaattctcagttgagatgtggttggctcttatacatttggaataaagcatttatggcacatctcagggttccacaagatgaatggacagggtacaccccacgaggtaaagatgatgaaattccatgccgaagaatgcggagtggcagttatatcaaggccatgggggatgaagacagtggagactcagacacgagtcctaagccttctccaaaagttgctgcgcggagagaaagctatctcaaggctactcagccatcccttacagaactcaccacactcaaaatctccaatgaacactcacccaaactccagatccggagtcatagttacctgagggcagtgagtgaagtctccatcaaccggagcctggacagcctggaccctgcaggcttgctcacatcaccaaagttccgctccaggaatgagagctacatgcgagccatgagcaccatcagccaggtgagcgagatggaagtgaacgggcagttcgagtccgtgtgcgagtccgtgttcagcgagctggagtcgcaggccgtggaagcgctggacctgcccatgcccggctgcttccgcatgcggagccacagctatgtgcgggccattgagaaaggctgctcccaggacgacgagtgcgtgtccctgaggtcgtcctcgccgccgcgcaccaccaccaccgttaggaccatccagagcagcacgggtgtcataaaactgagttctgcagttgaagtgtcatcttgcattacaacatataagaagacaccacctccagtcccacccagaactaccacgaaacctttcatttctatcacagcccagagtagcacagagtcagcccaggatgcctacatggacggacagggccagcgaggagatattatcagccagtctggactcagcaactccaccgagagcctggacagtatgaaggctctgacagccgccatcgaagctgcaaacgcccagatccatggccctgccagtcaacacatgggcaataacactgccaccgtcaccaccacgactaccatagccaccgtcaccacggaggacaggaagaaggaccactttaagaaaaatcgatgcctgtctatcgggatacaggtggatgatgctgaagaacctgacaaaacaggggagaataaagcacccagtaagttccagtccgtgggagtgcaagtagaagaagagaagtgcttccgcaggttcactcgatccaacagtgtgacgacagcagtacaggccgacctggacttccatgataatctggaaaattctctggaatctatagaggacaattcgtgtcctggccccatggccagacagttctcccgcgatgccagcacctccacagtcagcattcagggctcaggaaaccattaccatgcctgtgccgccgatgatgactttgacacggattttgacccctctattctgcctcctccggacccctggattgactctatcactgaagaccctctggaggccgtgcaaaggtcagtgtgccaccgggatggccactggttcctgaagcttctccaggcagagcgagaccgcatggaggggtggtgtcaacagatggagcgggaagaacgggaaaacaacctgcccgaagacattctaggaaaaatccgaaccgcagtgggcagtgcccaacttctcatggcccagaaattctaccagttcagagaactgtgtgaagaaaacctgaatcctaatgctcatccaagacccacctcccaggatttggcggggttttgggacatgctgcagttgtccatagaaaatattagtatgaaatttgatgaacttcatcagttaaaggccaataattggaaacagatggatcctcttgacaagaaggagagaagggcccctcctccagtgccaaagaagccggcgaagggccccgcgccgctgatccgggagcgctcgctggagagctcgcagcgccaggaggcccgcaagcgcctgatggccgccaagcgcgccgcgtccgtccgccagaactcggccaccgagagcgccgagagcatcgagatctacatccccgaggcgcagacccggctctgagcgccccgcagcccggccgccgccgccaagcatctgtcccctcctcccccggccgctcctctgccggctgcctctccccctccgagcccgtccgctcccgagctcggtgacttccactgtcgcggtgtagttgtccacctcgcaggagccgccccccgggcccccctcagccccccacttcccgtacccgtttgcccatctccttcttcaccgagcttcgccccctgtcctgatgccgtcgccctgcctcatactgagatccaaccctttattttctgggcaaagccaaacccacctgtgtagaagtgatgcctttaggtcacccgccgtcctcagttctctcgagctagtctgttcagcaatataaaaccatagggtatttcagaaatccagtatcacagggtgatcctttgggacttaccgtcttccacgtgaaagaaactaggcctccgattccctttatttcccctaaatggttattcttttaaaaaagcagatggagcactttattcccaacctcagaaatcacaccatctcactggaatccatgagggacacagagagaggggaccaagcctggcctgggggtgggggacctggatgtgtagcaaggatgggagaagcgaaatctgcaggtgctgggggcacctgcacactcacagctgcacaaactgcctcactgttacttcatcaatcacagcttcaaatgtctcaatcagcagaagattgtaaattcgatctttcagggaaattaatctattctgaaaggcaataacatgaagcaaggcaaaggaggcactgatggtttagtatactacataagggatttttttgttctattattaagaaaatctagacctgaaatgttttctcaactcttattgtactgtgtatatttatattgttgtcgtggcggctgtttttaaagggaaagtgttggttctattaatttgttaagtgtccatccaggtgggcctacctgattccacatatataagtacatatctgcttataaagcgctgtaaatggcagcaaggctgtttttggagaagagtttgggttttcctaccatccctttgaatgctacacatccgtctattttaacccaagtagttcgtatttcagatatattttctcctttcatctcctctcactactgcagagtccagtaatacctagcataggattctgtcctgtgtcaaatggctaaaataaatttttgccccaatagacatgctgcctcattcaaaagagctgccgctgtcatcttgaggttccaggtagtgagagaagaaactcgacctgccagggtcaacagccatgaagaggtggggggagtcatgattcataaacactgaaagaagtcaaggcttttggcagagagtgttgatttagatttttagtcttgattgatgggcagtatgcatcggtgtctagctgaagttgtctttaaatgcccttactcgtcacagtttaaacacttaggatgtggcaatcttaagtatcaatggcattttatgtccagctaacatcctaaagcattagaaattaaaaacgaaagacttttaaaaacatacatcaaacatgcttgcaccagagaagctttttaaaataatacactctcatagccaggtgctaatttaattttacttatgaaattaagagaggtgatgggttctagcaacagatattttcacggacatattctaaaaccactagagaattcgctacctctcagagccatcgatgctttgagctacctttataaacagggcacaaatgtttactgctgtggtttacaagaaaagggctactcacttattttgaaaccaacgaaccaacttttaactagggtgaacaaagcactcaaagtgctttgtgaaattggagcatacagagattttgagcttcaagtatttgctagttttaaaaagaatacaccttttctttaccttgtagcagcaattaaaagtcacacaaagcttgcatcgagtagggccaactgccacttgggtagcctatggtcacattcaatactgagaatgacttggaactcacagattaatatgaaagaagcagcgttcatcccaagacccatgctcacaattacagctccgtgccctgaggtagagttgagatttggattaagaaatagatttctaatacgactcaagatcatcctacaatattttctttggaaactaatttagcccatgatattttaaagagagacaagagaaggcctatttatcttgtctaagtgaacggcatttgtatattcataagctatttttggtaagaattttaaatcttttagctcaaggcctacagggcatcatgatctttgccttccttgaaaatacaatttaaattgtacaaacactttataaaaagctaattattggtgttagaacatgaccccacacaatgctgcttgacccctgaaactgacattcatgagcataacctttgttacattgttctttttgatgtaatttgtagaaatgttttttagttcgtaatggaaaatgtatgtaccctgaaaaattacttattttgtttaactttggtataaaggtgttgggcattttcttggggagggggggattacaaaagaagtttgtctcccacatcaaaaaacgttcaaagaaattaagtatttattatattttttgcagatgtttccatacaattcacataacctttttgtaaagagagatgaagaaatggattaaagatttttaatatttgaaatggtaaatagaactaatttattgtaatatatttctgttatttatagatgtttccttaatgttttactgtgcattaccactttcatttaagccttatccttgtgaatttaccatttcttttttaaaacatgtctagatgcatattttaaataactggaatgtaaatcactagcatatctgaattcccaaatgtaatttttaaaaattattttggtttggaaaaaaaagattcatttgaaagccttcagatggaggggtgggaacatttttatggctttatgaattggaatttcataggcttatttacctagattgtgtgtgaacaaaaaaatattgtaaatagatgaatgtttcccataatgtaaaaagaagaaattaataaaataattaatgcactgct

SEQ ID NO: 127278 - DNA, 2402 bp, Homo sapiens
  Payload ID: 4912
  Gene Symbol: DLGAP1
  Gene Name: discs, large (Drosophila) homolog-associated protein 1
  Uniprot ID: O14490
  ENST ID: ENST00000539435
  CDS Start-End: 77-2134
acttagaatcggcaaatcatagagagaagctaaatgctctcagctgcactataccaaatcaaagctgagatgaataatgaacttaattttccataaagacattctgtttggcattccagctaataaggttccacaagatgaatggacagggtacaccccacgaggtaaagatgatgaaattccatgccgaagaatgcggagtggcagttatatcaaggccatgggggatgaagacagtggagactcagacacgagtcctaagccttctccaaaagttgctgcgcggagagaaagctatctcaaggctactcagccatcccttacagaactcaccacactcaaaatctccaatgaacactcacccaaactccagatccggagtcatagttacctgagggcagtgagtgaagtctccatcaaccggagcctggacagcctggaccctgcaggcttgctcacatcaccaaagttccgctccaggaatgagagctacatgcgagccatgagcaccatcagccaggtgagcgagatggaagtgaacgggcagttcgagtccgtgtgcgagtccgtgttcagcgagctggagtcgcaggccgtggaagcgctggacctgcccatgcccggctgcttccgcatgcggagccacagctatgtgcgggccattgagaaaggctgctcccaggacgacgagtgcgtgtccctgaggtcgtcctcgccgccgcgcaccaccaccaccgttaggaccatccagagcagcacgggtgtcataaaactgagttctgcagttgaagtgtcatcttgcattacaacatataagaagacaccacctccagtcccacccagaactaccacgaaacctttcatttctatcacagcccagagtagcacagagtcagcccaggatgcctacatggacggacagggccagcgaggagatattatcagccagtctggactcagcaactccaccgagagcctggacagtatgaaggctctgacagccgccatcgaagctgcaaacgcccagatccatggccctgccagtcaacacatgggcaataacactgccaccgtcaccaccacgactaccatagccaccgtcaccacggaggacaggaagaaggaccactttaagaaaaatcgatgcctgtctatcgggatacaggtggatgatgctgaagaacctgacaaaacaggggagaataaagcacccagtaagttccagtccgtgggagtgcaagtagaagaagagaagtgcttccgcaggttcactcgatccaacagtgtgacgacagcagtacaggccgacctggacttccatgataatctggaaaattctctggaatctatagaggacaattcgtgtcctggccccatggccagacagttctcccgcgatgccagcacctccacagtcagcattcagggctcaggaaaccattaccatgcctgtgccgccgatgatgactttgacacggattttgacccctctattctgcctcctccggacccctggattgactctatcactgaagaccctctggaggccgtgcaaaggtcagtgtgccaccgggatggccactggttcctgaagcttctccaggcagagcgagaccgcatggaggggtggtgtcaacagatggagcgggaagaacgggaaaacaacctgcccgaagacattctaggaaaaatccgaaccgcagtgggcagtgcccaacttctcatggcccagaaattctaccagttcagagaactgtgtgaagaaaacctgaatcctaatgctcatccaagacccacctcccaggatttggcggggttttgggacatgctgcagttgtccatagaaaatattagtatgaaatttgatgaacttcatcagttaaaggccaataattggaaacagatggatcctcttgacaagaaggagagaagggcccctcctccagtgccaaagaagccggcgaagggccccgcgccgctgatccgggagcgctcgctggagagctcgcagcgccaggaggcccgcaagcgcctgatggccgccaagcgcgccgcgtccgtccgccagaactcggccaccgagagcgccgagagcatcgagatctacatccccgaggcgcagacccggctctgagcgccccgcagcccggccgccgccgccaagcatctgtcccctcctcccccggccgctcctctgccggctgcctctccccctccgagcccgtccgctcccgagctcggtgacttccactgtcgcggtgtagttgtccacctcgcaggagccgccccccgggcccccctcagccccccacttcccgtacccgtttgcccatctccttcttcaccgagcttcgccccctgtcctgatgccgtcgccctgcctcatactgagatccaaccct

SEQ ID NO: 127279 - DNA, 2258 bp, Homo sapiens
  Payload ID: 4912
  Gene Symbol: DLGAP1
  Gene Name: discs, large (Drosophila) homolog-associated protein 1
  Uniprot ID: O14490
  ENST ID: ENST00000581699
  CDS Start-End: 26-2077
agagatgaaattttaggaaagcaaaatgatcgacctttttaaggctgagtgggtttcttcagtttgtgtgcaagtttcaagaaatggaaggactgaccaggttccacaagatgaatggacagggtacaccccacgaggtaaagatgatgaaattccatgccgaagaatgcggagtggcagttatatcaaggccatgggggatgaagacagtggagactcagacacgagtcctaagccttctccaaaagttgctgcgcggagagaaagctatctcaaggctactcagccatcccttacagaactcaccacactcaaaatctccaatgaacactcacccaaactccagatccggagtcatagttacctgagggcagtgagtgaagtctccatcaaccggagcctggacagcctggaccctgcaggcttgctcacatcaccaaagttccgctccaggaatgagagctacatgcgagccatgagcaccatcagccaggtgagcgagatggaagtgaacgggcagttcgagtccgtgtgcgagtccgtgttcagcgagctggagtcgcaggccgtggaagcgctggacctgcccatgcccggctgcttccgcatgcggagccacagctatgtgcgggccattgagaaaggctgctcccaggacgacgagtgcgtgtccctgaggtcgtcctcgccgccgcgcaccaccaccaccgttaggaccatccagagcagcacggtgtcatcttgcattacaacatataagaagacaccacctccagtcccacccagaactaccacgaaacctttcatttctatcacagcccagagtagcacagagtcagcccaggatgcctacatggacggacagggccagcgaggagatattatcagccagtctggactcagcaactccaccgagagcctggacagtatgaaggctctgacagccgccatcgaagctgcaaacgcccagatccatggccctgccagtcaacacatgggcaataacactgccaccgtcaccaccacgactaccatagccaccgtcaccacggaggacaggaagaaggaccactttaagaaaaatcgatgcctgtctatcgggatacaggtggatgatgctgaagaacctgacaaaacaggggagaataaagcacccagtaagttccagtccgtgggagtgcaagtagaagaagagaagtgcttccgcaggttcactcgatccaacagtgtgacgacagcagtacaggccgacctggacttccatgataatctggaaaattctctggaatctatagaggacaattcgtgtcctggccccatggccagacagttctcccgcgatgccagcacctccacagtcagcattcagggctcaggaaaccattaccatgcctgtgccgccgatgatgactttgacacggattttgacccctctattctgcctcctccggacccctggattgactctatcactgaagaccctctggaggccgtgcaaaggtcagtgtgccaccgggatggccactggttcctgaagcttctccaggcagagcgagaccgcatggaggggtggtgtcaacagatggagcgggaagaacgggaaaacaacctgcccgaagacattctaggaaaaatccgaaccgcagtgggcagtgcccaacttctcatggcccagaaattctaccagttcagagaactgtgtgaagaaaacctgaatcctaatgctcatccaagacccacctcccaggatttggcggggttttgggacatgctgcagttgtccatagaaaatattagtatgaaatttgatgaacttcatcagttaaaggccaataattggaaacagatggatcctcttgacaagaaggagagaagggcccctcctccagtgccaaagaagccggcgaagggccccgcgccgctgatccgggagcgctcgctggagagctcgcagcgccaggaggcccgcaagcgcctgatggccgccaagcgcgccgcgtccgtccgccagaactcggccaccgagagcgccgagagcatcgagatctacatccccgaggcgcagacccggctctgagcgccccgcagcccggccgccgccgccaagcatctgtcccctcctcccccggccgctcctctgccggctgcctctccccctccgagcccgtccgctcccgagctcggtgacttccactgtcgcggtgtagttgtccacctcgcaggagccgccccccgggcccccctcagccccccacttc

SEQ ID NO: 127280 - DNA, 6356 bp, Homo sapiens
  Payload ID: 4912
  Gene Symbol: DLGAP1
  Gene Name: discs, large (Drosophila) homolog-associated protein 1
  Uniprot ID: O14490
  ENST ID: ENST00000584874
  CDS Start-End: 270-3203
cagagcagttgaacatcagatacccagagtgacatcaggttaaaaaaaagcctgcaatttggatcttttcctgactcggaagcaaggaaaatggacaattgataatcaaaggctaaatctcttctgggatccactgaatgccactagagggtctgctcgagagaattcctgattgaatgacaacggcgctaagaacaatccctgcccaagacgggtctggagcctgacttccgggtgtccatgaccctggcggctgcttccggtccgccatgaaagggctatcaggcagccgcagccatcaccacggggtcacctgcgactcggcctgtgactcgctgtcgcaccactccgaccgcaagccctacctgctgagcccagtggagcaccaccccgcagaccacccatactacacccagcggaactccttccaggctgagtgcgtgggccccttcagcgacccgctggccagcagcaccttcccccgcaggcactacacctcgcagcaagagctgaaggacgagtgtgccctggtgccccgcaccctggccaccaaggcgaaccgcatccccgccaacctgctggaccagttcgagcggcagctgccactcagccgcgatggctatcacaccctgcagtacaagcgcacggccgtggagcaccgcagcgacagccccggccgcatccgccacctggtgcactcggtccagaagctcttcaccaagtcgcactccctggaggggccgtccaagggcagcgtcaacgggggcaaggccagccctgacgaggcgcaggcggcgcgctatggcaaacgcagcaagagcaaggagcggcgcgcggagcccaaggcccggcccagcacctccccgggctggtggagctcggacgacaacctggatggtgacatgtgcatctaccacgccccctcgggcgtgatgaccatgggcaggtgccccgaccgctcggcctcacagtacttcctggaggcctacaacaccatcagcgagcaggcggtgaaggcctcccggagcaacaacgacgtcaagtgctccacctgcgccaacctgccggtcagcctggacaccccgctgctgaagaagagcgcctggtcctccacgctcaccgtgagccgggcccgggaggtttaccagaaggcctcggtgaacatggaccaggccatggtgaagtccgagtcgtgtcagcaagaacgctcctgccagtacctgcaggttccacaagatgaatggacagggtacaccccacgaggtaaagatgatgaaattccatgccgaagaatgcggagtggcagttatatcaaggccatgggggatgaagacagtggagactcagacacgagtcctaagccttctccaaaagttgctgcgcggagagaaagctatctcaaggctactcagccatcccttacagaactcaccacactcaaaatctccaatgaacactcacccaaactccagatccggagtcatagttacctgagggcagtgagtgaagtctccatcaaccggagcctggacagcctggaccctgcaggcttgctcacatcaccaaagttccgctccaggaatgagagctacatgcgagccatgagcaccatcagccaggtgagcgagatggaagtgaacgggcagttcgagtccgtgtgcgagtccgtgttcagcgagctggagtcgcaggccgtggaagcgctggacctgcccatgcccggctgcttccgcatgcggagccacagctatgtgcgggccattgagaaaggctgctcccaggacgacgagtgcgtgtccctgaggtcgtcctcgccgccgcgcaccaccaccaccgttaggaccatccagagcagcacggtgtcatcttgcattacaacatataagaagacaccacctccagtcccacccagaactaccacgaaacctttcatttctatcacagcccagagtagcacagagtcagcccaggatgcctacatggacggacagggccagcgaggagatattatcagccagtctggactcagcaactccaccgagagcctggacagtatgaaggctctgacagccgccatcgaagctgcaaacgcccagatccatggccctgccagtcaacacatgggcaataacactgccaccgtcaccaccacgactaccatagccaccgtcaccacggaggacaggaagaaggaccactttaagaaaaatcgatgcctgtctatcgggatacaggtggatgatgctgaagaacctgacaaaacaggggagaataaagcacccagtaagttccagtccgtgggagtgcaagtagaagaagagaagtgcttccgcaggttcactcgatccaacagtgtgacgacagcagtacaggccgacctggacttccatgataatctggaaaattctctggaatctatagaggacaattcgtgtcctggccccatggccagacagttctcccgcgatgccagcacctccacagtcagcattcagggctcaggaaaccattaccatgcctgtgccgccgatgatgactttgacacggattttgacccctctattctgcctcctccggacccctggattgactctatcactgaagaccctctggaggccgtgcaaaggtcagtgtgccaccgggatggccactggttcctgaagcttctccaggcagagcgagaccgcatggaggggtggtgtcaacagatggagcgggaagaacgggaaaacaacctgcccgaagacattctaggaaaaatccgaaccgcagtgggcagtgcccaacttctcatggcccagaaattctaccagttcagagaactgtgtgaagaaaacctgaatcctaatgctcatccaagacccacctcccaggatttggcggggttttgggacatgctgcagttgtccatagaaaatattagtatgaaatttgatgaacttcatcagttaaaggccaataattggaaacagatggatcctcttgacaagaaggagagaagggcccctcctccagtgccaaagaagccggcgaagggccccgcgccgctgatccgggagcgctcgctggagagctcgcagcgccaggaggcccgcaagcgcctgatggccgccaagcgcgccgcgtccgtccgccagaactcggccaccgagagcgccgagagcatcgagatctacatccccgaggcgcagacccggctctgagcgccccgcagcccggccgccgccgccaagcatctgtcccctcctcccccggccgctcctctgccggctgcctctccccctccgagcccgtccgctcccgagctcggtgacttccactgtcgcggtgtagttgtccacctcgcaggagccgccccccgggcccccctcagccccccacttcccgtacccgtttgcccatctccttcttcaccgagcttcgccccctgtcctgatgccgtcgccctgcctcatactgagatccaaccctttattttctgggcaaagccaaacccacctgtgtagaagtgatgcctttaggtcacccgccgtcctcagttctctcgagctagtctgttcagcaatataaaaccatagggtatttcagaaatccagtatcacagggtgatcctttgggacttaccgtcttccacgtgaaagaaactaggcctccgattccctttatttcccctaaatggttattcttttaaaaaagcagatggagcactttattcccaacctcagaaatcacaccatctcactggaatccatgagggacacagagagaggggaccaagcctggcctgggggtgggggacctggatgtgtagcaaggatgggagaagcgaaatctgcaggtgctgggggcacctgcacactcacagctgcacaaactgcctcactgttacttcatcaatcacagcttcaaatgtctcaatcagcagaagattgtaaattcgatctttcagggaaattaatctattctgaaaggcaataacatgaagcaaggcaaaggaggcactgatggtttagtatactacataagggatttttttgttctattattaagaaaatctagacctgaaatgttttctcaactcttattgtactgtgtatatttatattgttgtcgtggcggctgtttttaaagggaaagtgttggttctattaatttgttaagtgtccatccaggtgggcctacctgattccacatatataagtacatatctgcttataaagcgctgtaaatggcagcaaggctgtttttggagaagagtttgggttttcctaccatccctttgaatgctacacatccgtctattttaacccaagtagttcgtatttcagatatattttctcctttcatctcctctcactactgcagagtccagtaatacctagcataggattctgtcctgtgtcaaatggctaaaataaatttttgccccaatagacatgctgcctcattcaaaagagctgccgctgtcatcttgaggttccaggtagtgagagaagaaactcgacctgccagggtcaacagccatgaagaggtggggggagtcatgattcataaacactgaaagaagtcaaggcttttggcagagagtgttgatttagatttttagtcttgattgatgggcagtatgcatcggtgtctagctgaagttgtctttaaatgcccttactcgtcacagtttaaacacttaggatgtggcaatcttaagtatcaatggcattttatgtccagctaacatcctaaagcattagaaattaaaaacgaaagacttttaaaaacatacatcaaacatgcttgcaccagagaagctttttaaaataatacactctcatagccaggtgctaatttaattttacttatgaaattaagagaggtgatgggttctagcaacagatattttcacggacatattctaaaaccactagagaattcgctacctctcagagccatcgatgctttgagctacctttataaacagggcacaaatgtttactgctgtggtttacaagaaaagggctactcacttattttgaaaccaacgaaccaacttttaactagggtgaacaaagcactcaaagtgctttgtgaaattggagcatacagagattttgagcttcaagtatttgctagttttaaaaagaatacaccttttctttaccttgtagcagcaattaaaagtcacacaaagcttgcatcgagtagggccaactgccacttgggtagcctatggtcacattcaatactgagaatgacttggaactcacagattaatatgaaagaagcagcgttcatcccaagacccatgctcacaattacagctccgtgccctgaggtagagttgagatttggattaagaaatagatttctaatacgactcaagatcatcctacaatattttctttggaaactaatttagcccatgatattttaaagagagacaagagaaggcctatttatcttgtctaagtgaacggcatttgtatattcataagctatttttggtaagaattttaaatcttttagctcaaggcctacagggcatcatgatctttgccttccttgaaaatacaatttaaattgtacaaacactttataaaaagctaattattggtgttagaacatgaccccacacaatgctgcttgacccctgaaactgacattcatgagcataacctttgttacattgttctttttgatgtaatttgtagaaatgttttttagttcgtaatggaaaatgtatgtaccctgaaaaattacttattttgtttaactttggtataaaggtgttgggcattttcttggggagggggggattacaaaagaagtttgtctcccacatcaaaaaacgttcaaagaaattaagtatttattatattttttgcagatgtttccatacaattcacataacctttttgtaaagagagatgaagaaatggattaaagatttttaatatttgaaatggtaaatagaactaatttattgtaatatatttctgttatttatagatgtttccttaatgttttactgtgcattaccactttcatttaagccttatccttgtgaatttaccatttcttttttaaaacatgtctagatgcatattttaaataactggaatgtaaatcactagcatatctgaattcccaaatgtaatttttaaaaattattttggtttggaaaaaaaagattcatttgaaagccttcagatggaggggtgggaacatttttatggctttatgaattggaatttcataggcttatttacctagattgtgtgtgaacaaaaaaatattgtaaatagatgaatgtttcccataatgtaaaaagaagaaattaataaaataattaatgcactgct

SEQ ID NO: 127281 - DNA, 3525 bp, Homo sapiens
  Payload ID: 4912
  Gene Symbol: DLGAP1
  Gene Name: discs, large (Drosophila) homolog-associated protein 1
  Uniprot ID: O14490
  ENST ID: ENST00000581527
  CDS Start-End: 528-3317
agcctccgctccagaggcgagcgctgcgcttcgggcgccgcaatctccaggacacggcctcgcggacaccttccgcctcggggaatcggcagcataggcggcgcgaacggccgccgccgcctcggctcctctctcgagtccttcccgtcacctcgctgagagccggtcctggtcgcggggacatctctctccttcctccgaggctcgtgggaccaacggacggacgcagccagcgagggccggactgcgggacgcggccagagcagttgaacatcagatacccagagtgacatcaggttaaaaaaaagcctgcaatttggatcttttcctgactcggaagcaaggaaaatggacaattgataatcaaaggctaaatctcttctgggatccactgaatgccactagagggtctgctcgagagaattcctgattgaatgacaacggcgctaagaacaatccctgcccaagacgggtctggagcctgacttccgggtgtccatgaccctggcggctgcttccggtccgccatgaaagggctatcaggcagccgcagccatcaccacggggtcacctgcgactcggcctgtgactcgctgtcgcaccactccgaccgcaagccctacctgctgagcccagtggagcaccaccccgcagaccacccatactacacccagcggaactccttccaggctgagtgcgtgggccccttcagcgacccgctggccagcagcaccttcccccgcaggcactacacctcgcagcaagagctgaaggacgagtgtgccctggtgccccgcaccctggccaccaaggcgaaccgcatccccgccaacctgctggaccagttcgagcggcagctgccactcagccgcgatggctatcacaccctgcagtacaagcgcacggccgtggagcaccgcagcgacagccccggccgcatccgccacctggtgcactcggtccagaagctcttcaccaagtcgcactccctggaggggccgtccaagggcagcgtcaacgggggcaaggccagccctgacgaggcgcaggcggcgcgctatggcaaacgcagcaagagcaaggagcggcgcgcggagcccaaggcccggcccagcacctccccgggctggtggagctcggacgacaacctggatggtgacatgtgcatctaccacgccccctcgggcgtgatgaccatgggcaggtgccccgaccgctcggcctcacagtacttcctggaggcctacaacaccatcagcgagcaggcggtgaaggcctcccggagcaacaacgacgtcaagtgctccacctgcgccaacctgccggtcagcctggacaccccgctgctgaagaagagcgcctggtcctccacgctcaccgtgagccgggcccgggaggtttaccagaaggcctcggtgaacatggaccaggccatggtgaagtccgagtcgtgtcagcaagaacgctcctgccagtacctgcaggttccacaagatgaatggacagggtacaccccacgaggtaaagatgatgaaattccatgccgaagaatgcggagtggcagttatatcaaggccatgggggatgaagacagtggagactcagacacgagtcctaagccttctccaaaagttgctgcgcggagagaaagctatctcaaggctactcagccatcccttacagaactcaccacactcaaaatctccaatgaacactcacccaaactccagatccggagtcatagttacctgagggcagtgagtgaagtctccatcaaccggagcctggacagcctggaccctgcaggcttgctcacatcaccaaagttccgctccaggaatgagagctacatgcgagccatgagcaccatcagccaggtgagcgagatggaagtgaacgggcagttcgagtccgtgtgcgagtccgtgttcagcgagctggagtcgcaggccgtggaagcgctggacctgcccatgcccggctgcttccgcatgcggagccacagctatgtgcgggccattgagaaaggctgctcccaggacgacgagtgcgtgtccctgaggtcgtcctcgccgccgcgcaccaccaccaccgttaggaccatccagagcagcacggtgtcatcttgcattacaacatataagaagacaccacctccagtcccacccagaactaccacgaaacctttcatttctatcacagcccagagtagcacagagtcagcccaggatgcctacatggacggacagggccagcgaggagatattatcagccagtctggactcagcaactccaccgagagcctggacagtatgaaggctctgacagccgccatcgaagctgcaaacgcccagatccatggccctgccagtcaacacatgggcaataacactgccaccgtcaccaccacgactaccatagccaccgtcaccacggaggacaggaagaaggaccactttaagaaaaatcgatgcctgtctatcgggatacaggtggatgatgctgaagaacctgacaaaacaggggagaataaagcacccagtaagttccagtccgtgggagtgcaagtagaagaagagaagtgcttccgcaggttcactcgatccaacagtgtgacgacagcagtacaggccgacctggacttccatgataatctggaaaattctctggaatctatagaggacaattcgtgtcctggccccatggccagacagttctcccgcgatgccagcacctccacagtcagcattcagggctcaggaaaccattaccatgcctgtgccgccgatgatgactttgacacggattttgacccctctattctgcctcctccggacccctggattgactctatcactgaagaccctctggaggccgtgcaaaggtcagtgtgccaccgggatggccactggttcctgaagcttctccaggcagagcgagaccgcatggaggggtggtgtcaacagatggagcgggaagaacgggaaaacaacctgcccgaagacattctaggaaaaatccgaaccgcagtgggcagtgcccaacttctcatggcccagaaattctaccagttcagagaactgtgtgaagaaaacctgaatcctaatgctcatccaagacccacctcccaggatttggcggggttttgggacatgctgcagttgtccatagaaaatattagtatgaaatttgatgaacttcatcagttaaaggccaataattggaaacagatggatcctcttgacaagaaggtagaacaatgtagattttgtatggttcatttaaaaacctgcacaaacactggacagtctaaataggcttctgcattcagtcctgctgtttacaatgtgaaatggagctgatatcatattaatttcattgtaatgacaatgtttacatagtaatcatttgggatattatctgtaatatgtttcaggcatatttttaaagaaaaacctgtctttgtgaattggaaaatgggaatgtggctttttttgttaattaaactttaagttaaaccatttt

SEQ ID NO: 127282 - DNA, 10132 bp, Homo sapiens
  Payload ID: 4913
  Gene Symbol: DLGAP2
  Gene Name: discs, large (Drosophila) homolog-associated protein 2
  Uniprot ID: Q9P1A6
  ENST ID: ENST00000421627
  CDS Start-End: 135-3062
aggaagaagctggagacttggtccagccgggcatcagctttccggggccggcagaggaggatctagacccgcagtactcatggtcgcccacgcagcacttcaatgaggagcgctactcgcccgcgcccaggagcatgaagggcctttccggaagtcggacccagccgccgctgtgttccgggcacacgtgtggtctggcgcccccggaggactgcgagcacctgcaccacgggcccgacgcgcggccgccctacctgctgagccccgccgacagctgccccggggggcgccaccgctgctcgccgcgcagctcggtgcactcggagtgcgtgatgatgccggtggtgctgggcgaccacgtgtccagcagcaccttcccgcggatgcactacagctcgcactacgacacgcgcgacgactgcgctgtggcccacgcgggcgccaagatcaaccgcatcccggccaacctgctggaccagttcgagaagcagctgccgctgcaccgggacggcttccacacgctgcagtaccagaggacgtccgcggccgccgagcagcgcagcgagagccccgggcggatccgccacctggtacactccgtgcagaagctcttcaccaagtcgcactcgctggagggctcctccaaaagcaacgccaacggcaccaaggcggacggccgggcggacgaccaccaccacgcccaccacgccaagcacagcaagaggagcaagagcaaggagcgcaagccggagggcaagccccggcccggcatgagcagctggtggagctcggacgacaacctggacagcgacagcacctatcggacgcccagcgtgctcaaccggcaccacctgggccccgtggcccactgctaccccgacgcgctgcagagccccttcggggacctgtccctcaagacctccaagagcaacaacgacgtcaagtgctcggcctgtgaggggttggcgctgacgcccgacgccaagtacctgaagcgcagctcctggtctacgctgacggtcagccaggccaaggaggcctaccgcaagagctcgctgaacctggacaagccgctgctgcaccaggacgccaagcccgccctgaggccgtgccactacctccaggtacctcaggatgagtggggagggtaccccaccggtggcaaagatgaggagattccctgcaggagaatgagaagtgggagttacattaaagccatgggggacgaggagagcggagagtcagactccagccccaagacatcaccaaagtcggcaatcctaccagagccgctgctgaagtccatcggacagagaccgcttggagagcaccagacccagacctacctgcaagctgcaagcgatgtgcctgtgggacacagcctggaccccgctgcgaactacaactccccgaaattccgctcccggaaccagagctacatgagggccgtcagcaccctgagccaggccagctgcgtgagccaggtgagcgaggcggagatcaatgggcaattcgagtccgtgtgcgagtccgtcttcagtgaagttgaatctcaggccatggatgccctcgacctcccgggatgtttccgaacaaggagtcacagctaccttcgagccattcaagccggctactcccaagatgacgaatgtattcccatgatgacaccctctgacatcacctccaccatcaggtcaacagcagctgtctcatatacaaattacaagaaaacgcccccaccggtgccccctcggaccacctccaagcctctgatctcggtgacggcgcagagcagcaccgaatccacccaggacgcctaccaggacagccgcgcacagaggatgtccccgtggccccaggacagccgcggcctctacaactccacggacagcctggacagcaacaaggccatgaacctcgcgctggaaacggccgctgcccagcgccacctgccagagagccagagcagctctgtgcggaccagcgacaaggccatcctggtgtccaaggcggaggagctcctcaagagccgctgctcctccatcgggattcaggattctgaattcccagagcatcagccatacccaaggtcagatgtggaaacggccacagattctgacacggagagccgcggtctgcgggaataccactctgtcggggtgcaagtggaagatgagaagcgacacggacgttttaaacgttctaacagcgtcacggccgccgtccaagctgacctggagctggaggggttcccaggccacatcaccacggaggacaaaggccttcagttcggctcatccttccagcggcactccgagcccagcacccccacccagtacagcgcggtgagaactgtacggacccaggggctcttcagctatagagaagactatcggacccaagtggacacctccaccctgccccctccagacccctggctggagcccgccatcgacacggtagagactgggaggatgtctccgtgccgcagggatggctcgtggtttttgaagctgctgcacgcagagacaaagaggatggaaggctggtgcaaagagatggagagagaggcggaggagaacgacctctcggaggaaattctcggtaaaatcaggagtgctgttgggagtgcccagcttctcatgtcccagaaattccagcagttttattggctttgccaacagaatatggaccccagcgccatgccgaggccgacgtcgcaggacctggccggctactgggacatgctgcagctctccattgaggacgtcagcatgaagttcgacgagctgcagcggctgcggctcaacgactggaagatgatggagtccccggaaagaaaggaagaaagaaaggtcccgcctccaataccaaagaagcctcccaaggggaagtttcccatcacaagagaaaaatccctggacctgcccgacagacaacgccaggaagcccggaggcgcctcatggccgccaagcgagcggcgtccttccggcagaattccgcctccgagcgcgcggacagcatcgagatctacatccccgaggcccagacccggctctgagggcggaggccggcgccttcccctcgtcgcttccgctttcccggacgcttgtgcagcgcggcgccgccctggtggtttctgtctcctcctcccgctgaacacgtcctcgctcccgcgctccccgcgccccggacacagcgggacgcggccggcggcctcagagtccacggagctcgcggcgaggacgacttctgcttttgttgttgttgttgttgttcacgggtggcctggctcacacttggctctgagggacaggtgtggcgagacctgatttctcctgcgtgttctcagaggacggcgagaaatgcctctggagctggaacccagcttacattttgttatttctatttttataaattgtgtgataattagaggtaagaataacaagtaactataaacgggtgcatcccaccactccctggaggcattagacacccaagtggaaggtgctacaacctgaagcgcaggaaagaaaggcccattcccctcgcacagccgagcttttactccctgagcacgggccgctccgctcccctgctcctgtctgtctcggacagaaaacacgaggctccttgtgtcaagcttcctgtgatggaaagcgacctctccaaccaccacactccccgccgtacagttctccagaatcccaggcgatgacaagtctgaacccacgaaaatacccagcgcagcatctacacattcaaaagataagctgagtgttcccaccaggaagtcacgcgcagagaggagagtcttacggagggctgggagcttaaaaggaaaacaatgtccttacttgtaaacagttattgtattttttatttctttctaacttaaaatacgacacccagtattttctttaagtttcaccatttacgctacatgtgatttttttaatgtatgtatatatatatattctcaaattgctctatcagctgacttttcagggtatccttaaaaaaaaacacacacgaaaaacaaaagtttgcttgtttaaaatgacagttgtgatgtaaaaagtttaagaaatatgaatgtgagtggtaagtatatctcagtttaaatggtaaagaagaaatgtagtttacatttgtatttttccagaattcttttgtcctatgcagtattgctaaagtcgagaatatattccttgcctgtgttagacatgaagggaaaaagaggtcacatattgtgatttccagctgtagcattcaaaaaaaaaattggtgttcatgactctgtggtcggtgccagaggaaaataggaacgactctaattaataggctttctgtgtatataattaaatttagctgctgcaaccattgttctgacacgacttctgtttcacagttcagaccggtcttcaaaggaaaagcctgtccgatttttccatgggttccagtttcagagttctcattattactcaaagtaaaagcggactgcgatttaagatgtttccaccccaatacctggtcttccttcccggcttaaggagtaccatgtacttagccacaggcagaatagctttcgatgaccccatagcactttgtttcttcgccttgatttgcactttacaatgtccccagcccctctgcagcccgtggctggcagggcgttcgatgtgcggttggcccccagcgcgccctccagagctgcggtgtctccctgcctcattccccacatcccactgagcatgggaccattgggagcagagctgatattaaagcatgtttagcttcgaagttttacttttttaaagctgagtagttaagaattccctgtaaaaacaaaaccctgtaaattgagcctcatgtctggtatatattttaccaaacagccttaaaatatatttggaagcaaaaatcagtacgaatgtatctccttgaaaaatgcaaaaaaaaaaaaatccctgaaatattcttctataaatgaatcctatttccccagagtgttcaaggcatttttctacctaaatgaatacctaaatcttgagtagtgtacggtaatgacgcttcttcctatatccactcttattatgttaaaacaaatgtatttgcgagtattggcattttagactttaaaaatgctgtatgatttcagatgaactctgctgtttagaagtaaccacagaaaagcaaagtcagtgtacactctgagtgaaaggaaatgtaatgtggataaaggcccgccacctcctcacattggtctatctactggcagctgatacgtttaactcatttccttgagcttatacaaaacatagaaaagcaaactgttaaagtagtcaataattatttgtctcagatcccagattctatgatccctgcttaaaagaaaatgttcactgcatgtaggttgatttcttatgttttgtagactcattgttatttttcaatccccaaaagtcttggcctaaaccatccctaggggagcagattaacctaccactacattgcacagggttggtgactcgacgtggtgaatgtgcacacgccctgcctggtccgccatgttccaaagaagatgatttaatggtagaacggatacctgctgctagacctgatggaatgttacctgtccgtgttacataatcaagtgcaatatactcagttctcatgcaggtgacattctaccatgaaacgcagaagataagccatgtttctgtattgtacatgtaaagaaaaataaaactgtttatgatacttgtgttagtcactcgagctagcttatttcagccacttctagcagatcatgccatggagctcacgacgtgtgaccatttcgtcatatttaaaatataacttcaagaaaagagtaaacatccattggagaacacggctgaaaattattgtgctgttctaggaacatcatcctagagagtgtgatgttcactataaccccatacctacattccctaatgatacagccaatgacaggtgaaacccagacactctccttagagccgacaggttgatcctgctgtgttgaaggctgtggttaataaaacacaagtatgataaacaggacctagcgtttagcccgggaaaggagaatgctgcttgtcacctagagtgctttccttgtgatgcgtctctcgcatcttcacgtgttgttgtgtttgaagtaaaactagttgttatcgatgacaatttttaccatagttttctcagcaaatttatatcaccatcttagaatggtatataaaaaaattgaactgtttatgataccaaaaaaattacagttttgtttaaaaggaaatgttgatgttttcaactccaaatcaattctaaaaacttcaagcacttaatggaaaggtaaatggtcagataaaaatataattacctgtaaggttatctggttttaaaagaaaaaaaaaaagcctacaaactcagtgacctactacgcagagggaatttttccctgctgcttcttatgaaagtggccaggtttattattagaagacacagtggcagagcacacatgtgcacaggttctgattatttctcttggagcatatgtccttgtcttgatttttgccttttcgatgccatattaagcagccaccgtttccacccctttcattagaaggccctgcatccgtaaattcgcgcatctctgtttttgttagatccttgtaagcatcgctacccgagtccaggatggaatttcacaggaaagtgaagggatactgcaggcctgtgtttgcagcgcctgtggtaactgtggaatgagctctgttagggacagttgtctggtttgtgccaaaccttcgaggggcgagtagggagtgggggaggtgggtccaagtctccctcaggaaggccttttctatcggcagcaattccatcaagccaagcctcctgtggtcctgagcatgaaggggccaggggacctcctgggagatgcagcttttgtttccgctgcgtttcatcagtcagccttgcttggaattctggcaggttccccggggtgtttcagtggacaggaggcccccgtgccgtggctgagtcagcctgggtaccccagtcaccagcagggccacccttgatgacagggccccccacgaacctgggaaaggcagcgggaaatgtgtgagagggtgtgcgctggtacggacataaaagcattgtccaaaacagcgctggttcggggagggcccctggatactgcctttggcccacactgaaaactgaaattgccccacctgtgagcacagaaacacgcttctccaacacgggccgaaataactaaactccacatggttcctgcctgctcatttcccagccctcttcttctcaagcctgaacttcatttttttttttagctgcaaatttaacaggctaatttaaaactgcagttttcagacgacagcccctgggaatgttccagggttctcttgttttgatctgcatgtctgtttacacttctctgtaggcgtgggttgaatacaagtttccaaaactttaaaatagaaaaccacgagcttaagaggtgaaaaagatgacccctttctgattaggatctgtaactctgtgggctgggtcaatgcagtgtgcttcattcagggccatgtggcagccatgacacacaccacataaggtcagctcagagcccatggcttccctgcaggagccccatcttgtcgctattagttgggagttgcaatacattgttggccataaacaaagtgctaaaggaaagggtttgcttctacacattcggctgaatgtcccccagtgcagggtggcagcagaatgttctggaaatgaaggagatattgctaggaatctctaggctgttaggcaacctggcttttattcatcctcagccggcaactcatctcaagtttatgtctcagtttttttcctctagaaaggggattacagttcctgtccctgtcttcctccaggacacactgtgaggattaatgacatattggctctaaagtcctttgagctcctgggaacaggtggtgaaagtgtgcgttactgctaaggattagtccctggcctcttctagaatgccgccctcccagctctgcagggcacgctgccagaatccaggctggtcgtaaacatctcagagataatcagggaccaccagaggcagaggccatgagactgtctttggaaaggtttggaaatgcagaaataactacaagggccattctccttagcttctggctttcaactgtttctagatgcttccaagaacaagaacccagcaccaaccagaattaggccacgttttcaccattacttaagctcaatcgcctcttagatgaaatgaggagataaactaaacattaaaatgatgaaggaaaaaaaattatttggaagccgaaaaccgcatgggtggggaaacatcaggaacgaaatcagacacactgactcaaaccacgcaagggtttgagaagcccacccctctaattccaggcgtttgtaatttttctacttcgcacttgagagaaggcagaggtggtccgtgggaaagctccgggaaacagccgtctttcatccttgccacattgaaaaatgtccacaattttatgaattgctgtcctaaccctggcgtttttatccagtgttaaaataaattatttcaagtttcaatgtaaacacttaacagatgacttctttgcagaagaaatgttcgttacctactatcaaactactttttaacagattttgtatatacacacacaagttgacagaggtttacctccctactttcttagattttatgtaactcttttcattggtgcttattcagaacctgaaagccttgggcatccaagctttcacctactcaatggaggagaggtgataatgaatgaaaagattgacaccaggtttcttggacaaatttaagttcaaatttatctctttcaagtagaccatggtctccctagagagtgtgttggcttgtgtctgccagtacgacaaaggacgctcccagcttgatcgtggtaccttatggaagccactcacgcattctctgatttacccccaaaacactaccatgccccagccccactcatttaaataatacaatcatatcactttcaaagggctcagcacgaatgttcccctcactccactttttaactcgtttgctgaactcgacaaggcttccccttacgagcagtgagacctaggctactttcgaacgcttccttccgaacggtaagccacttcgctctcgggcaggacaggtcctccctgcagagagagacaactcatcccccgaccttccatactacagaccaaaatacccaggtgtggcctaaggactatattaaatgcctcctatagaaattcaaggaatgttagaaccaggaaactagctgtttaaagttttaaagaagtatataaatatatatataaatataaatatgaaatcatatcgagtgtgaggatgagcagagtgccaaatattcagcatctgtacaaagtcattcactggaattcaactattttatgtcattctctttctcacgcttttatggttcttttgataaattctatttagtagcatgcaggatacctaatctgaatgtgcaatatgctattcatcaccacgacaatttcttacttcctcttaataacttaccagaatgttggtcattcctttaaggcagttaaggattgctttatttgtgttcttttttcccatgactttttttcactctcagctgactgtaagaaactgtgcaccgtttccgccataaccgtcctgtgacgatgcctccatttgacttctgtatcgctgatgttcacctcctgtaaatagtttggcaattaaattttttgagaaaagtaatgtttacttttttattggagtgaattctcgtgttattttaatctcagaaaaattatatagaccaaagagttttatccgaaaaaaaattacactcttcctccattatatatttcattgttgaaatatcctcaatttctctatattttaagaagtaatggacatttattaaggttacagatttaatatgtatgcaaaatggtatagattaaatgagtttttaattaataaatcctacagtatttagttaa

SEQ ID NO: 127283 - DNA, 3515 bp, Homo sapiens
  Payload ID: 4913
  Gene Symbol: DLGAP2
  Gene Name: discs, large (Drosophila) homolog-associated protein 2
  ENST ID: ENST00000520901
  CDS Start-End: 51-2936
cgcccacgcagcacttcaatgaggagcgctactcgcccgcgcccaggagcatgaagggcctttccggaagtcggacccagccgccgctgtgttccgggcacacgtgtggtctggcgcccccggaggactgcgagcacctgcaccacgggcccgacgcgcggccgccctacctgctgagccccgccgacagctgccccggggggcgccaccgctgctcgccgcgcagctcggtgcactcggagtgcgtgatgatgccggtggtgctgggcgaccacgtgtccagcagcaccttcccgcggatgcactacagctcgcactacgacacgcgcgacgactgcgctgtggcccacgcgggcgccaagatcaaccgcatcccggccaacctgctggaccagttcgagaagcagctgccgctgcaccgggacggcttccacacgctgcagtaccagaggacgtccgcggccgccgagcagcgcagcgagagccccgggcggatccgccacctggtacactccgtgcagaagctcttcaccaagtcgcactcgctggagggctcctccaaaagcaacgccaacggcaccaaggcggacggccgggcggacgaccaccaccacgcccaccacgccaagcacagcaagaggagcaagagcaaggagcgcaagccggagggcaagccccggcccggcatgagcagctggtggagctcggacgacaacctggacagcgacagcacctatcggacgcccagcgtgctcaaccggcaccacctgggccccgtggcccactgctaccccgacgcgctgcagagccccttcggggacctgtccctcaagacctccaagagcaacaacgacgtcaagtgctcggcctgtgaggggttggcgctgacgcccgacgccaagtacctgaagcgcagctcctggtctacgctgacggtcagccaggccaaggaggcctaccgcaagagctcgctgaacctggacaagccgctgctgcaccaggacgccaagcccgccctgaggccgtgccactacctccaggtacctcaggatgagtggggagggtaccccaccggtggcaaagatgaggagattccctgcaggagaatgagaagtgggagttacattaaagccatgggggacgaggagagcggagagtcagactccagccccaagacatcaccaaagtcggcaatcctaccagagccgctgctgaagtccatcggacagagaccgcttggagagcaccagacccagacctacctgcaagctgcaagcgatgtgcctgtgggacacagcctggaccccgctgcgaactacaactccccgaaattccgctcccggaaccagagctacatgagggccgtcagcaccctgagccaggccagctgcgtgagccaggtgagcgaggcggagatcaatgggcaattcgagtccgtgtgcgagtccgtcttcagtgaagttgaatctcaggccatggatgccctcgacctcccgggatgtttccgaacaaggagtcacagctaccttcgagccattcaagccggctactcccaagatgacgaatgtattcccatgatgacaccctctgacatcacctccaccatcaggtcaacagcagctgtctcatatacaaattacaagaaaacgcccccaccggtgccccctcggaccacctccaagcctctgatctcggtgacggcgcagagcagcaccgaatccacccaggacgcctaccaggacagccgcgcacagaggatgtccccgtggccccaggacagccgcggcctctacaactccacggacagcctggacagcaacaaggccatgaacctcgcgctggaaacggccgctgcccagcgccacctgccagagagccagagcagctctgtgcggaccagcgacaaggccatcctggtgtccaaggcggaggagctcctcaagagccgctgctcctccatcgggattcaggtggaaacggccacagattctgacacggagagccgcggtctgcgggaataccactctgtcggggtgcaagtggaagatgagaagcgacacggacgttttaaacgttctaacagcgtcacggccgccgtccaagctgacctggagctggaggggttcccaggccacatcaccacggaggacaaaggccttcagttcggctcatccttccagcggcactccgagcccagcacccccacccagtacagcgcggtgagaactgtacggacccaggggctcttcagctatagagaagactatcggacccaagtggacacctccaccctgccccctccagacccctggctggagcccgccatcgacacggtagagactgggaggatgtctccgtgccgcagggatggctcgtggtttttgaagctgctgcacgcagagacaaagaggatggaaggctggtgcaaagagatggagagagaggcggaggagaacgacctctcggaggaaattctcggtaaaatcaggagtgctgttgggagtgcccagcttctcatgtcccagaaattccagcagttttattggctttgccaacagaatatggaccccagcgccatgccgaggccgacgtcgcaggacctggccggctactgggacatgctgcagctctccattgaggacgtcagcatgaagttcgacgagctgcagcggctgcggctcaacgactggaagatgatggagtccccggaaagaaaggaagaaagaaaggtcccgcctccaataccaaagaagcctcccaaggggaagtttcccatcacaagagaaaaatccctggacctgcccgacagacaacgccaggaagcccggaggcgcctcatggccgccaagcgagcggcgtccttccggcagaattccgcctccgagcgcgcggacagcatcgagatctacatccccgaggcccagacccggctctgagggcggaggccggcgccttcccctcgtcgcttccgctttcccggacgcttgtgcagcgcggcgccgccctggtggtttctgtctcctcctcccgctgaacacgtcctcgctcccgcgctccccgcgccccggacacagcgggacgcggccggcggcctcagagtccacggagctcgcggcgaggacgacttctgcttttgttgttgttgttgttgttcacgggtggcctggctcacacttggctctgagggacaggtgtggcgagacctgatttctcctgcgtgttctcagaggacggcgagaaatgcctctggagctggaacccagcttacattttgttatttctatttttataaattgtgtgataattagaggtaagaataacaagtaactataaacgggtgcatcccaccactccctggaggcattagacacccaagtggaaggtgctacaacctgaagcgcaggaaagaaaggcccattcccctcgcacagccgagcttttactccctgagcacgggccgctccgctcccctgctcctgtctgtctcggacagaaaacacgaggctccttgtgtc

SEQ ID NO: 127284 - DNA, 10130 bp, Homo sapiens
  Payload ID: 4913
  Gene Symbol: DLGAP2
  Gene Name: discs, large (Drosophila) homolog-associated protein 2
  ENST ID: ENST00000620101
  CDS Start-End: 135-3062
aggaagaagctggagacttggtccagccgggcatcagctttccggggccggcagaggaggatctagacccgcagtactcatggtcgcccacgcagcacttcaatgaggagcgctactcgcccgcgcccaggagcatgaagggcctttccggaagtcggacccagccgccgctgtgttccgggcacacgtgtggtctggcgcccccggaggactgcgagcacctgcaccacgggcccgacgcgcggccgccctacctgctgagccccgccgacagctgccccggggggcgccaccgctgctcgccgcgcagctcggtgcactcggagtgcgtgatgatgccggtggtgctgggcgaccacgtgtccagcagcaccttcccgcggatgcactacagctcgcactacgacacgcgcgacgactgcgctgtggcccacgcgggcgccaagatcaaccgcatcccggccaacctgctggaccagttcgagaagcagctgccgctgcaccgggacggcttccacacgctgcagtaccagaggacgtccgcggccgccgagcagcgcagcgagagccccgggcggatccgccacctggtacactccgtgcagaagctcttcaccaagtcgcactcgctggagggctcctccaaaagcaacgccaacggcaccaaggcggacggccgggcggacgaccaccaccacgcccaccacgccaagcacagcaagaggagcaagagcaaggagcgcaagccggagggcaagccccggcccggcatgagcagctggtggagctcggacgacaacctggacagcgacagcacctatcggacgcccagcgtgctcaaccggcaccacctgggccccgtggcccactgctaccccgacgcgctgcagagccccttcggggacctgtccctcaagacctccaagagcaacaacgacgtcaagtgctcggcctgtgaggggttggcgctgacgcccgacgccaagtacctgaagcgcagctcctggtctacgctgacggtcagccaggccaaggaggcctaccgcaagagctcgctgaacctggacaagccgctgctgcaccaggacgccaagcccgccctgaggccgtgccactacctccaggtacctcaggatgagtggggagggtaccccaccggtggcaaagatgaggagattccctgcaggagaatgagaagtgggagttacattaaagccatgggggacgaggagagcggagagtcagactccagccccaagacatcaccaaagtcggcaatcctacaagagccgctgctgaagtccatcggacagagaccgcttggagagcaccagacccagacctacctgcaagctgcaagcgatgtgcctgtgggacacagcctggaccccgctgcgaactacaactccccgaaattccgctcccggaaccagagctacatgagggccgtcagcaccctgagccaggccagctgcgtgagccaggtgagcgaggcggagatcaatgggcaattcgagtccgtgtgcgagtccgtcttcagtgaagttgaatctcaggccatggatgccctcgacctcccgggatgtttccgaacaaggagtcacagctaccttcgagccattcaagccggctactcccaagatgacgaatgtattcccatgatgacaccctctgacatcacctccaccatcaggtcaacagcagctgtctcatatacaaattacaagaaaacgcccccaccggtgccccctcggaccacctccaagcctctgatctcggtgacggcgcagagcagcaccgaatccacccaggacgcctaccaggacagccgcgcacagaggatgtccccgtggccccaggacagccgcggcctctacaactccacggacagcctggacagcaacaaggccatgaacctcgcgctggagacggccgctgcccagcgccacctgccagagagccagagcagctctgtgcggaccagcgacaaggccatcctggtgtccaaggcggaggagctcctcaagagccgctgctcctccatcgggattcaggattctgaattcccagagcatcagccatacccaaggtcagatgtggaaacggccacagattctgacacggagagccgcggtctgcgggaataccactctgtcggggtgcaagtggaagatgagaagcgacacggacgttttaaacgttctaacagcgtcacggccgccgtccaagctgacctggagctggaggggttcccaggccacatcaccacggaggacaaaggccttcagttcggctcatccttccagcggcactccgagcccagcacccccacccagtacagcgcggtgagaactgtacggacccaggggctcttcagctatagagaagactatcggacccaagtggacacctccaccctgccccctccagacccctggctggagcccgccatcgacacggtagagactgggaggatgtctccgtgccgcagggatggctcgtggtttttgaagctgctgcacgcagagacaaagaggatggaaggctggtgcaaagagatggagagagaggcggaggagaacgacctctcggaggaaattctcggtaaaatcaggagtgctgttgggagtgcccagcttctcatgtcccagaaattccagcagttttattggctttgccaacagaatatggaccccagcgccatgccgaggccgacgtcgcaggacctggccggctactgggacatgctgcagctctccattgaggacgtcagcatgaagttcgacgagctgcagcggctgcggctcaacgactggaagatgatggagtccccggaaagaaaggaagaaagaaaggtcccgcctccaataccaaagaagcctcccaaggggaagtttcccatcacaagagaaaaatccctggacctgcccgacagacaacgccaggaagcccggaggcgcctcatggccgccaagcgagcggcgtccttccggcagaattccgcctccgagcgcgcggacagcatcgagatctacatccccgaggcccagacccggctctgagggcggaggccggcgccttcccctcgtcgcttccgctttcccggacgcttgtgcagcgcggcgccgccctggtggtttctgtctcctcctcccgctgaacacgtcctcgctcccgcgctccccgcgccccggacacagcgggacgcggccggcggcctcagagtccacggagctcgcggcgaggacgacttctgcttttgttgttgttgttgttgttcacgggtggcctggctcacacttggctctgagggacaggtgtggcgagacctgatttctcctgcgtgttctcagaggacggcgagaaatgcctctggagctggaacccagcttacattttgttatttctatttttataaattgtgtgataattagaggtaagaataacaagtaactataaacgggtgcatcccaccactccctggaggcattagacacccaagtggaaggtgctacaacctgaagcgcaggaaagaaaggcccattcccctcgcacagccgagcttttactccctgagcacgggccgctccgctcccctgctcctgtctgtctcggacagaaaacacgaggctccttgtgtcaagcttcctgtgatggaaagcgacctctccaaccaccacactccccgccgtacagttctccagaatcccaggcgatgacaagtctgaacccacgaaaatacccagcgcagcatctacacattcaaaagataagctgagtgttcccaccaggaagtcacgcgcagagaggagagtcttacggagggctgggagcttaaaaggaaaacaatgtccttacttgtaaacagttattgtattttttatttctttctaacttaaaatacgacacccagtattttctttaagtttcaccatttacgctacatgtgatttttttaatgtatgtatatatatatattctcaaattgctctatcagctgacttttcagggtatccttaaaaaaaaacacacacgaaaaacaaaagtttgcttgtttaaaatgacagttgtgatgtaaaaagtttaagaaatatgaatgtgagtggtaagtatatctcagtttaaatggtaaagaagaaatgtagtttacatttgtatttttccagaattcttttgtcctatgcagtattgctaaagtcgagaatatattccttgcctgtgttagacatgaagggaaaaagaggtcacatattgtgatttccagctgtagcattcaaaaaaaaaattggtgttcatgactctgtggtcggtgccagaggaaaataggaacgactctaattaataggctttctgtgtatataattaaatttagctgctgcaaccattgttctgacacgacttctgtttcacagttcagaccggtcttcaaaggaaaagcctgtccgatttttccatgggttccagtttcagagttctcattattactcaaagtaaaagcggactgcgatttaagatgtttccaccccaatacctggtcttccttcccggcttaaggagtaccatgtacttagccacaggcagaatagctttcgatgaccccatagcactttgtttcttcgccttgatttgcactttacaatgtccccagcccctctgcagcccgtggctggcagggcgttcgatgtgcggttggcccccagcgcgccctccagagctgcggtgtctccctgcctcattccccacatcccactgagcatgggaccattgggagcagagctgatattaaagcatgtttagcttcgaagttttacttttttaaagctgagtagttaagaattccctgtaaaaacaaaaccctgtaaattgagcctcatgtctggtatatattttaccaaacagccttaaaatatatttggaagcaaaaatcagtacgaatgtatctccttgaaaaatgcaaaaaaaaaaaaatccctgaaatattcttctataaatgaatcctatttccccagagtgttcaaggcatttttctacctaaatgaatacctaaatcttgagtagtgtacggtaatgacgcttcttcctatatccactcttattatgttaaaacaaatgtatttgcgagtattggcattttagactttaaaaatgctgtatgatttcagatgaactctgctgtttagaagtaaccacagaaaagcaaagtcagtgtacactctgagtgaaaggaaatgtaatgtggataaaggcccgccacctcctcacattggtctatctactggcagctgatacgtttaactcatttccttgagcttatacaaaacatagaaaagcaaactgttaaagtagtcaataattatttgtctcagatcccagattctatgatccctgcttaaaagaaaatgttcactgcatgtaggttgatttcttatgttttgtagactcattgttatttttcaatccccaaaagtcttggcctaaaccatccctaggggagcagattaacctaccactacattgcacagggttggtgactcgacgtggtgaatgtgcacacgccctgcctggtccgccatgttccaaagaagatgatttaatggtagaacggatacctgctgctagacctgatggaatgttacctgtccgtgttacataatcaagtgcaatatactcagttctcatgcaggtgacattctaccatgaaacgcagaagataagccatgtttctgtattgtacatgtaaagaaaaataaaactgtttatgatacttgtgttagtcactcgagctagcttatttcagccacttctagcagatcatgccatggagctcacgacgtgtgaccatttcgtcatatttaaaatataacttcaagaaaagagtaaacatccattggagaacacggctgaaaattattgtgctgttctaggaacatcatcctagagagtgtgatgttcactataaccccatacctacattccctaatgatacagccaatgacaggtgaaacccagacactctccttagagccgacaggttgatcctgctgtgttgaaggctgtggttaataaaacacaagtatgataaacaggacctagcgtttagcccgggaaaggagaatgctgcttgtcacctagagtgctttccttgtgatgcgtctctcgcatcttcacgtgttgttgtgtttgaagtaaaactagttgttatcgatgacaatttttaccatagttttctcagcaaatttatatcaccatcttagaatggtatataaaaaaattgaactgtttatgataccaaaaaaattacagttttgtttaaaaggaaatgttgatgttttcaactccaaatcaattctaaaaacttcaagcacttaatggaaaggtaaatggtcagataaaaatataattacctgtaaggttatctggttttaaaagaaaaaaaaaaagcctacaaactcagtgacctactacgcagagggaatttttccctgctgcttcttatgaaagtggccaggtttattattagaagacacagtggcagagcacacatgtgcacaggttctgattatttctcttggagcatatgtccttgtcttgatttttgccttttcgatgccatattaagcagccaccgtttccacccctttcattagaaggccctgcatccgtaaattcgcgcatctctgtttttgttagatccttgtaagcatcgctacccgagtccaggatggaatttcacaggaaagtgaagggatactgcaggcctgtgtttgcagcgcctgtggtaactgtggaatgagctctgttagggacagttgtctggtttgtgccaaaccttcgaggggcgagtagggagtgggggaggtgggtccaagtctccctcaggaaggccttttctatcggcagcaattccatcaagccaagcctcctgtggtcctgagcatgaaggggccaggggacctcctgggagatgcagcttttgtttccgctgcgtttcatcagtcagccttgcttggaattctggcaggttccccggggtgtttcagtggacaggaggcccccgtgccgtggctgagtcagcctgggtaccccagtcaccagcagggccacccttgatgacagggccccccacgaacctgggaaaggcagcgggaaatgtgtgagagggtgtgcgctggtacggacataaaagcattgtccaaaacagcgctggttcggggagggcccctggatactgcctttggcccacactgaaaactgaaattgccccacctgtgagcacagaaacacgcttctccaacacgggccgaaataactaaactccacatggttcctgcctgctcatttcccagccctcttcttctcaagcctgaacttcatttttttttttagctgcaaatttaacaggctaatttaaaactgcagttttcagacgacagcccctgggaatgttccagggttctcttgttttgatctgcatgtctgtttacacttctctgtaggcgtgggttgaatacaagtttccaaaactttaaaatagaaaaccacgagcttaagaggtgaaaaagatgacccctttctgattaggatctgtaactctgtgggctgggtcaatgcagtgtgcttcattcagggccatgtggcagccatgacacacaccacataaggtcagctcagagcccatggcttccctgcaggagccccatcttgtcgctattagttgggagttgcaatacattgttggccataaacaaagtgctaaaggaaagggtttgcttctacacattcggctgaatgtcccccagtgcagggtggcagcagaatgttctggaaatgaaggagatattgctaggaatctctaggctgttaggcaacctggcttttattcatcctcagccggcaactcatctcaagtttatgtctcagtttttttcctctagaaaggggattacagttcctgtccctgtcttcctccaggacacactgtgaggattaatgacatattggctctaaagtcctttgagctcctgggaacaggtggtgaaagtgtgcgttactgctaaggattagtccctggcctcttctagaatgccgccctcccagctctgcagggcacgctgccagaatccaggctggtcgtaaacatctcagagataatcagggaccaccagaggcagaggccatgagactgtctttggaaaggtttggaaatgcagaaataactacaagggccattctccttagcttctggctttcaactgtttctagatgcttccaagaacaagaacccagcaccaaccagaattaggccacgttttcaccattacttaagctcaatcgcctcttagatgaaatgaggagataaactaaacattaaaatgatgaaggaaaaaaaattatttggaagccgaaaaccgcatgggtggggaaacatcaggaacgaaatcagacacactgactcaaaccacgcaagggtttgagaagcccacccctctaattccaggcgtttgtaatttttctacttcgcacttgagagaaggcagaggtggtccgtgggaaagctccgggaaacagccgtctttcatccttgccacattgaaaaatgtccacaattttatgaattgctgtcctaaccctggcgtttttatccagtgttaaaataaattatttcaagtttcaatgtaaacacttaacagatgacttctttgcagaagaaatgttcgttacctactatcaaactactttttaacagattttgtatatacacacacaagttgacagaggtttacctccctactttcttagattttatgtaactcttttcattggtgcttattcagaacctgaaagccttgggcatccaagctttcacctactcaatggaggagaggtgataatgaatgaaaagattgacaccaggtttcttggacaaatttaagttcaaatttatctctttcaagtagaccatggtctccctagagagtgtgttggcttgtgtctgccagtacgacaaaggacgctcccagcttgatcgtggtaccttatggaagccactcacgcattctctgatttacccccaaaacactaccatgccccagccccactcatttaaataatacaatcatatcactttcaaagggctcagcacgaatgttcccctcactccactttttaactcgtttgctgaactcgacaaggcttccccttacgagcagtgagacctaggctactttcgaacgcttccttccgaacggtaagccacttcgctctcgggcaggacaggtcctccctgcagagagagacaactcatcccccgaccttccatactacagaccaaaatacccaggtgtggcctaaggactatattaaatgcctcctatagaaattcaaggaatgttagaaccaggaaactagctgtttaaagttttaaagaagtatataaatatatatataaatataaatatgaaatcatatcgagtgtgaggatgagcagagtgccaaatattcagcatctgtacaaagtcattcactggaattcaactattttatgtcattctctttctcacgcttttatggttcttttgataaattctatttagtagcatgcaggatacctaatctgaatgtgcaatatgctattcatcaccacgacaatttcttacttcctcttaataacttaccagaatgttggtcattcctttaaggcagttaaggattgctttatttgtgttcttttttcccatgactttttttcactctcagctgactgtaagaaactgtgcaccgtttccgccataaccgtcctgtgacgatgcctccatttgacttctgtatcgctgatgttcacctcctgtaaatagtttggcaattaaattttttgagaaaagtaatgtttacttttttattggagtgaattctcgtgttattttaatctcagaaaaattatatagaccaaagagttttatccgaaaaaaaattacactcttcctccattatatatttcattgttgaaatatcctcaatttctctatattttaagaagtaatggacatttattaaggttacagatttaatatgtatgcaaaatggtatagattaaatgagtttttaattaataaatcctacagtatttagtt

SEQ ID NO: 127285 - DNA, 10088 bp, Homo sapiens
  Payload ID: 4913
  Gene Symbol: DLGAP2
  Gene Name: discs, large (Drosophila) homolog-associated protein 2
  ENST ID: ENST00000620226
  CDS Start-End: 135-3020
aggaagaagctggagacttggtccagccgggcatcagctttccggggccggcagaggaggatctagacccgcagtactcatggtcgcccacgcagcacttcaatgaggagcgctactcgcccgcgcccaggagcatgaagggcctttccggaagtcggacccagccgccgctgtgttccgggcacacgtgtggtctggcgcccccggaggactgcgagcacctgcaccacgggcccgacgcgcggccgccctacctgctgagccccgccgacagctgccccggggggcgccaccgctgctcgccgcgcagctcggtgcactcggagtgcgtgatgatgccggtggtgctgggcgaccacgtgtccagcagcaccttcccgcggatgcactacagctcgcactacgacacgcgcgacgactgcgctgtggcccacgcgggcgccaagatcaaccgcatcccggccaacctgctggaccagttcgagaagcagctgccgctgcaccgggacggcttccacacgctgcagtaccagaggacgtccgcggccgccgagcagcgcagcgagagccccgggcggatccgccacctggtacactccgtgcagaagctcttcaccaagtcgcactcgctggagggctcctccaaaagcaacgccaacggcaccaaggcggacggccgggcggacgaccaccaccacgcccaccacgccaagcacagcaagaggagcaagagcaaggagcgcaagccggagggcaagccccggcccggcatgagcagctggtggagctcggacgacaacctggacagcgacagcacctatcggacgcccagcgtgctcaaccggcaccacctgggccccgtggcccactgctaccccgacgcgctgcagagccccttcggggacctgtccctcaagacctccaagagcaacaacgacgtcaagtgctcggcctgtgaggggttggcgctgacgcccgacgccaagtacctgaagcgcagctcctggtctacgctgacggtcagccaggccaaggaggcctaccgcaagagctcgctgaacctggacaagccgctgctgcaccaggacgccaagcccgccctgaggccgtgccactacctccaggtacctcaggatgagtggggagggtaccccaccggtggcaaagatgaggagattccctgcaggagaatgagaagtgggagttacattaaagccatgggggacgaggagagcggagagtcagactccagccccaagacatcaccaaagtcggcaatcctacaagagccgctgctgaagtccatcggacagagaccgcttggagagcaccagacccagacctacctgcaagctgcaagcgatgtgcctgtgggacacagcctggaccccgctgcgaactacaactccccgaaattccgctcccggaaccagagctacatgagggccgtcagcaccctgagccaggccagctgcgtgagccaggtgagcgaggcggagatcaatgggcaattcgagtccgtgtgcgagtccgtcttcagtgaagttgaatctcaggccatggatgccctcgacctcccgggatgtttccgaacaaggagtcacagctaccttcgagccattcaagccggctactcccaagatgacgaatgtattcccatgatgacaccctctgacatcacctccaccatcaggtcaacagcagctgtctcatatacaaattacaagaaaacgcccccaccggtgccccctcggaccacctccaagcctctgatctcggtgacggcgcagagcagcaccgaatccacccaggacgcctaccaggacagccgcgcacagaggatgtccccgtggccccaggacagccgcggcctctacaactccacggacagcctggacagcaacaaggccatgaacctcgcgctggagacggccgctgcccagcgccacctgccagagagccagagcagctctgtgcggaccagcgacaaggccatcctggtgtccaaggcggaggagctcctcaagagccgctgctcctccatcgggattcaggtggaaacggccacagattctgacacggagagccgcggtctgcgggaataccactctgtcggggtgcaagtggaagatgagaagcgacacggacgttttaaacgttctaacagcgtcacggccgccgtccaagctgacctggagctggaggggttcccaggccacatcaccacggaggacaaaggccttcagttcggctcatccttccagcggcactccgagcccagcacccccacccagtacagcgcggtgagaactgtacggacccaggggctcttcagctatagagaagactatcggacccaagtggacacctccaccctgccccctccagacccctggctggagcccgccatcgacacggtagagactgggaggatgtctccgtgccgcagggatggctcgtggtttttgaagctgctgcacgcagagacaaagaggatggaaggctggtgcaaagagatggagagagaggcggaggagaacgacctctcggaggaaattctcggtaaaatcaggagtgctgttgggagtgcccagcttctcatgtcccagaaattccagcagttttattggctttgccaacagaatatggaccccagcgccatgccgaggccgacgtcgcaggacctggccggctactgggacatgctgcagctctccattgaggacgtcagcatgaagttcgacgagctgcagcggctgcggctcaacgactggaagatgatggagtccccggaaagaaaggaagaaagaaaggtcccgcctccaataccaaagaagcctcccaaggggaagtttcccatcacaagagaaaaatccctggacctgcccgacagacaacgccaggaagcccggaggcgcctcatggccgccaagcgagcggcgtccttccggcagaattccgcctccgagcgcgcggacagcatcgagatctacatccccgaggcccagacccggctctgagggcggaggccggcgccttcccctcgtcgcttccgctttcccggacgcttgtgcagcgcggcgccgccctggtggtttctgtctcctcctcccgctgaacacgtcctcgctcccgcgctccccgcgccccggacacagcgggacgcggccggcggcctcagagtccacggagctcgcggcgaggacgacttctgcttttgttgttgttgttgttgttcacgggtggcctggctcacacttggctctgagggacaggtgtggcgagacctgatttctcctgcgtgttctcagaggacggcgagaaatgcctctggagctggaacccagcttacattttgttatttctatttttataaattgtgtgataattagaggtaagaataacaagtaactataaacgggtgcatcccaccactccctggaggcattagacacccaagtggaaggtgctacaacctgaagcgcaggaaagaaaggcccattcccctcgcacagccgagcttttactccctgagcacgggccgctccgctcccctgctcctgtctgtctcggacagaaaacacgaggctccttgtgtcaagcttcctgtgatggaaagcgacctctccaaccaccacactccccgccgtacagttctccagaatcccaggcgatgacaagtctgaacccacgaaaatacccagcgcagcatctacacattcaaaagataagctgagtgttcccaccaggaagtcacgcgcagagaggagagtcttacggagggctgggagcttaaaaggaaaacaatgtccttacttgtaaacagttattgtattttttatttctttctaacttaaaatacgacacccagtattttctttaagtttcaccatttacgctacatgtgatttttttaatgtatgtatatatatatattctcaaattgctctatcagctgacttttcagggtatccttaaaaaaaaacacacacgaaaaacaaaagtttgcttgtttaaaatgacagttgtgatgtaaaaagtttaagaaatatgaatgtgagtggtaagtatatctcagtttaaatggtaaagaagaaatgtagtttacatttgtatttttccagaattcttttgtcctatgcagtattgctaaagtcgagaatatattccttgcctgtgttagacatgaagggaaaaagaggtcacatattgtgatttccagctgtagcattcaaaaaaaaaattggtgttcatgactctgtggtcggtgccagaggaaaataggaacgactctaattaataggctttctgtgtatataattaaatttagctgctgcaaccattgttctgacacgacttctgtttcacagttcagaccggtcttcaaaggaaaagcctgtccgatttttccatgggttccagtttcagagttctcattattactcaaagtaaaagcggactgcgatttaagatgtttccaccccaatacctggtcttccttcccggcttaaggagtaccatgtacttagccacaggcagaatagctttcgatgaccccatagcactttgtttcttcgccttgatttgcactttacaatgtccccagcccctctgcagcccgtggctggcagggcgttcgatgtgcggttggcccccagcgcgccctccagagctgcggtgtctccctgcctcattccccacatcccactgagcatgggaccattgggagcagagctgatattaaagcatgtttagcttcgaagttttacttttttaaagctgagtagttaagaattccctgtaaaaacaaaaccctgtaaattgagcctcatgtctggtatatattttaccaaacagccttaaaatatatttggaagcaaaaatcagtacgaatgtatctccttgaaaaatgcaaaaaaaaaaaaatccctgaaatattcttctataaatgaatcctatttccccagagtgttcaaggcatttttctacctaaatgaatacctaaatcttgagtagtgtacggtaatgacgcttcttcctatatccactcttattatgttaaaacaaatgtatttgcgagtattggcattttagactttaaaaatgctgtatgatttcagatgaactctgctgtttagaagtaaccacagaaaagcaaagtcagtgtacactctgagtgaaaggaaatgtaatgtggataaaggcccgccacctcctcacattggtctatctactggcagctgatacgtttaactcatttccttgagcttatacaaaacatagaaaagcaaactgttaaagtagtcaataattatttgtctcagatcccagattctatgatccctgcttaaaagaaaatgttcactgcatgtaggttgatttcttatgttttgtagactcattgttatttttcaatccccaaaagtcttggcctaaaccatccctaggggagcagattaacctaccactacattgcacagggttggtgactcgacgtggtgaatgtgcacacgccctgcctggtccgccatgttccaaagaagatgatttaatggtagaacggatacctgctgctagacctgatggaatgttacctgtccgtgttacataatcaagtgcaatatactcagttctcatgcaggtgacattctaccatgaaacgcagaagataagccatgtttctgtattgtacatgtaaagaaaaataaaactgtttatgatacttgtgttagtcactcgagctagcttatttcagccacttctagcagatcatgccatggagctcacgacgtgtgaccatttcgtcatatttaaaatataacttcaagaaaagagtaaacatccattggagaacacggctgaaaattattgtgctgttctaggaacatcatcctagagagtgtgatgttcactataaccccatacctacattccctaatgatacagccaatgacaggtgaaacccagacactctccttagagccgacaggttgatcctgctgtgttgaaggctgtggttaataaaacacaagtatgataaacaggacctagcgtttagcccgggaaaggagaatgctgcttgtcacctagagtgctttccttgtgatgcgtctctcgcatcttcacgtgttgttgtgtttgaagtaaaactagttgttatcgatgacaatttttaccatagttttctcagcaaatttatatcaccatcttagaatggtatataaaaaaattgaactgtttatgataccaaaaaaattacagttttgtttaaaaggaaatgttgatgttttcaactccaaatcaattctaaaaacttcaagcacttaatggaaaggtaaatggtcagataaaaatataattacctgtaaggttatctggttttaaaagaaaaaaaaaaagcctacaaactcagtgacctactacgcagagggaatttttccctgctgcttcttatgaaagtggccaggtttattattagaagacacagtggcagagcacacatgtgcacaggttctgattatttctcttggagcatatgtccttgtcttgatttttgccttttcgatgccatattaagcagccaccgtttccacccctttcattagaaggccctgcatccgtaaattcgcgcatctctgtttttgttagatccttgtaagcatcgctacccgagtccaggatggaatttcacaggaaagtgaagggatactgcaggcctgtgtttgcagcgcctgtggtaactgtggaatgagctctgttagggacagttgtctggtttgtgccaaaccttcgaggggcgagtagggagtgggggaggtgggtccaagtctccctcaggaaggccttttctatcggcagcaattccatcaagccaagcctcctgtggtcctgagcatgaaggggccaggggacctcctgggagatgcagcttttgtttccgctgcgtttcatcagtcagccttgcttggaattctggcaggttccccggggtgtttcagtggacaggaggcccccgtgccgtggctgagtcagcctgggtaccccagtcaccagcagggccacccttgatgacagggccccccacgaacctgggaaaggcagcgggaaatgtgtgagagggtgtgcgctggtacggacataaaagcattgtccaaaacagcgctggttcggggagggcccctggatactgcctttggcccacactgaaaactgaaattgccccacctgtgagcacagaaacacgcttctccaacacgggccgaaataactaaactccacatggttcctgcctgctcatttcccagccctcttcttctcaagcctgaacttcatttttttttttagctgcaaatttaacaggctaatttaaaactgcagttttcagacgacagcccctgggaatgttccagggttctcttgttttgatctgcatgtctgtttacacttctctgtaggcgtgggttgaatacaagtttccaaaactttaaaatagaaaaccacgagcttaagaggtgaaaaagatgacccctttctgattaggatctgtaactctgtgggctgggtcaatgcagtgtgcttcattcagggccatgtggcagccatgacacacaccacataaggtcagctcagagcccatggcttccctgcaggagccccatcttgtcgctattagttgggagttgcaatacattgttggccataaacaaagtgctaaaggaaagggtttgcttctacacattcggctgaatgtcccccagtgcagggtggcagcagaatgttctggaaatgaaggagatattgctaggaatctctaggctgttaggcaacctggcttttattcatcctcagccggcaactcatctcaagtttatgtctcagtttttttcctctagaaaggggattacagttcctgtccctgtcttcctccaggacacactgtgaggattaatgacatattggctctaaagtcctttgagctcctgggaacaggtggtgaaagtgtgcgttactgctaaggattagtccctggcctcttctagaatgccgccctcccagctctgcagggcacgctgccagaatccaggctggtcgtaaacatctcagagataatcagggaccaccagaggcagaggccatgagactgtctttggaaaggtttggaaatgcagaaataactacaagggccattctccttagcttctggctttcaactgtttctagatgcttccaagaacaagaacccagcaccaaccagaattaggccacgttttcaccattacttaagctcaatcgcctcttagatgaaatgaggagataaactaaacattaaaatgatgaaggaaaaaaaattatttggaagccgaaaaccgcatgggtggggaaacatcaggaacgaaatcagacacactgactcaaaccacgcaagggtttgagaagcccacccctctaattccaggcgtttgtaatttttctacttcgcacttgagagaaggcagaggtggtccgtgggaaagctccgggaaacagccgtctttcatccttgccacattgaaaaatgtccacaattttatgaattgctgtcctaaccctggcgtttttatccagtgttaaaataaattatttcaagtttcaatgtaaacacttaacagatgacttctttgcagaagaaatgttcgttacctactatcaaactactttttaacagattttgtatatacacacacaagttgacagaggtttacctccctactttcttagattttatgtaactcttttcattggtgcttattcagaacctgaaagccttgggcatccaagctttcacctactcaatggaggagaggtgataatgaatgaaaagattgacaccaggtttcttggacaaatttaagttcaaatttatctctttcaagtagaccatggtctccctagagagtgtgttggcttgtgtctgccagtacgacaaaggacgctcccagcttgatcgtggtaccttatggaagccactcacgcattctctgatttacccccaaaacactaccatgccccagccccactcatttaaataatacaatcatatcactttcaaagggctcagcacgaatgttcccctcactccactttttaactcgtttgctgaactcgacaaggcttccccttacgagcagtgagacctaggctactttcgaacgcttccttccgaacggtaagccacttcgctctcgggcaggacaggtcctccctgcagagagagacaactcatcccccgaccttccatactacagaccaaaatacccaggtgtggcctaaggactatattaaatgcctcctatagaaattcaaggaatgttagaaccaggaaactagctgtttaaagttttaaagaagtatataaatatatatataaatataaatatgaaatcatatcgagtgtgaggatgagcagagtgccaaatattcagcatctgtacaaagtcattcactggaattcaactattttatgtcattctctttctcacgcttttatggttcttttgataaattctatttagtagcatgcaggatacctaatctgaatgtgcaatatgctattcatcaccacgacaatttcttacttcctcttaataacttaccagaatgttggtcattcctttaaggcagttaaggattgctttatttgtgttcttttttcccatgactttttttcactctcagctgactgtaagaaactgtgcaccgtttccgccataaccgtcctgtgacgatgcctccatttgacttctgtatcgctgatgttcacctcctgtaaatagtttggcaattaaattttttgagaaaagtaatgtttacttttttattggagtgaattctcgtgttattttaatctcagaaaaattatatagaccaaagagttttatccgaaaaaaaattacactcttcctccattatatatttcattgttgaaatatcctcaatttctctatattttaagaagtaatggacatttattaaggttacagatttaatatgtatgcaaaatggtatagattaaatgagtttttaattaataaatcctacagtatttagtt

SEQ ID NO: 127286 - DNA, 10088 bp, Homo sapiens
  Payload ID: 4913
  Gene Symbol: DLGAP2
  Gene Name: discs, large (Drosophila) homolog-associated protein 2
  ENST ID: ENST00000612087
  CDS Start-End: 135-3020
aggaagaagctggagacttggtccagccgggcatcagctttccggggccggcagaggaggatctagacccgcagtactcatggtcgcccacgcagcacttcaatgaggagcgctactcgcccgcgcccaggagcatgaagggcctttccggaagtcggacccagccgccgctgtgttccgggcacacgtgtggtctggcgcccccggaggactgcgagcacctgcaccacgggcccgacgcgcggccgccctacctgctgagccccgccgacagctgccccggggggcgccaccgctgctcgccgcgcagctcggtgcactcggagtgcgtgatgatgccggtggtgctgggcgaccacgtgtccagcagcaccttcccgcggatgcactacagctcgcactacgacacgcgcgacgactgcgctgtggcccacgcgggcgccaagatcaaccgcatcccggccaacctgctggaccagttcgagaagcagctgccgctgcaccgggacggcttccacacgctgcagtaccagaggacgtccgcggccgccgagcagcgcagcgagagccccgggcggatccgccacctggtacactccgtgcagaagctcttcaccaagtcgcactcgctggagggctcctccaaaagcaacgccaacggcaccaaggcggacggccgggcggacgaccaccaccacgcccaccacgccaagcacagcaagaggagcaagagcaaggagcgcaagccggagggcaagccccggcccggcatgagcagctggtggagctcggacgacaacctggacagcgacagcacctatcggacgcccagcgtgctcaaccggcaccacctgggccccgtggcccactgctaccccgacgcgctgcagagccccttcggggacctgtccctcaagacctccaagagcaacaacgacgtcaagtgctcggcctgtgaggggttggcgctgacgcccgacgccaagtacctgaagcgcagctcctggtctacgctgacggtcagccaggccaaggaggcctaccgcaagagctcgctgaacctggacaagccgctgctgcaccaggacgccaagcccgccctgaggccgtgccactacctccaggtacctcaggatgagtggggagggtaccccaccggtggcaaagatgaggagattccctgcaggagaatgagaagtgggagttacattaaagccatgggggacgaggagagcggagagtcagactccagccccaagacatcaccaaagtcggcaatcctaccagagccgctgctgaagtccatcggacagagaccgcttggagagcaccagacccagacctacctgcaagctgcaagcgatgtgcctgtgggacacagcctggaccccgctgcgaactacaactccccgaaattccgctcccggaaccagagctacatgagggccgtcagcaccctgagccaggccagctgcgtgagccaggtgagcgaggcggagatcaatgggcaattcgagtccgtgtgcgagtccgtcttcagtgaagttgaatctcaggccatggatgccctcgacctcccgggatgtttccgaacaaggagtcacagctaccttcgagccattcaagccggctactcccaagatgacgaatgtattcccatgatgacaccctctgacatcacctccaccatcaggtcaacagcagctgtctcatatacaaattacaagaaaacgcccccaccggtgccccctcggaccacctccaagcctctgatctcggtgacggcgcagagcagcaccgaatccacccaggacgcctaccaggacagccgcgcacagaggatgtccccgtggccccaggacagccgcggcctctacaactccacggacagcctggacagcaacaaggccatgaacctcgcgctggaaacggccgctgcccagcgccacctgccagagagccagagcagctctgtgcggaccagcgacaaggccatcctggtgtccaaggcggaggagctcctcaagagccgctgctcctccatcgggattcaggtggaaacggccacagattctgacacggagagccgcggtctgcgggaataccactctgtcggggtgcaagtggaagatgagaagcgacacggacgttttaaacgttctaacagcgtcacggccgccgtccaagctgacctggagctggaggggttcccaggccacatcaccacggaggacaaaggccttcagttcggctcatccttccagcggcactccgagcccagcacccccacccagtacagcgcggtgagaactgtacggacccaggggctcttcagctatagagaagactatcggacccaagtggacacctccaccctgccccctccagacccctggctggagcccgccatcgacacggtagagactgggaggatgtctccgtgccgcagggatggctcgtggtttttgaagctgctgcacgcagagacaaagaggatggaaggctggtgcaaagagatggagagagaggcggaggagaacgacctctcggaggaaattctcggtaaaatcaggagtgctgttgggagtgcccagcttctcatgtcccagaaattccagcagttttattggctttgccaacagaatatggaccccagcgccatgccgaggccgacgtcgcaggacctggccggctactgggacatgctgcagctctccattgaggacgtcagcatgaagttcgacgagctgcagcggctgcggctcaacgactggaagatgatggagtccccggaaagaaaggaagaaagaaaggtcccgcctccaataccaaagaagcctcccaaggggaagtttcccatcacaagagaaaaatccctggacctgcccgacagacaacgccaggaagcccggaggcgcctcatggccgccaagcgagcggcgtccttccggcagaattccgcctccgagcgcgcggacagcatcgagatctacatccccgaggcccagacccggctctgagggcggaggccggcgccttcccctcgtcgcttccgctttcccggacgcttgtgcagcgcggcgccgccctggtggtttctgtctcctcctcccgctgaacacgtcctcgctcccgcgctccccgcgccccggacacagcgggacgcggccggcggcctcagagtccacggagctcgcggcgaggacgacttctgcttttgttgttgttgttgttgttcacgggtggcctggctcacacttggctctgagggacaggtgtggcgagacctgatttctcctgcgtgttctcagaggacggcgagaaatgcctctggagctggaacccagcttacattttgttatttctatttttataaattgtgtgataattagaggtaagaataacaagtaactataaacgggtgcatcccaccactccctggaggcattagacacccaagtggaaggtgctacaacctgaagcgcaggaaagaaaggcccattcccctcgcacagccgagcttttactccctgagcacgggccgctccgctcccctgctcctgtctgtctcggacagaaaacacgaggctccttgtgtcaagcttcctgtgatggaaagcgacctctccaaccaccacactccccgccgtacagttctccagaatcccaggcgatgacaagtctgaacccacgaaaatacccagcgcagcatctacacattcaaaagataagctgagtgttcccaccaggaagtcacgcgcagagaggagagtcttacggagggctgggagcttaaaaggaaaacaatgtccttacttgtaaacagttattgtattttttatttctttctaacttaaaatacgacacccagtattttctttaagtttcaccatttacgctacatgtgatttttttaatgtatgtatatatatatattctcaaattgctctatcagctgacttttcagggtatccttaaaaaaaaacacacacgaaaaacaaaagtttgcttgtttaaaatgacagttgtgatgtaaaaagtttaagaaatatgaatgtgagtggtaagtatatctcagtttaaatggtaaagaagaaatgtagtttacatttgtatttttccagaattcttttgtcctatgcagtattgctaaagtcgagaatatattccttgcctgtgttagacatgaagggaaaaagaggtcacatattgtgatttccagctgtagcattcaaaaaaaaaattggtgttcatgactctgtggtcggtgccagaggaaaataggaacgactctaattaataggctttctgtgtatataattaaatttagctgctgcaaccattgttctgacacgacttctgtttcacagttcagaccggtcttcaaaggaaaagcctgtccgatttttccatgggttccagtttcagagttctcattattactcaaagtaaaagcggactgcgatttaagatgtttccaccccaatacctggtcttccttcccggcttaaggagtaccatgtacttagccacaggcagaatagctttcgatgaccccatagcactttgtttcttcgccttgatttgcactttacaatgtccccagcccctctgcagcccgtggctggcagggcgttcgatgtgcggttggcccccagcgcgccctccagagctgcggtgtctccctgcctcattccccacatcccactgagcatgggaccattgggagcagagctgatattaaagcatgtttagcttcgaagttttacttttttaaagctgagtagttaagaattccctgtaaaaacaaaaccctgtaaattgagcctcatgtctggtatatattttaccaaacagccttaaaatatatttggaagcaaaaatcagtacgaatgtatctccttgaaaaatgcaaaaaaaaaaaaatccctgaaatattcttctataaatgaatcctatttccccagagtgttcaaggcatttttctacctaaatgaatacctaaatcttgagtagtgtacggtaatgacgcttcttcctatatccactcttattatgttaaaacaaatgtatttgcgagtattggcattttagactttaaaaatgctgtatgatttcagatgaactctgctgtttagaagtaaccacagaaaagcaaagtcagtgtacactctgagtgaaaggaaatgtaatgtggataaaggcccgccacctcctcacattggtctatctactggcagctgatacgtttaactcatttccttgagcttatacaaaacatagaaaagcaaactgttaaagtagtcaataattatttgtctcagatcccagattctatgatccctgcttaaaagaaaatgttcactgcatgtaggttgatttcttatgttttgtagactcattgttatttttcaatccccaaaagtcttggcctaaaccatccctaggggagcagattaacctaccactacattgcacagggttggtgactcgacgtggtgaatgtgcacacgccctgcctggtccgccatgttccaaagaagatgatttaatggtagaacggatacctgctgctagacctgatggaatgttacctgtccgtgttacataatcaagtgcaatatactcagttctcatgcaggtgacattctaccatgaaacgcagaagataagccatgtttctgtattgtacatgtaaagaaaaataaaactgtttatgatacttgtgttagtcactcgagctagcttatttcagccacttctagcagatcatgccatggagctcacgacgtgtgaccatttcgtcatatttaaaatataacttcaagaaaagagtaaacatccattggagaacacggctgaaaattattgtgctgttctaggaacatcatcctagagagtgtgatgttcactataaccccatacctacattccctaatgatacagccaatgacaggtgaaacccagacactctccttagagccgacaggttgatcctgctgtgttgaaggctgtggttaataaaacacaagtatgataaacaggacctagcgtttagcccgggaaaggagaatgctgcttgtcacctagagtgctttccttgtgatgcgtctctcgcatcttcacgtgttgttgtgtttgaagtaaaactagttgttatcgatgacaatttttaccatagttttctcagcaaatttatatcaccatcttagaatggtatataaaaaaattgaactgtttatgataccaaaaaaattacagttttgtttaaaaggaaatgttgatgttttcaactccaaatcaattctaaaaacttcaagcacttaatggaaaggtaaatggtcagataaaaatataattacctgtaaggttatctggttttaaaagaaaaaaaaaaagcctacaaactcagtgacctactacgcagagggaatttttccctgctgcttcttatgaaagtggccaggtttattattagaagacacagtggcagagcacacatgtgcacaggttctgattatttctcttggagcatatgtccttgtcttgatttttgccttttcgatgccatattaagcagccaccgtttccacccctttcattagaaggccctgcatccgtaaattcgcgcatctctgtttttgttagatccttgtaagcatcgctacccgagtccaggatggaatttcacaggaaagtgaagggatactgcaggcctgtgtttgcagcgcctgtggtaactgtggaatgagctctgttagggacagttgtctggtttgtgccaaaccttcgaggggcgagtagggagtgggggaggtgggtccaagtctccctcaggaaggccttttctatcggcagcaattccatcaagccaagcctcctgtggtcctgagcatgaaggggccaggggacctcctgggagatgcagcttttgtttccgctgcgtttcatcagtcagccttgcttggaattctggcaggttccccggggtgtttcagtggacaggaggcccccgtgccgtggctgagtcagcctgggtaccccagtcaccagcagggccacccttgatgacagggccccccacgaacctgggaaaggcagcgggaaatgtgtgagagggtgtgcgctggtacggacataaaagcattgtccaaaacagcgctggttcggggagggcccctggatactgcctttggcccacactgaaaactgaaattgccccacctgtgagcacagaaacacgcttctccaacacgggccgaaataactaaactccacatggttcctgcctgctcatttcccagccctcttcttctcaagcctgaacttcatttttttttttagctgcaaatttaacaggctaatttaaaactgcagttttcagacgacagcccctgggaatgttccagggttctcttgttttgatctgcatgtctgtttacacttctctgtaggcgtgggttgaatacaagtttccaaaactttaaaatagaaaaccacgagcttaagaggtgaaaaagatgacccctttctgattaggatctgtaactctgtgggctgggtcaatgcagtgtgcttcattcagggccatgtggcagccatgacacacaccacataaggtcagctcagagcccatggcttccctgcaggagccccatcttgtcgctattagttgggagttgcaatacattgttggccataaacaaagtgctaaaggaaagggtttgcttctacacattcggctgaatgtcccccagtgcagggtggcagcagaatgttctggaaatgaaggagatattgctaggaatctctaggctgttaggcaacctggcttttattcatcctcagccggcaactcatctcaagtttatgtctcagtttttttcctctagaaaggggattacagttcctgtccctgtcttcctccaggacacactgtgaggattaatgacatattggctctaaagtcctttgagctcctgggaacaggtggtgaaagtgtgcgttactgctaaggattagtccctggcctcttctagaatgccgccctcccagctctgcagggcacgctgccagaatccaggctggtcgtaaacatctcagagataatcagggaccaccagaggcagaggccatgagactgtctttggaaaggtttggaaatgcagaaataactacaagggccattctccttagcttctggctttcaactgtttctagatgcttccaagaacaagaacccagcaccaaccagaattaggccacgttttcaccattacttaagctcaatcgcctcttagatgaaatgaggagataaactaaacattaaaatgatgaaggaaaaaaaattatttggaagccgaaaaccgcatgggtggggaaacatcaggaacgaaatcagacacactgactcaaaccacgcaagggtttgagaagcccacccctctaattccaggcgtttgtaatttttctacttcgcacttgagagaaggcagaggtggtccgtgggaaagctccgggaaacagccgtctttcatccttgccacattgaaaaatgtccacaattttatgaattgctgtcctaaccctggcgtttttatccagtgttaaaataaattatttcaagtttcaatgtaaacacttaacagatgacttctttgcagaagaaatgttcgttacctactatcaaactactttttaacagattttgtatatacacacacaagttgacagaggtttacctccctactttcttagattttatgtaactcttttcattggtgcttattcagaacctgaaagccttgggcatccaagctttcacctactcaatggaggagaggtgataatgaatgaaaagattgacaccaggtttcttggacaaatttaagttcaaatttatctctttcaagtagaccatggtctccctagagagtgtgttggcttgtgtctgccagtacgacaaaggacgctcccagcttgatcgtggtaccttatggaagccactcacgcattctctgatttacccccaaaacactaccatgccccagccccactcatttaaataatacaatcatatcactttcaaagggctcagcacgaatgttcccctcactccactttttaactcgtttgctgaactcgacaaggcttccccttacgagcagtgagacctaggctactttcgaacgcttccttccgaacggtaagccacttcgctctcgggcaggacaggtcctccctgcagagagagacaactcatcccccgaccttccatactacagaccaaaatacccaggtgtggcctaaggactatattaaatgcctcctatagaaattcaaggaatgttagaaccaggaaactagctgtttaaagttttaaagaagtatataaatatatatataaatataaatatgaaatcatatcgagtgtgaggatgagcagagtgccaaatattcagcatctgtacaaagtcattcactggaattcaactattttatgtcattctctttctcacgcttttatggttcttttgataaattctatttagtagcatgcaggatacctaatctgaatgtgcaatatgctattcatcaccacgacaatttcttacttcctcttaataacttaccagaatgttggtcattcctttaaggcagttaaggattgctttatttgtgttcttttttcccatgactttttttcactctcagctgactgtaagaaactgtgcaccgtttccgccataaccgtcctgtgacgatgcctccatttgacttctgtatcgctgatgttcacctcctgtaaatagtttggcaattaaattttttgagaaaagtaatgtttacttttttattggagtgaattctcgtgttattttaatctcagaaaaattatatagaccaaagagttttatccgaaaaaaaattacactcttcctccattatatatttcattgttgaaatatcctcaatttctctatattttaagaagtaatggacatttattaaggttacagatttaatatgtatgcaaaatggtatagattaaatgagtttttaattaataaatcctacagtatttagtt

SEQ ID NO: 127287 - DNA, 632 bp, Homo sapiens
  Payload ID: 4913
  Gene Symbol: DLGAP2
  Gene Name: discs, large (Drosophila) homolog-associated protein 2
  ENST ID: ENST00000633079
  CDS Start-End: 1-530
aaacggccacagattctgacacggagagccgcggtctgcgggaataccactctgtcggggtgcaagtggaagatgagaagcgacacggacgttttaaacgttctaacagcgtcacggccgccgtccaagctgacctggagctggaggggttcccaggccacatcaccacggaggacaaaggccttcagttcggctcatccttccagcggcactccgagcccagcacccccacccagtacagcgcggtgagaactgtacggacccaggggctcttcagctatagagaagactatcggacccaagtggacacctccaccctgccccctccagacccctggctggagcccgccatcgacacggtagagactgggaggatgtctccgtgccgcagggatggctcgtggtttttgaagctgctgcacgcagagacaaagaggatggaaggctggtgcaaagagatggagagagaggcggaggagaacgacctctcggaggaaagtaagagctcaggcttccctagggcctcttaaatatcatttctcagtaatgcaaatatgcacatcacagcattagtggagaaaagttcctccctttggtattcaagtgaagggaaataaatgtgctttctagta

SEQ ID NO: 127288 - DNA, 1336 bp, Homo sapiens
  Payload ID: 4913
  Gene Symbol: DLGAP2
  Gene Name: discs, large (Drosophila) homolog-associated protein 2
  ENST ID: ENST00000633655
  CDS Start-End: 135-1336
aggaagaagctggagacttggtccagccgggcatcagctttccggggccggcagaggaggatctagacccgcagtactcatggtcgcccacgcagcacttcaatgaggagcgctactcgcccgcgcccaggagcatgaagggcctttccggaagtcggacccagccgccgctgtgttccgggcacacgtgtggtctggcgcccccggaggactgcgagcacctgcaccacgggcccgacgcgcggccgccctacctgctgagccccgccgacagctgccccggggggcgccaccgctgctcgccgcgcagctcggtgcactcggagtgcgtgatgatgccggtggtgctgggcgaccacgtgtccagcagcaccttcccgcggatgcactacagctcgcactacgacacgcgcgacgactgcgctgtggcccacgcgggcgccaagatcaaccgcatcccggccaacctgctggaccagttcgagaagcagctgccgctgcaccgggacggcttccacacgctgcagtaccagaggacgtccgcggccgccgagcagcgcagcgagagccccgggcggatccgccacctggtacactccgtgcagaagctcttcaccaagtcgcactcgctggagggctcctccaaaagcaacgccaacggcaccaaggcggacggccgggcggacgaccaccaccacgcccaccacgccaagcacagcaagaggagcaagagcaaggagcgcaagccggagggcaagccccggcccggcatgagcagctggtggagctcggacgacaacctggacagcgacagcacctatcggacgcccagcgtgctcaaccggcaccacctgggccccgtggcccactgctaccccgacgcgctgcagagccccttcggggacctgtccctcaagacctccaagagcaacaacgacgtcaagtgctcggcctgtgaggggttggcgctgacgcccgacgccaagtacctgaagcgcagctcctggtctacgctgacggtcagccaggccaaggaggcctaccgcaagagctcgctgaacctggacaagccgctgctgcaccaggacgccaagcccgccctgaggccgtgccactacctccaggtacctcaggatgagtggggagggtaccccaccggtggcaaagatgaggagattccctgcaggagaatgagaagtgggagttacattaaagccatgggggacgaggagagcggagagtcagactccagccccaagacatcaccaaagtcggcaatcctaccagagccgctgctgaagtccatcggacagagaccgcttggagagcaccagac

SEQ ID NO: 127289 - DNA, 615 bp, Homo sapiens
  Payload ID: 4913
  Gene Symbol: DLGAP2
  Gene Name: discs, large (Drosophila) homolog-associated protein 2
  ENST ID: ENST00000632589
  CDS Start-End: 1-477
agcgcggtgagaactgtacggacccaggggctcttcagctatagagaagactatcggacccaagtggacacctccaccctgccccctccagacccctggctggagcccgccatcgacacggtagagactgggaggatgtctccgtgccgcagggatggctcgtggtttttgaagctgctgcacgcagagacaaagaggatggaaggctggtgcaaagagatggagagagaggcggaggagaacgacctctcggaggaaaaattgttaccagctcatgctttacaagaaaatgccttggcattatgccaaagagaagtcgatggaggtgacgatggacgccgaatgttggggagatgctgccttccacgtgacccacagtccccgcagcacggctgcatggggctggtgcaagtcagcacagccgtgttccgatcgttcacacggcgtttgcatttctcatggttagggtacatttaacagagtaacttcacaattttgatatctaaaaatcactcattttctgcagcatcttccacccttgttagtatatgcctcaacttggccaaattgtcttaattataaaagggatttataatctttagcacaaagataaaa

SEQ ID NO: 127290 - DNA, 3515 bp, Homo sapiens
  Payload ID: 4913
  Gene Symbol: DLGAP2
  Gene Name: discs, large (Drosophila) homolog-associated protein 2
  ENST ID: ENST00000633183
  CDS Start-End: 51-2936
cgcccacgcagcacttcaatgaggagcgctactcgcccgcgcccaggagcatgaagggcctttccggaagtcggacccagccgccgctgtgttccgggcacacgtgtggtctggcgcccccggaggactgcgagcacctgcaccacgggcccgacgcgcggccgccctacctgctgagccccgccgacagctgccccggggggcgccaccgctgctcgccgcgcagctcggtgcactcggagtgcgtgatgatgccggtggtgctgggcgaccacgtgtccagcagcaccttcccgcggatgcactacagctcgcactacgacacgcgcgacgactgcgctgtggcccacgcgggcgccaagatcaaccgcatcccggccaacctgctggaccagttcgagaagcagctgccgctgcaccgggacggcttccacacgctgcagtaccagaggacgtccgcggccgccgagcagcgcagcgagagccccgggcggatccgccacctggtacactccgtgcagaagctcttcaccaagtcgcactcgctggagggctcctccaaaagcaacgccaacggcaccaaggcggacggccgggcggacgaccaccaccacgcccaccacgccaagcacagcaagaggagcaagagcaaggagcgcaagccggagggcaagccccggcccggcatgagcagctggtggagctcggacgacaacctggacagcgacagcacctatcggacgcccagcgtgctcaaccggcaccacctgggccccgtggcccactgctaccccgacgcgctgcagagccccttcggggacctgtccctcaagacctccaagagcaacaacgacgtcaagtgctcggcctgtgaggggttggcgctgacgcccgacgccaagtacctgaagcgcagctcctggtctacgctgacggtcagccaggccaaggaggcctaccgcaagagctcgctgaacctggacaagccgctgctgcaccaggacgccaagcccgccctgaggccgtgccactacctccaggtacctcaggatgagtggggagggtaccccaccggtggcaaagatgaggagattccctgcaggagaatgagaagtgggagttacattaaagccatgggggacgaggagagcggagagtcagactccagccccaagacatcaccaaagtcggcaatcctacaagagccgctgctgaagtccatcggacagagaccgcttggagagcaccagacccagacctacctgcaagctgcaagcgatgtgcctgtgggacacagcctggaccccgctgcgaactacaactccccgaaattccgctcccggaaccagagctacatgagggccgtcagcaccctgagccaggccagctgcgtgagccaggtgagcgaggcggagatcaatgggcaattcgagtccgtgtgcgagtccgtcttcagtgaagttgaatctcaggccatggatgccctcgacctcccgggatgtttccgaacaaggagtcacagctaccttcgagccattcaagccggctactcccaagatgacgaatgtattcccatgatgacaccctctgacatcacctccaccatcaggtcaacagcagctgtctcatatacaaattacaagaaaacgcccccaccggtgccccctcggaccacctccaagcctctgatctcggtgacggcgcagagcagcaccgaatccacccaggacgcctaccaggacagccgcgcacagaggatgtccccgtggccccaggacagccgcggcctctacaactccacggacagcctggacagcaacaaggccatgaacctcgcgctggagacggccgctgcccagcgccacctgccagagagccagagcagctctgtgcggaccagcgacaaggccatcctggtgtccaaggcggaggagctcctcaagagccgctgctcctccatcgggattcaggtggaaacggccacagattctgacacggagagccgcggtctgcgggaataccactctgtcggggtgcaagtggaagatgagaagcgacacggacgttttaaacgttctaacagcgtcacggccgccgtccaagctgacctggagctggaggggttcccaggccacatcaccacggaggacaaaggccttcagttcggctcatccttccagcggcactccgagcccagcacccccacccagtacagcgcggtgagaactgtacggacccaggggctcttcagctatagagaagactatcggacccaagtggacacctccaccctgccccctccagacccctggctggagcccgccatcgacacggtagagactgggaggatgtctccgtgccgcagggatggctcgtggtttttgaagctgctgcacgcagagacaaagaggatggaaggctggtgcaaagagatggagagagaggcggaggagaacgacctctcggaggaaattctcggtaaaatcaggagtgctgttgggagtgcccagcttctcatgtcccagaaattccagcagttttattggctttgccaacagaatatggaccccagcgccatgccgaggccgacgtcgcaggacctggccggctactgggacatgctgcagctctccattgaggacgtcagcatgaagttcgacgagctgcagcggctgcggctcaacgactggaagatgatggagtccccggaaagaaaggaagaaagaaaggtcccgcctccaataccaaagaagcctcccaaggggaagtttcccatcacaagagaaaaatccctggacctgcccgacagacaacgccaggaagcccggaggcgcctcatggccgccaagcgagcggcgtccttccggcagaattccgcctccgagcgcgcggacagcatcgagatctacatccccgaggcccagacccggctctgagggcggaggccggcgccttcccctcgtcgcttccgctttcccggacgcttgtgcagcgcggcgccgccctggtggtttctgtctcctcctcccgctgaacacgtcctcgctcccgcgctccccgcgccccggacacagcgggacgcggccggcggcctcagagtccacggagctcgcggcgaggacgacttctgcttttgttgttgttgttgttgttcacgggtggcctggctcacacttggctctgagggacaggtgtggcgagacctgatttctcctgcgtgttctcagaggacggcgagaaatgcctctggagctggaacccagcttacattttgttatttctatttttataaattgtgtgataattagaggtaagaataacaagtaactataaacgggtgcatcccaccactccctggaggcattagacacccaagtggaaggtgctacaacctgaagcgcaggaaagaaaggcccattcccctcgcacagccgagcttttactccctgagcacgggccgctccgctcccctgctcctgtctgtctcggacagaaaacacgaggctccttgtgtc

SEQ ID NO: 127291 - DNA, 2263 bp, Homo sapiens
  Payload ID: 4913
  Gene Symbol: DLGAP2
  Gene Name: discs, large (Drosophila) homolog-associated protein 2
  ENST ID: ENST00000633645
  CDS Start-End: 1-1684
ccagacctacctgcaagctgcaagcgatgtgcctgtgggacacagcctggaccccgctgcgaactacaactccccgaaattccgctcccggaaccagagctacatgagggccgtcagcaccctgagccaggccagctgcgtgagccaggtgagcgaggcggagatcaatgggcaattcgagtccgtgtgcgagtccgtcttcagtgaagttgaatctcaggccatggatgccctcgacctcccgggatgtttccgaacaaggagtcacagctaccttcgagccattcaagccggctactcccaagatgacgaatgtattcccatgatgacaccctctgacatcacctccaccatcaggtcaacagcagctgtctcatatacaaattacaagaaaacgcccccaccggtgccccctcggaccacctccaagcctctgatctcggtgacggcgcagagcagcaccgaatccacccaggacgcctaccaggacagccgcgcacagaggatgtccccatggccccaggacagccgcggcctctacaactccacggacagcctggacagcaacaaggccatgaacctcgcgctggaaacggccgctgcccagcgccacctgccagagagccagagcagctctgtgcggaccagcgacaaggccatcctggtgtccaaggcggaggagctcctcaagagccgctgctcctccatcgggattcaggtggaaacggccacagattctgacacggagagccgcggtctgcgggaataccactctgtcggggtgcaagtggaagatgagaagcgacacggacgttttaaacgttctaacagcgtcacggccgccgtccaagctgacctggagctggaggggttcccaggccacatcaccacggaggacaaaggccttcagttcggctcatccttccagcggcactccgagcccagcacccccacccagtacagcgcggtgagaactgtacggacccaggggctcttcagctatagagaagactatcggacccaagtggacacctccaccctgccccctccagacccctggctggagcccgccatcgacacggtagagactgggaggatgtctccgtgccgcagggatggctcgtggtttttgaagctgctgcacgcagagacaaagaggatggaaggctggtgcaaagagatggagagagaggcggaggagaacgacctctcggaggaaattctcggtaaaatcaggagtgctgttgggagtgcccagcttctcatgtcccagaaattccagcagttttattggctttgccaacagaatatggaccccagcgccatgccgaggccgacgtcgcaggacctggccggctactgggacatgctgcagctctccattgaggacgtcagcatgaagttcgacgagctgcagcggctgcggctcaacgactggaagatgatggagtccccggaaagaaaggaagaaagaaaggtcccgcctccaataccaaagaagcctcccaaggggaagtttcccatcacaagagaaaaatccctggacctgcccgacagacaacgccaggaagcccggaggcgcctcatggccgccaagcgagcggcgtccttccggcagaattccgcctccgagcgcgcggacagcatcgagatctacatccccgaggcccagacccggctctgagggcggaggccggcgccttcccctcgtcgcttccgctttcccggacgcttgtgcagcgcggcgccgccctggtggtttctgtctcctcctcccgctgaacacgtcctcgctcccgcgctccccgcgccccggacacagcgggacgcggccggcggcctcagagtccacggagctcgcggcgaggacgacttctgcttttgttgttgttgttgttgttcacgggtggcctggctcacacttggctctgagggacaggtgtggcgagacctgatttctcctgcgtgttctcagaggacggcgagaaatgcctctggagctggaacccagcttacattttgttatttctatttttataaattgtgtgataattagaggtaagaataacaagtaactataaacgggtgcatcccaccactccctggaggcattagacacccaagtggaaggtgctacaacctgaagcgcaggaaagaaaggcccattcccctcgcacagccgagcttttactccctgagcacgggccgctccgctcccctgctcctgtctgtctcggacagaaaacacgaggctccttgtgtc

SEQ ID NO: 127292 - DNA, 615 bp, Homo sapiens; identical to SEQ ID NO: 127289
  Payload ID: 4913
  Gene Symbol: DLGAP2
  Gene Name: discs, large (Drosophila) homolog-associated protein 2
  ENST ID: ENST00000518530
  CDS Start-End: 1-477

SEQ ID NO: 127293 - DNA, 632 bp, Homo sapiens; identical to SEQ ID NO: 127287
  Payload ID: 4913
  Gene Symbol: DLGAP2
  Gene Name: discs, large (Drosophila) homolog-associated protein 2
  ENST ID: ENST00000522499
  CDS Start-End: 1-530

SEQ ID NO: 127294 - DNA, 8796 bp, Homo sapiens
  Payload ID: 4913
  Gene Symbol: DLGAP2
  Gene Name: discs, large (Drosophila) homolog-associated protein 2
  ENST ID: ENST00000633447
  CDS Start-End: 1-1726
ccagacctacctgcaagctgcaagcgatgtgcctgtgggacacagcctggaccccgctgcgaactacaactccccgaaattccgctcccggaaccagagctacatgagggccgtcagcaccctgagccaggccagctgcgtgagccaggtgagcgaggcggagatcaatgggcaattcgagtccgtgtgcgagtccgtcttcagtgaagttgaatctcaggccatggatgccctcgacctcccgggatgtttccgaacaaggagtcacagctaccttcgagccattcaagccggctactcccaagatgacgaatgtattcccatgatgacaccctctgacatcacctccaccatcaggtcaacagcagctgtctcatatacaaattacaagaaaacgcccccaccggtgccccctcggaccacctccaagcctctgatctcggtgacggcgcagagcagcaccgaatccacccaggacgcctaccaggacagccgcgcacagaggatgtccccatggccccaggacagccgcggcctctacaactccacggacagcctggacagcaacaaggccatgaacctcgcgctggaaacggccgctgcccagcgccacctgccagagagccagagcagctctgtgcggaccagcgacaaggccatcctggtgtccaaggcggaggagctcctcaagagccgctgctcctccatcgggattcaggattctgaattcccagagcatcagccatacccaaggtcagatgtggaaacggccacagattctgacacggagagccgcggtctgcgggaataccactctgtcggggtgcaagtggaagatgagaagcgacacggacgttttaaacgttctaacagcgtcacggccgccgtccaagctgacctggagctggaggggttcccaggccacatcaccacggaggacaaaggccttcagttcggctcatccttccagcggcactccgagcccagcacccccacccagtacagcgcggtgagaactgtacggacccaggggctcttcagctatagagaagactatcggacccaagtggacacctccaccctgccccctccagacccctggctggagcccgccatcgacacggtagagactgggaggatgtctccgtgccgcagggatggctcgtggtttttgaagctgctgcacgcagagacaaagaggatggaaggctggtgcaaagagatggagagagaggcggaggagaacgacctctcggaggaaattctcggtaaaatcaggagtgctgttgggagtgcccagcttctcatgtcccagaaattccagcagttttattggctttgccaacagaatatggaccccagcgccatgccgaggccgacgtcgcaggacctggccggctactgggacatgctgcagctctccattgaggacgtcagcatgaagttcgacgagctgcagcggctgcggctcaacgactggaagatgatggagtccccggaaagaaaggaagaaagaaaggtcccgcctccaataccaaagaagcctcccaaggggaagtttcccatcacaagagaaaaatccctggacctgcccgacagacaacgccaggaagcccggaggcgcctcatggccgccaagcgagcggcgtccttccggcagaattccgcctccgagcgcgcggacagcatcgagatctacatccccgaggcccagacccggctctgagggcggaggccggcgccttcccctcgtcgcttccgctttcccggacgcttgtgcagcgcggcgccgccctggtggtttctgtctcctcctcccgctgaacacgtcctcgctcccgcgctccccgcgccccggacacagcgggacgcggccggcggcctcagagtccacggagctcgcggcgaggacgacttctgcttttgttgttgttgttgttgttcacgggtggcctggctcacacttggctctgagggacaggtgtggcgagacctgatttctcctgcgtgttctcagaggacggcgagaaatgcctctggagctggaacccagcttacattttgttatttctatttttataaattgtgtgataattagaggtaagaataacaagtaactataaacgggtgcatcccaccactccctggaggcattagacacccaagtggaaggtgctacaacctgaagcgcaggaaagaaaggcccattcccctcgcacagccgagcttttactccctgagcacgggccgctccgctcccctgctcctgtctgtctcggacagaaaacacgaggctccttgtgtcaagcttcctgtgatggaaagcgacctctccaaccaccacactccccgccgtacagttctccagaatcccaggcgatgacaagtctgaacccacgaaaatacccagcgcagcatctacacattcaaaagataagctgagtgttcccaccaggaagtcacgcgcagagaggagagtcttacggagggctgggagcttaaaaggaaaacaatgtccttacttgtaaacagttattgtattttttatttctttctaacttaaaatacgacacccagtattttctttaagtttcaccatttacgctacatgtgatttttttaatgtatgtatatatatatattctcaaattgctctatcagctgacttttcagggtatccttaaaaaaaaacacacacgaaaaacaaaagtttgcttgtttaaaatgacagttgtgatgtaaaaagtttaagaaatatgaatgtgagtggtaagtatatctcagtttaaatggtaaagaagaaatgtagtttacatttgtatttttccagaattcttttgtcctatgcagtattgctaaagtcgagaatatattccttgcctgtgttagacatgaagggaaaaagaggtcacatattgtgatttccagctgtagcattcaaaaaaaaaattggtgttcatgactctgtggtcggtgccagaggaaaataggaacgactctaattaataggctttctgtgtatataattaaatttagctgctgcaaccattgttctgacacgacttctgtttcacagttcagaccggtcttcaaaggaaaagcctgtccgatttttccatgggttccagtttcagagttctcattattactcaaagtaaaagcggactgcgatttaagatgtttccaccccaatacctggtcttccttcccggcttaaggagtaccatgtacttagccacaggcagaatagctttcgatgaccccatagcactttgtttcttcaccttgatttgcactttacaatgtccccagcccctctgcagcccgtggctggcagggcgttcgatgtgcggttggcccccagcgcgccctccagagctgcggtgtctccctgcctcattccccacatcccactgagcatgggaccactgggagcagagctgatattaaagcatgtttagcttcgaagttttacttttttaaagctgagtagttaagaattccctgtaaaaacaaaaccctgtaaattgagcctcatgtctggtatatattttaccaaacagccttaaaatatatttggaagcaaaaatcagtacgaatgtatctccttgaaaaatgcaaaaaaaaaaaaatccctgaaatattcttctataaatgaatcctatttccccagagtgttcaaggcatttttctacctaaatgaatacctaaatcttgagtagtgtacggtaatgacgcttcttcctatatccactcttattatgttaaaacaaatgtatttgcgagtattggcattttagactttaaaaatgctgtatgatttcagatgaactctgctgtttagaagtaaccacagaaaagcaaagtcagtgtacactctgagtgaaaggaaatgtaatgtggataaaggcccgccacctcctcacattggtctatctactggcagctgatacgtttaactcatttccttgagcttatacaaaacatagaaaagcaaactgttaaagtagtcaataattatttgtctcagatcccagattctatgatccctgcttaaaagaaaatgttcactgcatgtaggttgatttcttatgttttgtagactcattgttatttttcaatccccaaaagtcttggcctaaaccatccctaggggagcagattaacctaccactacattgcacagggttggtgactcgacgtggtgaatgtgcacacgccctgcctggtccgccatgttccaaagaagatgatttaatggtagaacggatacctgctgctagacctgatggaatgttacctgtccgtgttacataatcaagtgcaatatactcagttctcatgcaggtgacattctaccatgaaacgcagaagataagccatgtttctgtattgtacatgtaaagaaaaataaaactgtttatgatacttgtgttagtcactcgagctagcttatttcagccacttctagcagatcatgccatggagctcacgacgtgtgaccatttcgtcatatttaaaatataacttcaagaaaagagtaaacatccattggagaacacggctgaaaattattgtgctgttctaggaacatcatcctagagagtgtgatgttcactataaccccatacctacattccctaatgatacagccaatgacaggtgaaacccagacactctccttagagccgacaggttgatcctgctgtgttgaaggctgtggttaataaaacacaagtatgataaacaggacctagcgtttagcccgggaaaggagaatgctgcttgtcacctagagtgctttccttgtgatgcgtctctcgcatcttcacgtgttgttgtgtttgaagtaaaactagttgttatcgatgacaatttttaccatagttttctcagcaaatttatatcaccatcttagaatggtatataaaaaaattgaactgtttatgataccaaaaaaattacagttttgtttaaaaggaaatgttgatgttttcaactccaaatcaattctaaaaacttcaagcacttaatggaaaggtaaatggtcagataaaaatataattacctgtaaggttatctggttttaaaagaaaaaaaaaaagcctacaaactcagtgacctactacgcagagggaatttttccctgctgcttcttatgaaagtggccaggtttattattagaagacacagtggcagagcacacatgtgcacaggttctgattatttctcttggagcatatgtccttgtcttgatttttgccttttcgatgccatattaagcagccaccgtttccacccctttcattagaaggccctgcatccgtaaattcgcgcatctctgtttttgttagatccttgtaagcatcgctacccgagtccaggatggaatttcacaggaaagtgaagggatactgcaggcctgtgtttgcagcgcctgtggtaactgtggaatgagctctgttagggacagttgtctggtttgtgccaaaccttcgaggggcgagtagggagtgggggaggtgggtccaagtctccctcaggaaggccttttctatcggcagcaattccatcaagccaagcctcctgtggtcctgagcatgaaggggccaggggacctcctgggagatgcagcttttgtttccgctgcgtttcatcagtcagccttgcttggaattctggcaggttccccggggtgtttcagtggacaggaggcccccgtgccgtggctgagtcagcctgggtaccccagtcaccagcagggccacccttgatgacagggccccccacgaacctgggaaaggcagcgggaaatgtgtgagagggtgtgcgctggtacggacataaaagcattgtccaaaacagcgctggttcggggagggcccctggatactgcctttggcccacactgaaaactgaaattgccccacctgtgagcacagaaacacgcttctccaacacgggccgaaataactaaactccacatggttcctgcctgctcatttcccagccctcttcttctcaagcctgaacttcatttttttttttagctgcaaatttaacaggctaatttaaaactgcagttttcagacgacagcccctgggaatgttccagggttctcttgttttgatctgcatgtctgtttacacttctctgtaggcgtgggttgaatacaagtttccaaaactttaaaatagaaaaccacgagcttaagaggtgaaaaagatgacccctttctgattaggatctgtaactctgtgggctgggtcaatgcagtgtgcttcattcagggccatgtggcagccatgacacacaccacataaggtcagctcagagcccatggcttccctgcaggagccccatcttgtcgctattagttgggagttgcaatacattgttggccataaacaaagtgctaaaggaaagggtttgcttctacacattcggctgaatgtcccccagtgcagggtggcagcagaatgttctggaaatgaaggagatattgctaggaatctctaggctgttaggcaacctggcttttattcatcctcagccggcaactcatctcaagtttatgtctcagtttttttcctctagaaaggggattacagttcctgtccctgtcttcctccaggacacactgtgaggattaatgacatattggctctaaagtcctttgagctcctgggaacaggtggtgaaagtgtgcgttactgctaaggattagtccctggcctcttctagaatgccgccctcccagctctgcagggcacgctgccagaatccaggctggtcgtaaacatctcagagataatcagggaccaccagaggcagaggccatgagactgtctttggaaaggtttggaaatgcagaaataactacaagggccattctccttagcttctggctttcaactgtttctagatgcttccaagaacaagaacccagcaccaaccagaattaggccacgttttcaccattacttaagctcaatcgcctcttagatgaaatgaggagataaactaaacattaaaatgatgaaggaaaaaaaattatttggaagccgaaaaccgcatgggtggggaaacatcaggaacgaaatcagacacactgactcaaaccacgcaagggtttgagaagcccacccctctaattccaggcgtttgtaatttctctacttcgcacttgagagaaggcagaggtggtccgtgggaaagctccgggaaacagccgtctttcatccttgccacattgaaaaatgtccacaattttatgaattgctgtcctaaccctggcgtttttatccagtgttaaaataaattatttcaagtttcaatgtaaacacttaacagatgacttctttgcagaagaaatgttcgttacctactatcaaactactttttaacagattttgtatatacacacacaagttgacagaggtttacctccctactttcttagattttatgtaactcttttcattggtgcttattcagaacctgaaagccttgggcatccaagctttcacctactcaatggaggagaggtgataatgaatgaaaagattgacaccaggtttcttggacaaatttaagttcaaatttatctctttcaagtagaccatggtctccctagagagtgtgttggcttgtgtctgccagtacgacaaaggacgctcccagcttgatcgtggtaccttatggaagccactcacgcattctctgatttacccccaaaacactaccatgccccagccccactcatttaaataatacaatcatatcactttcaaagggctcagcacgaatgttcccctcactccactttttaactcgtttgctgaactcgacaaggcttccccttacgagcagtgagacctaggctactttcgaacgcttccttccgaacggtaagccacttcgctctcgggcaggacaggtcctccctgcagagagagacaactcatcccccgaccttccatactacagaccaaaatacccaggtgtggcctaaggactatattaaatgcctcctatagaaattcaaggaatgttagaaccaggaaactagctgtttaaagttttaaagaagtatataaatatatatataaatataaatatgaaatcatatcgagtgtgaggatgagcagagtgccaaatattcagcatctgtacaaagtcattcactggaattcaactattttatgtcattctctttctcacgcttttatggttcttttgataaattctatttagtagcatgcaggatacctaatctgaatgtgcaatatgctattcatcaccacgacaatttcttacttcctcttaataacttaccagaatgttggtcattcctttaaggcagttaaggattgctttatttgtgttcttttttcccatgactttttttcactctcagctgactgtaagaaactgtgcaccgtttccgccataaccgtcctgtgacgatgcctccatttgacttctgtatcgctgatgttcacctcctgtaaatagtttggcaattaaattttttgagaaaagtaatgtttacttttttattggagtgaattctcgtgttattttaatctcagaaaaattatatagaccaaagagttttatccgaaaaaaaattacactcttcctccattatatatttcattgttgaaatatcctcaatttctctatattttaagaagtaatggacatttattaaggttacagatttaatatgtatgcaaaatggtatagattaaatgagtttttaattaataaatcctacagtatttagttaa

SEQ ID NO: 127295 - DNA, 1252 bp, Homo sapiens
  Payload ID: 4913
  Gene Symbol: DLGAP2
  Gene Name: discs, large (Drosophila) homolog-associated protein 2
  ENST ID: ENST00000633162
  CDS Start-End: 51-1252
cgcccacgcagcacttcaatgaggagcgctactcgcccgcgcccaggagcatgaagggcctttccggaagtcggacccagccgccgctgtgttccgggcacacgtgtggtctggcgcccccggaggactgcgagcacctgcaccacgggcccgacgcgcggccgccctacctgctgagccccgccgacagctgccccggggggcgccaccgctgctcgccgcgcagctcggtgcactcggagtgcgtgatgatgccggtggtgctgggcgaccacgtgtccagcagcaccttcccgcggatgcactacagctcgcactacgacacgcgcgacgactgcgctgtggcccacgcgggcgccaagatcaaccgcatcccggccaacctgctggaccagttcgagaagcagctgccgctgcaccgggacggcttccacacgctgcagtaccagaggacgtccgcggccgccgagcagcgcagcgagagccccgggcggatccgccacctggtacactccgtgcagaagctcttcaccaagtcgcactcgctggagggctcctccaaaagcaacgccaacggcaccaaggcggacggccgggcggacgaccaccaccacgcccaccacgccaagcacagcaagaggagcaagagcaaggagcgcaagccggagggcaagccccggcccggcatgagcagctggtggagctcggacgacaacctggacagcgacagcacctatcggacgcccagcgtgctcaaccggcaccacctgggccccgtggcccactgctaccccgacgcgctgcagagccccttcggggacctgtccctcaagacctccaagagcaacaacgacgtcaagtgctcggcctgtgaggggttggcgctgacgcccgacgccaagtacctgaagcgcagctcctggtctacgctgacggtcagccaggccaaggaggcctaccgcaagagctcgctgaacctggacaagccgctgctgcaccaggacgccaagcccgccctgaggccgtgccactacctccaggtacctcaggatgagtggggagggtaccccaccggtggcaaagatgaggagattccctgcaggagaatgagaagtgggagttacattaaagccatgggggacgaggagagcggagagtcagactccagccccaagacatcaccaaagtcggcaatcctaccagagccgctgctgaagtccatcggacagagaccgcttggagagcaccagac

SEQ ID NO: 127296 - DNA, 3587 bp, Homo sapiens
  Payload ID: 4914
  Gene Symbol: DLGAP3
  Gene Name: discs, large (Drosophila) homolog-associated protein 3
  Uniprot ID: O95886
  ENST ID: ENST00000235180
  CDS Start-End: 1-2940
atgaggggttaccatggcgaccgaggcagccatccccgcccagcccgctttgctgaccaacagcatatggacgtgggccctgctgccagggccccatacctgctgggctccagggaggccttctccaccgagccccgcttctgtgccccgagagctggcctgggacacatttctcctgaagggcccctgagcctgagtgaggggccgtcggtaggccctgagggagggccagcgggggccggggttggggggggtagcagcaccttccccaggatgtaccctggccagggccccttcgacacctgtgaagactgtgtgggccacccacagggcaagggtgccccccgcctgcctcctacactcctggatcagtttgaaaagcagttgccagttcaacaagatggcttccacacactaccataccagcgagggccagcaggggcagggcccgggccagcgccagggacgggcactgccccagagccccgcagtgagagccctagccgcatccggcacctggttcattctgtgcagaagctctttgccaagtcccactctctggaggcgccggggaagcgggactataatgggcccaaggctgagggaagaggtggctctggaggagacagctaccccggcccgggctctggaggcccccacacctcccatcaccaccatcaccaccaccatcaccaccaccaccagtcccggcacggcaagaggagcaagagcaaggaccgcaagggggatgggcggcaccaggccaagtccacaggctggtggagttccgatgacaacttggacagtgatagcggcttcctggcgggtgggaggccccctggggagcctggtggtcccttctgcctggagggtccagatgggtcctaccgggacttgagcttcaaggggcgctcgggcgggtcggaaggccgctgccttgcctgcactggcatgtccatgtcactggatggacagtcggtcaagcgaagtgcctggcataccatgatggtcagccagggccgggatggatacccgggggccgggccaggcaaggggctcctgggtccggagaccaaggccaaagccaggacttatcactatctgcaggtgccgcaagatgactgggggggttaccccaccggtggcaaggatggggagatcccctgccgcaggatgcggagcggcagctacatcaaagccatgggggatgaggagagcggagactcagacggcagccccaagacatctcccaaagcagtcgcccgacgcttcaccacccgtcgctcctccagcgtggaccaggccaggatcaactgctgtgtcccaccccggatccacccccggagctccatccctggctacagccgttccctcaccactggacagctcagcgatgagttgaaccagcagctggaggccgtgtgcgggtcggtgtttggggagctggagtcccaggccgtggacgccctggacctgcccggctgtttccgcatgcggagccacagctacctccgggccatccaggccggctgctctcaagacgacgactgcctgcccctcctcgctacccctgccgctgtctcagggaggcccggctcctccttcaacttcagaaaggccccgccccccatcccgccgggaagccaggccccgccccgcatctccatcaccgcccagagcagcaccgactccgcgcacgagagcttcacggcggccgagggccccgcccggcgctgcagctccgccgacgggctggacggccccgccatgggtgcgcgcacactggagttggcgccggtgccgccccgggccagccccaagccccccacactcatcatcaagaccatccctggcagggaggagctgcggagcctggcgcggcagcggaagtggcggccgtccattggggtgcaggtggagacgatctcagattcggacaccgagaacaggagccggagggagttccactctattggcgtgcaggtggaagaggacaagaggcgagcaaggttcaagcgctccaatagtgtgacggctggcgtgcaggcagacctggagctggagggcctggcaggcctggccacggtggccacagaagacaaggccctgcagtttggacgctccttccagaggcacgcctctgagccccagcctgggccccgggcccccacctactcagtcttccgcacggtccacacgcagggccagtgggcctaccgcgagggctacccactgccgtacgagccgccggccaccgatgggtcgcccggccctgcccccgcccccacccccggccctggggccggccgccgtgactcctggatagagcgcggttcacgtagcctccccgactcaggccgcgcatccccctgcccacgcgacggcgagtggttcatcaagatgctgcgggcagaggtggagaagctggagcactggtgccagcagatggagcgtgaggcggaggactatgagctacccgaggagatcctggagaagatccgcagtgctgtgggcagcacacaacttctcctgtcccagaaggttcagcagttcttccggctgtgtcagcaaagcatggatcccactgcgttccctgtgcccaccttccaggacctggcgggtttctgggacctcctacagctctccatcgaggatgtgaccctcaagttcctggagctacagcaactcaaggccaacagctggaaactcctggagcctaaggaggagaagaaggtccctccgccgataccaaagaagcccctgcggggccggggcgtgccggtgaaggagcgctccctggactccgtggaccggcagcggcaggaagcgcgcaagcggctcctggcggccaagcgcgccgcttccttccgccacagctcggccaccgagagcgccgacagcatcgagatctacatccccgaggcccagaccaggctgtgaccggtccggcccgcccagcccggcccgggcccgcggttctccacccgtactgtacacccagcgtcgaggtcactgtgaacgcgggccgccccgtgcgcccgccccaccggcaccggacgccccggcccccgggcccgtcacactctcgtgggttttttaccttcctgatcccacgcgaaggcgcccgggctgggcagggggccgtgcctctccgccctgcgcccctcacctggatcccctgcccacctggtccgacgctttgtccccacctcctccccatgggcaccatctctgccattctttcccccacgggccaggccgggccgggtccctcatctgggctctgcgtccccccctcccccaccccgcggggctgggcttcgtggggatcaagcttcgtggctttttatgaagaatcccgaaccctgcctaggagcccgccccaccctcccaggggctccatcctcagccctctgcccactgggcccagggaccacagtggctggaccaacccaggaccagggcgcctgggcctctcccctttcccagcggctggggaggggagatgggggcttcccctcaccacacctgtggctgttcccacatccccttgaatatcccaggaaaaataaaacggcagaactgca

SEQ ID NO: 127297 - DNA, 3856 bp, Homo sapiens
  Payload ID: 4914
  Gene Symbol: DLGAP3
  Gene Name: discs, large (Drosophila) homolog-associated protein 3
  Uniprot ID: O95886
  ENST ID: ENST00000373347
  CDS Start-End: 270-3209
cgcagccggcgcggcccctcagctgggggctccgcagtgccgggccccggtccctgcccgcctgcccaacgccgcagcgcccccggcccgggccgccggcaccatgtaacccggccggagcccgagccgggccaggattcagtggtcctgagccttctgaagttaggcttctgcctggtggtggggatcctgacatcaaggatgggacaccctggatggaggttcctggggcctggcccccaagactatgaagagcctttgctgaggccatgaggggttaccatggcgaccgaggcagccatccccgcccagcccgctttgctgaccaacagcatatggacgtgggccctgctgccagggccccatacctgctgggctccagggaggccttctccaccgagccccgcttctgtgccccgagagctggcctgggacacatttctcctgaagggcccctgagcctgagtgaggggccgtcggtaggccctgagggagggccagcgggggccggggttggggggggtagcagcaccttccccaggatgtaccctggccagggccccttcgacacctgtgaagactgtgtgggccacccacagggcaagggtgccccccgcctgcctcctacactcctggatcagtttgaaaagcagttgccagttcaacaagatggcttccacacactaccataccagcgagggccagcaggggcagggcccgggccagcgccagggacgggcactgccccagagccccgcagtgagagccctagccgcatccggcacctggttcattctgtgcagaagctctttgccaagtcccactctctggaggcgccggggaagcgggactataatgggcccaaggctgagggaagaggtggctctggaggagacagctaccccggcccgggctctggaggcccccacacctcccatcaccaccatcaccaccaccatcaccaccaccaccagtcccggcacggcaagaggagcaagagcaaggaccgcaagggggatgggcggcaccaggccaagtccacaggctggtggagttccgatgacaacttggacagtgatagcggcttcctggcgggtgggaggccccctggggagcctggtggtcccttctgcctggagggtccagatgggtcctaccgggacttgagcttcaaggggcgctcgggcgggtcggaaggccgctgccttgcctgcactggcatgtccatgtcactggatggacagtcggtcaagcgaagtgcctggcataccatgatggtcagccagggccgggatggatacccgggggccgggccaggcaaggggctcctgggtccggagaccaaggccaaagccaggacttatcactatctgcaggtgccgcaagatgactgggggggttaccccaccggtggcaaggatggggagatcccctgccgcaggatgcggagcggcagctacatcaaagccatgggggatgaggagagcggagactcagacggcagccccaagacatctcccaaagcagtcgcccgacgcttcaccacccgtcgctcctccagcgtggaccaggccaggatcaactgctgtgtcccaccccggatccacccccggagctccatccctggctacagccgttccctcaccactggacagctcagcgatgagttgaaccagcagctggaggccgtgtgcgggtcggtgtttggggagctggagtcccaggccgtggacgccctggacctgcccggctgtttccgcatgcggagccacagctacctccgggccatccaggccggctgctctcaagacgacgactgcctgcccctcctcgctacccctgccgctgtctcagggaggcccggctcctccttcaacttcagaaaggccccgccccccatcccgccgggaagccaggccccgccccgcatctccatcaccgcccagagcagcaccgactccgcgcacgagagcttcacggcggccgagggccccgcccggcgctgcagctccgccgacgggctggacggccccgccatgggtgcgcgcacactggagttggcgccggtgccgccccgggccagccccaagccccccacactcatcatcaagaccatccctggcagggaggagctgcggagcctggcgcggcagcggaagtggcggccgtccattggggtgcaggtggagacgatctcagattcggacaccgagaacaggagccggagggagttccactctattggcgtgcaggtggaagaggacaagaggcgagcaaggttcaagcgctccaatagtgtgacggctggcgtgcaggcagacctggagctggagggcctggcaggcctggccacggtggccacagaagacaaggccctgcagtttggacgctccttccagaggcacgcctctgagccccagcctgggccccgggcccccacctactcagtcttccgcacggtccacacgcagggccagtgggcctaccgcgagggctacccactgccgtacgagccgccggccaccgatgggtcgcccggccctgcccccgcccccacccccggccctggggccggccgccgtgactcctggatagagcgcggttcacgtagcctccccgactcaggccgcgcatccccctgcccacgcgacggcgagtggttcatcaagatgctgcgggcagaggtggagaagctggagcactggtgccagcagatggagcgtgaggcggaggactatgagctacccgaggagatcctggagaagatccgcagtgctgtgggcagcacacaacttctcctgtcccagaaggttcagcagttcttccggctgtgtcagcaaagcatggatcccactgcgttccctgtgcccaccttccaggacctggcgggtttctgggacctcctacagctctccatcgaggatgtgaccctcaagttcctggagctacagcaactcaaggccaacagctggaaactcctggagcctaaggaggagaagaaggtccctccgccgataccaaagaagcccctgcggggccggggcgtgccggtgaaggagcgctccctggactccgtggaccggcagcggcaggaagcgcgcaagcggctcctggcggccaagcgcgccgcttccttccgccacagctcggccaccgagagcgccgacagcatcgagatctacatccccgaggcccagaccaggctgtgaccggtccggcccgcccagcccggcccgggcccgcggttctccacccgtactgtacacccagcgtcgaggtcactgtgaacgcgggccgccccgtgcgcccgccccaccggcaccggacgccccggcccccgggcccgtcacactctcgtgggttttttaccttcctgatcccacgcgaaggcgcccgggctgggcagggggccgtgcctctccgccctgcgcccctcacctggatcccctgcccacctggtccgacgctttgtccccacctcctccccatgggcaccatctctgccattctttcccccacgggccaggccgggccgggtccctcatctgggctctgcgtccccccctcccccaccccgcggggctgggcttcgtggggatcaagcttcgtggctttttatgaagaatcccgaaccctgcctaggagcccgccccaccctcccaggggctccatcctcagccctctgcccactgggcccagggaccacagtggctggaccaacccaggaccagggcgcctgggcctctcccctttcccagcggctggggaggggagatgggggcttcccctcaccacacctgtggctgttcccacatccccttgaatatcccaggaaaaataaaacggcagaactgca

SEQ ID NO: 127298 - DNA, 5016 bp, Homo sapiens
  Payload ID: 4915
  Gene Symbol: DLGAP4
  Gene Name: discs, large (Drosophila) homolog-associated protein 4
  Uniprot ID: Q9Y2H0
  ENST ID: ENST00000339266
  CDS Start-End: 436-3414
ggggcgcccgcgggccggagccggggcgggggccggggcctaggcgcgcggacctgcgagcggacccgagaggcggcggcggcgcagcggaacggcagagcgggccggaggcggccgaggcgcccggcgcaggcacccgtgcctcccctctgccaggaaccttggggccttgtgtgtgaccaggacctggtggcccccgggcggtggcagagcccctgtcccaagctgcttcctgccggcacctctgatcaagtgcctagagggatgtgtgtgccagccctcggtccagtgcccgctcctgagctgactcctgctgggccccgacagcttgccgtgtttcctgtgcctgtagctccctggttggatagctgccgcccgggagaggtgacccgggcgccctgctagggtgaaggcccctgccctcggcccgggatcatgaaaggcctcggtgacagccgcccccgccacctctccgacagcctagacccaccccacgagcccctgtttgcagggaccgaccgcaacccctacctgctgtcgcccacggaggccttcgcccgcgaggcccgcttccccgggcagaacaccctgccaggagatggcctctttcccctcaacaaccagctgcccccgcccagcagcacctttccccgcatccactacaactcccacttcgaggtgccagaggagagccccttccccagccatgcccaagccaccaagatcaaccggctgcccgccaacctcctggaccagtttgagaagcagctgcccatccaccgtgatggcttcagcaccctccaatttccccgtggcgaggccaaggcccgtggtgagagccctggccgcatccgccacctggtccactcagtccagcggcttttcttcaccaaggcaccctcactggagggcacagcgggcaaggtcggtggcaatggcagcaagaagggtggcatggaggacggcaagggccggagggccaaaagcaaggagcgggccaaggctggggagcccaaacggcgcagccgctccaacatctcaggctggtggagctccgatgacaacttggacggcgaggccggcgccttccgcagcagtggcccagcctctgggctgatgacactaggccgccaggcagaacgcagccagccacgctacttcatgcacgcctacaacaccatcagtgggcacatgctcaaaaccaccaagaacaacactactgagctgactgccccaccacccccgcccgcacccccagccacctgccccagccttggggtgggcactgacaccaactacgtcaaacggggctcctggtccactctgaccctcagccacgcccacgaggtctgccagaagacctcagccaccttggataagagcctgctcaagtccaaatcctgccaccagggtctagcctaccattacctgcaggtgcccggcggcggcggcgagtggagcaccacgctgctgtccccacgcgagacggatgccgcggccgagggccctatcccgtgccggcgcatgcgcagcggcagctacatcaaggccatgggcgacgaggacagcgacgagtccggcggcagccccaagccctcacccaagaccgcggcgcggcgccagagctatctgagggccacgcagcagtcgctgggagagcagagcaacccccgcaggagtctggaccgcctggattcagtggacatgctgctgccctccaagtgtccgagctgggaagaggactacacccccgtcagcgacagcctcaacgactccagctgcatcagccagatttttggacaggcctccctgatcccccagttgtttggccatgagcagcaggtacgggaggcagagctgagtgaccagtatgaggcggcctgcgagtcagcctgcagtgaagcggagtccacagcggcagagacgcttgacttgccactgcccagctacttccgctcccgcagccacagctacctgcgtgccatccaggcaggctgctcgcaggaggaggacagtgtctccctgcagtccctctccccaccgcccagtaccggcagcctcagcaatagtcgcacgcttccgagttcatcatgcctagtggcgtataagaagaccccgccaccggtccctccacgcaccacttcaaagccgttcatctcagtcacagtccagagcagtactgagtctgcccaggacacctacctggacagccaggaccacaagagcgaggtgactagccagtcgggcctgagcaactcgtcggacagcctggacagcagtacccgaccgcccagcgtgacacggggtggagtcgccccagcccctgaggccccagagccacccccaaaacatgcagctctgaaaagtgaacaagggacgctgaccagctctgagtcccaccccgaggccgcccccaaaaggaaactgtcatcgataggaatacaagttgactgcattcagccagtgccaaaagaggagcccagtcccgctaccaaattccagtccatcggggttcaggtagaggacgactggcgaagcagcgtcccctctcacagtatgtcctcccgacgggacacagactcggatacccaggatgccaatgactcaagctgtaagtcatctgagaggagcctcccggactgtacccctcaccccaactccatcagcatcgatgccggtccccggcaggcccccaagattgcccagatcaagcgcaacctctcctatggagacaacagcgaccctgccctagaggcgtcctcgctgcccccacccgacccctggctcgagacctcctccagctccccagcagagccggcacagccaggggcctgccgccgagacggctactggttcctaaagctactgcaggcagaaacagagcggctggaaggctggtgctgccagatggacaaggagaccaaagagaacaacctctctgaagaagtcttaggaaaagtcctcagtgctgtgggcagtgcccagctactgatgtcccagaaattccagcagttccggggcctctgtgagcaaaacttgaaccctgatgccaacccacgccccacagcccaggacctggcagggttctgggacctgctacagctgtccatcgaggatatcagcatgaagttcgatgaactctaccacctcaaggccaacagctggcagctggtggagacccccgagaagaggaaggaagagaagaaaccaccccctccggtcccaaagaagccagccaaatccaagccggcagtgagccgcgacaaggcctcagacgccagcgacaagcagcgccaggaggcccgcaagagactcctggcggccaagcgggcagcttctgtgcggcagaactcagccaccgagagcgcagacagcatcgagatttatgtcccggaggcccagaccaggctctgagaccatgcaggaggaaagaaacgattttaaatcattaaaaacacaaaaactaagtgcgaacggaacagagttttctcaacctttgctatggttattctgtctagagaccctgagccaactttcaaattgacgcatacaagggctcacaatttggcttttttgggtccctcccagctttaggttatgaagattttactcacaaaaaaaatcaacaaaaatcacgaaactagaaaactttttttttcctcttgctggccgtggtggactagatagatggacgtcggcaactcccggcccagcctccatactgcggtctttttactcgttctatctgatgagaactcacactagcttgtttacaagatgacgacagtccaagggcagccttgggcacctgccatgtccctcctttccccagctatccccgctctgaccttgattttcattcttatgtttttctcttttcccttcagagctcacacagtggtcaccattgtggcaagcggctttctgggtctcagccctctctgcggttgagggcccagaggacagagagatggacatgcgtcccctccctccccccgccaagtgctcacacacaacctcacgcgcacacacacacacgcagatggaggcgcctcactgggaggtgccccgccagccctgggcagtgtcaggcaggactcactcaccgctgagcagatgagggaagttttagtcttggcgggtggaaatgagacgaagccacagttatcacactccagactcctgcccttttattttctccagccccttcttccttcagcaaaatctaggactcccgagtggcttccagggggccgtcagtcctcagccgcgcctgtgtccggtgcccgaggggcgggcggcggtgtctgtatgtatgtgtacatatgcacatagaccttagagtgtatagttaacaaacgcccatctgctcacccatgcccacccagcgccgccgccgctggctctcggggcacctggcaggaggcgggtgtgtgaatagcatatatttttacatgtactatatctaggtgtgtgtacaagtgtgtgtaaaaatatataccttgtgtgtaagcagccctttttttttttggtctccacccccctccccccgccccgcactcctaagggcccatctgcccagcctctgagttttctgttctattttttttttaaccccaattatccttctctctctcctgcccccgcatcccactcccagggtgtcacgagccctgagctgcaatggcccgggcctgcagggcggggtaggggagggcaggggctgagccccgaagccagctcagtacctgaggggctgctctatgctgtgtatgcgcctctctggcatccgagacatcctcttggctggcgcttgctgcagggggggacccccccccgtccccaggtgaaccaagggtctgctccggggcccatttccagcttggccgccgtctgtgaccttgggcaagtcacttgacctctgtgtgcctcaacttcctcctctgtaaaacggggacagtccctgcccctccctacctcacaggcatgttgtgagaataaatgaggtaacgtgta

SEQ ID NO: 127299 - DNA, 2392 bp, Homo sapiens
  Payload ID: 4915
  Gene Symbol: DLGAP4
  Gene Name: discs, large (Drosophila) homolog-associated protein 4
  Uniprot ID: Q9Y2H0
  ENST ID: ENST00000340491
  CDS Start-End: 823-2184
gtccgcccgcccgcccgcccgcccgcgcttccgtcctgtccagccgccagtcctccagcccgtgtccccgctccgcccgctttgtctctccccggctcgctgtctctttgtctctgccctcgcgctcctccgcagcccctccctcgctccccatctcgggtccccttctcagagcgctcttcagccctcagagccgccctttctgggcgaccccactcttcgggactccccctcagagcgcccccagatcttttggggttccccttgagaacaccttccactctccccaagggctccccgtgagtttcttgcacatcctttgggggttctgcaccccaagtcgctggggtctcgcctcctctgaacccccattgcccctgggctttccctcttctgggtgttccccatatccactgggagctcctaggtcccaagttggggtctttctccttgggaccccccaatatgtcctcagctccctgacttcaggagctcctctctgctttcccctggtttgtcccctgtcgctgtctctccttgttctctctcaggtctccgagcacccccacttctcgggatcggggtcccctgctttgctctccctgcccctctgtgcccccacatctgtctcggtggtctcgccactctgtgcctcttgcgctgaaggcccccctttgagcctgcttctttgcctggggcccttggcccccccttgctttttcagccctagccccctgtctccccttctctctgctccttgtctccctctccctttttctgtctttgccgggtctctgggtctctgacccccatccggccctcatggctttgtgtctggagctcttgaagcaatgttcatcatgcctagtggcgtataagaagaccccgccaccggtccctccacgcaccacttcaaagccgttcatctcagtcacagtccagagcagtactgagtctgcccaggacacctacctggacagccaggaccacaagagcgaggtgactagccagtcgggcctgagcaactcgtcggacagcctggacagcagtacccgaccgcccagcgtgacacggggtggagtcgccccagcccctgaggccccagagccacccccaaaacatgcagctctgaaaagtgaacaagggacgctgaccagctctgagtcccaccccgaggccgcccccaaaaggaaactgtcatcgataggaatacaagttgactgcattcagccagtgccaaaagaggagcccagtcccgctaccaaattccagtccatcggggttcaggtagaggacgactggcgaagcagcgtcccctctcacagtatgtcctcccgacgggacacagactcggatacccaggatgccaatgactcaagctgtaagtcatctgagaggagcctcccggactgtacccctcaccccaactccatcagcatcgatgccggtccccggcaggcccccaagattgcccagatcaagcgcaacctctcctatggagacaacagcgaccctgccctagaggcgtcctcgctgcccccacccgacccctggctcgagacctcctccagctccccagcagagccggcacagccaggggcctgccgccgagacggctactggttcctaaagctactgcaggcagaaacagagcggctggaaggctggtgctgccagatggacaaggagaccaaagagaacaacctctctgaagaagtcttaggaaaagtcctcagtgctgtgggcagtgcccagctactgatgtcccagaaattccagcagttccggggcctctgtgagcaaaacttgaaccctgatgccaacccacgccccacagcccaggacctggcagggttctgggacctgctacagctgtccatcgaggatatcagcatgaagttcgatgaactctaccacctcaaggccaacagctggcagctggtggagacccccgagaagaggaaggaagagaagaaaccaccccctccggtcccaaagaagccagccaaatccaagccggcagtgagccgcgacaaggcctcagacgccagcgacaagcagcgccaggaggcccgcaagagactcctggcggccaagcgggcagcttctgtgcggcagaactcagccaccgagagcgcagacagcatcgagatttatgtcccggaggcccagaccaggctctgagaccatgcaggaggaaagaaacgattttaaatcattaaaaacacaaaaactaagtgcgaacggaacagagttttctcaacctttgctatggttattctgtctagagaccctgagccaactttcaaattgacgcatacaagggctcacaatttggcttttttgggtccctcccagctttaggttatgaagattttactcacaaaaaaaa

SEQ ID NO: 127300 - DNA, 3337 bp, Homo sapiens
  Payload ID: 4915
  Gene Symbol: DLGAP4
  Gene Name: discs, large (Drosophila) homolog-associated protein 4
  Uniprot ID: Q9Y2H0
  ENST ID: ENST00000373907
  CDS Start-End: 200-3178
cggcacctctgatcaagtgcctagagggatgtgtgtgccagccctcggtccagtgcccgctcctgagctgactcctgctgggccccgacagcttgccgtgtttcctgtgcctgtagctccctggttggatagctgccgcccgggagaggtgacccgggcgccctgctagggtgaaggcccctgccctcggcccgggatcatgaaaggcctcggtgacagccgcccccgccacctctccgacagcctagacccaccccacgagcccctgtttgcagggaccgaccgcaacccctacctgctgtcgcccacggaggccttcgcccgcgaggcccgcttccccgggcagaacaccctgccaggagatggcctctttcccctcaacaaccagctgcccccgcccagcagcacctttccccgcatccactacaactcccacttcgaggtgccagaggagagccccttccccagccatgcccaagccaccaagatcaaccggctgcccgccaacctcctggaccagtttgagaagcagctgcccatccaccgtgatggcttcagcaccctccaatttccccgtggcgaggccaaggcccgtggtgagagccctggccgcatccgccacctggtccactcagtccagcggcttttcttcaccaaggcaccctcactggagggcacagcgggcaaggtcggtggcaatggcagcaagaagggtggcatggaggacggcaagggccggagggccaaaagcaaggagcgggccaaggctggggagcccaaacggcgcagccgctccaacatctcaggctggtggagctccgatgacaacttggacggcgaggccggcgccttccgcagcagtggcccagcctctgggctgatgacactaggccgccaggcagaacgcagccagccacgctacttcatgcacgcctacaacaccatcagtgggcacatgctcaaaaccaccaagaacaacactactgagctgactgccccaccacccccgcccgcacccccagccacctgccccagccttggggtgggcactgacaccaactacgtcaaacggggctcctggtccactctgaccctcagccacgcccacgaggtctgccagaagacctcagccaccttggataagagcctgctcaagtccaaatcctgccaccagggtctagcctaccattacctgcaggtgcccggcggcggcggcgagtggagcaccacgctgctgtccccacgcgagacggatgccgcggccgagggccctatcccgtgccggcgcatgcgcagcggcagctacatcaaggccatgggcgacgaggacagcgacgagtccggcggcagccccaagccctcacccaagaccgcggcgcggcgccagagctatctgagggccacgcagcagtcgctgggagagcagagcaacccccgcaggagtctggaccgcctggattcagtggacatgctgctgccctccaagtgtccgagctgggaagaggactacacccccgtcagcgacagcctcaacgactccagctgcatcagccagatttttggacaggcctccctgatcccccagttgtttggccatgagcagcaggtacgggaggcagagctgagtgaccagtatgaggcggcctgcgagtcagcctgcagtgaagcggagtccacagcggcagagacgcttgacttgccactgcccagctacttccgctcccgcagccacagctacctgcgtgccatccaggcaggctgctcgcaggaggaggacagtgtctccctgcagtccctctccccaccgcccagtaccggcagcctcagcaatagtcgcacgcttccgagttcatcatgcctagtggcgtataagaagaccccgccaccggtccctccacgcaccacttcaaagccgttcatctcagtcacagtccagagcagtactgagtctgcccaggacacctacctggacagccaggaccacaagagcgaggtgactagccagtcgggcctgagcaactcgtcggacagcctggacagcagtacccgaccgcccagcgtgacacggggtggagtcgccccagcccctgaggccccagagccacccccaaaacatgcagctctgaaaagtgaacaagggacgctgaccagctctgagtcccaccccgaggccgcccccaaaaggaaactgtcatcgataggaatacaagttgactgcattcagccagtgccaaaagaggagcccagtcccgctaccaaattccagtccatcggggttcaggtagaggacgactggcgaagcagcgtcccctctcacagtatgtcctcccgacgggacacagactcggatacccaggatgccaatgactcaagctgtaagtcatctgagaggagcctcccggactgtacccctcaccccaactccatcagcatcgatgccggtccccggcaggcccccaagattgcccagatcaagcgcaacctctcctatggagacaacagcgaccctgccctagaggcgtcctcgctgcccccacccgacccctggctcgagacctcctccagctccccagcagagccggcacagccaggggcctgccgccgagacggctactggttcctaaagctactgcaggcagaaacagagcggctggaaggctggtgctgccagatggacaaggagaccaaagagaacaacctctctgaagaagtcttaggaaaagtcctcagtgctgtgggcagtgcccagctactgatgtcccagaaattccagcagttccggggcctctgtgagcaaaacttgaaccctgatgccaacccacgccccacagcccaggacctggcagggttctgggacctgctacagctgtccatcgaggatatcagcatgaagttcgatgaactctaccacctcaaggccaacagctggcagctggtggagacccccgagaagaggaaggaagagaagaaaccaccccctccggtcccaaagaagccagccaaatccaagccggcagtgagccgcgacaaggcctcagacgccagcgacaagcagcgccaggaggcccgcaagagactcctggcggccaagcgggcagcttctgtgcggcagaactcagccaccgagagcgcagacagcatcgagatttatgtcccggaggcccagaccaggctctgagaccatgcaggaggaaagaaacgattttaaatcattaaaaacacaaaaactaagtgcgaacggaacagagttttctcaacctttgctatggttattctgtctagagaccctgagccaactttcaaattgacgcatacaagggctcacaatttggctttt

SEQ ID NO: 127301 - DNA, 5056 bp, Homo sapiens
  Payload ID: 4915
  Gene Symbol: DLGAP4
  Gene Name: discs, large (Drosophila) homolog-associated protein 4
  Uniprot ID: Q9Y2H0
  ENST ID: ENST00000373913
  CDS Start-End: 481-3450
cccgcagccgcatctggggcgccgcgccggccggaggagaggcatggggcgcccgcgggccggagccggggcgggggccggggcctaggcgcgcggacctgcgagcggacccgagaggcggcggcggcgcagcggaacggcagagcgggccggaggcggccgaggcgcccggcgcaggcacccgtgcctcccctctgccaggaaccttggggccttgtgtgtgaccaggacctggtggcccccgggcggtggcagagcccctgtcccaagctgcttcctgccggcacctctgatcaagtgcctagagggatgtgtgtgccagccctcggtccagtgcccgctcctgagctgactcctgctgggccccgacagcttgccgtgtttcctgtgcctgtagctccctggttggatagctgccgcccgggagaggtgacccgggcgccctgctagggtgaaggcccctgccctcggcccgggatcatgaaaggcctcggtgacagccgcccccgccacctctccgacagcctagacccaccccacgagcccctgtttgcagggaccgaccgcaacccctacctgctgtcgcccacggaggccttcgcccgcgaggcccgcttccccgggcagaacaccctgccaggagatggcctctttcccctcaacaaccagctgcccccgcccagcagcacctttccccgcatccactacaactcccacttcgaggtgccagaggagagccccttccccagccatgcccaagccaccaagatcaaccggctgcccgccaacctcctggaccagtttgagaagcagctgcccatccaccgtgatggcttcagcaccctccaatttccccgtggcgaggccaaggcccgtggtgagagccctggccgcatccgccacctggtccactcagtccagcggcttttcttcaccaaggcaccctcactggagggcacagcgggcaaggtcggtggcaatggcagcaagaagggtggcatggaggacggcaagggccggagggccaaaagcaaggagcgggccaaggctggggagcccaaacggcgcagccgctccaacatctcaggctggtggagctccgatgacaacttggacggcgaggccggcgccttccgcagcagtggcccagcctctgggctgatgacactaggccgccaggcagaacgcagccagccacgctacttcatgcacgcctacaacaccatcagtgggcacatgctcaaaaccaccaagaacaacactactgagctgactgccccaccacccccgcccgcacccccagccacctgccccagccttggggtgggcactgacaccaactacgtcaaacggggctcctggtccactctgaccctcagccacgcccacgaggtctgccagaagacctcagccaccttggataagagcctgctcaagtccaaatcctgccaccagggtctagcctaccattacctgcaggtgcccggcggcggcggcgagtggagcaccacgctgctgtccccacgcgagacggatgccgcggccgagggccctatcccgtgccggcgcatgcgcagcggcagctacatcaaggccatgggcgacgaggacagcgacgagtccggcggcagccccaagccctcacccaagaccgcggcgcggcgccagagctatctgagggccacgcagcagtcgctgggagagcagagcaacccccgcaggagtctggaccgcctggattcagtggacatgctgctgccctccaagtgtccgagctgggaagaggactacacccccgtcagcgacagcctcaacgactccagctgcatcagccagatttttggacaggcctccctgatcccccagttgtttggccatgagcagcaggtacgggaggcagagctgagtgaccagtatgaggcggcctgcgagtcagcctgcagtgaagcggagtccacagcggcagagacgcttgacttgccactgcccagctacttccgctcccgcagccacagctacctgcgtgccatccaggcaggctgctcgcaggaggaggacagtgtctccctgcagtccctctccccaccgcccagtaccggcagcctcagcaatagtcgcacgcttccgagttcatcatgcctagtggcgtataagaagaccccgccaccggtccctccacgcaccacttcaaagccgttcatctcagtcacagtccagagcagtactgagtctgcccaggacacctacctggacagccaggaccacaagagcgaggtgactagccagtcgggcctgagcaactcgtcggacagcctggacagcagtacccgaccgcccagcgtgacacggggtggagtcgccccagcccctgaggccccagagccacccccaaaacatgcagctctgaaaagtgaacaagggacgctgaccagctctgagtcccaccccgaggccgcccccaaaaggaaactgtcatcgataggaatacaagagaggactagaaggaacggttcccacctctcggaggacaacggacccaaagcgatcgatgtgatggcaccctcctcagaaagcagcgtcccctctcacagtatgtcctcccgacgggacacagactcggatacccaggatgccaatgactcaagctgtaagtcatctgagaggagcctcccggactgtacccctcaccccaactccatcagcatcgatgccggtccccggcaggcccccaagattgcccagatcaagcgcaacctctcctatggagacaacagcgaccctgccctagaggcgtcctcgctgcccccacccgacccctggctcgagacctcctccagctccccagcagagccggcacagccaggggcctgccgccgagacggctactggttcctaaagctactgcaggcagaaacagagcggctggaaggctggtgctgccagatggacaaggagaccaaagagaacaacctctctgaagaagtcttaggaaaagtcctcagtgctgtgggcagtgcccagctactgatgtcccagaaattccagcagttccggggcctctgtgagcaaaacttgaaccctgatgccaacccacgccccacagcccaggacctggcagggttctgggacctgctacagctgtccatcgaggatatcagcatgaagttcgatgaactctaccacctcaaggccaacagctggcagctggtggagacccccgagaagaggaaggaagagaagaaaccaccccctccggtcccaaagaagccagccaaatccaagccggcagtgagccgcgacaaggcctcagacgccagcgacaagcagcgccaggaggcccgcaagagactcctggcggccaagcgggcagcttctgtgcggcagaactcagccaccgagagcgcagacagcatcgagatttatgtcccggaggcccagaccaggctctgagaccatgcaggaggaaagaaacgattttaaatcattaaaaacacaaaaactaagtgcgaacggaacagagttttctcaacctttgctatggttattctgtctagagaccctgagccaactttcaaattgacgcatacaagggctcacaatttggcttttttgggtccctcccagctttaggttatgaagattttactcacaaaaaaaatcaacaaaaatcacgaaactagaaaactttttttttcctcttgctggccgtggtggactagatagatggacgtcggcaactcccggcccagcctccatactgcggtctttttactcgttctatctgatgagaactcacactagcttgtttacaagatgacgacagtccaagggcagccttgggcacctgccatgtccctcctttccccagctatccccgctctgaccttgattttcattcttatgtttttctcttttcccttcagagctcacacagtggtcaccattgtggcaagcggctttctgggtctcagccctctctgcggttgagggcccagaggacagagagatggacatgcgtcccctccctccccccgccaagtgctcacacacaacctcacgcgcacacacacacacgcagatggaggcgcctcactgggaggtgccccgccagccctgggcagtgtcaggcaggactcactcaccgctgagcagatgagggaagttttagtcttggcgggtggaaatgagacgaagccacagttatcacactccagactcctgcccttttattttctccagccccttcttccttcagcaaaatctaggactcccgagtggcttccagggggccgtcagtcctcagccgcgcctgtgtccggtgcccgaggggcgggcggcggtgtctgtatgtatgtgtacatatgcacatagaccttagagtgtatagttaacaaacgcccatctgctcacccatgcccacccagcgccgccgccgctggctctcggggcacctggcaggaggcgggtgtgtgaatagcatatatttttacatgtactatatctaggtgtgtgtacaagtgtgtgtaaaaatatataccttgtgtgtaagcagccctttttttttttggtctccacccccctccccccgccccgcactcctaagggcccatctgcccagcctctgagttttctgttctattttttttttaaccccaattatccttctctctctcctgcccccgcatcccactcccagggtgtcacgagccctgagctgcaatggcccgggcctgcagggcggggtaggggagggcaggggctgagccccgaagccagctcagtacctgaggggctgctctatgctgtgtatgcgcctctctggcatccgagacatcctcttggctggcgcttgctgcagggggggacccccccccgtccccaggtgaaccaagggtctgctccggggcccatttccagcttggccgccgtctgtgaccttgggcaagtcacttgacctctgtgtgcctcaacttcctcctctgtaaaacggggacagtccctgcccctccctacctcacaggcatgttgtgagaataaatgaggtaacgtgtaccaa

SEQ ID NO: 127302 - DNA, 4881 bp, Homo sapiens
  Payload ID: 4915
  Gene Symbol: DLGAP4
  Gene Name: discs, large (Drosophila) homolog-associated protein 4
  Uniprot ID: Q9Y2H0
  ENST ID: ENST00000401952
  CDS Start-End: 308-3277
gcaggcacccgtgcctcccctctgccaggaaccttggggccttgtgtgtgaccaggacctggtggcccccgggcggtggcagagcccctgtcccaagctgcttcctgccggcacctctgatcaagtgcctagagggatgtgtgtgccagccctcggtccagtgcccgctcctgagctgactcctgctgggccccgacagcttgccgtgtttcctgtgcctgtagctccctggttggatagctgccgcccgggagaggtgacccgggcgccctgctagggtgaaggcccctgccctcggcccgggatcatgaaaggcctcggtgacagccgcccccgccacctctccgacagcctagacccaccccacgagcccctgtttgcagggaccgaccgcaacccctacctgctgtcgcccacggaggccttcgcccgcgaggcccgcttccccgggcagaacaccctgccaggagatggcctctttcccctcaacaaccagctgcccccgcccagcagcacctttccccgcatccactacaactcccacttcgaggtgccagaggagagccccttccccagccatgcccaagccaccaagatcaaccggctgcccgccaacctcctggaccagtttgagaagcagctgcccatccaccgtgatggcttcagcaccctccaatttccccgtggcgaggccaaggcccgtggtgagagccctggccgcatccgccacctggtccactcagtccagcggcttttcttcaccaaggcaccctcactggagggcacagcgggcaaggtcggtggcaatggcagcaagaagggtggcatggaggacggcaagggccggagggccaaaagcaaggagcgggccaaggctggggagcccaaacggcgcagccgctccaacatctcaggctggtggagctccgatgacaacttggacggcgaggccggcgccttccgcagcagtggcccagcctctgggctgatgacactaggccgccaggcagaacgcagccagccacgctacttcatgcacgcctacaacaccatcagtgggcacatgctcaaaaccaccaagaacaacactactgagctgactgccccaccacccccgcccgcacccccagccacctgccccagccttggggtgggcactgacaccaactacgtcaaacggggctcctggtccactctgaccctcagccacgcccacgaggtctgccagaagacctcagccaccttggataagagcctgctcaagtccaaatcctgccaccagggtctagcctaccattacctgcaggtgcccggcggcggcggcgagtggagcaccacgctgctgtccccacgcgagacggatgccgcggccgagggccctatcccgtgccggcgcatgcgcagcggcagctacatcaaggccatgggcgacgaggacagcgacgagtccggcggcagccccaagccctcacccaagaccgcggcgcggcgccagagctatctgagggccacgcagcagtcgctgggagagcagagcaacccccgcaggagtctggaccgcctggattcagtggacatgctgctgccctccaagtgtccgagctgggaagaggactacacccccgtcagcgacagcctcaacgactccagctgcatcagccagatttttggacaggcctccctgatcccccagttgtttggccatgagcagcaggtacgggaggcagagctgagtgaccagtatgaggcggcctgcgagtcagcctgcagtgaagcggagtccacagcggcagagacgcttgacttgccactgcccagctacttccgctcccgcagccacagctacctgcgtgccatccaggcaggctgctcgcaggaggaggacagtgtctccctgcagtccctctccccaccgcccagtaccggcagcctcagcaatagtcgcacgcttccgagttcatcatgcctagtggcgtataagaagaccccgccaccggtccctccacgcaccacttcaaagccgttcatctcagtcacagtccagagcagtactgagtctgcccaggacacctacctggacagccaggaccacaagagcgaggtgactagccagtcgggcctgagcaactcgtcggacagcctggacagcagtacccgaccgcccagcgtgacacggggtggagtcgccccagcccctgaggccccagagccacccccaaaacatgcagctctgaaaagtgaacaagggacgctgaccagctctgagtcccaccccgaggccgcccccaaaaggaaactgtcatcgataggaatacaagagaggactagaaggaacggttcccacctctcggaggacaacggacccaaagcgatcgatgtgatggcaccctcctcagaaagcagcgtcccctctcacagtatgtcctcccgacgggacacagactcggatacccaggatgccaatgactcaagctgtaagtcatctgagaggagcctcccggactgtacccctcaccccaactccatcagcatcgatgccggtccccggcaggcccccaagattgcccagatcaagcgcaacctctcctatggagacaacagcgaccctgccctagaggcgtcctcgctgcccccacccgacccctggctcgagacctcctccagctccccagcagagccggcacagccaggggcctgccgccgagacggctactggttcctaaagctactgcaggcagaaacagagcggctggaaggctggtgctgccagatggacaaggagaccaaagagaacaacctctctgaagaagtcttaggaaaagtcctcagtgctgtgggcagtgcccagctactgatgtcccagaaattccagcagttccggggcctctgtgagcaaaacttgaaccctgatgccaacccacgccccacagcccaggacctggcagggttctgggacctgctacagctgtccatcgaggatatcagcatgaagttcgatgaactctaccacctcaaggccaacagctggcagctggtggagacccccgagaagaggaaggaagagaagaaaccaccccctccggtcccaaagaagccagccaaatccaagccggcagtgagccgcgacaaggcctcagacgccagcgacaagcagcgccaggaggcccgcaagagactcctggcggccaagcgggcagcttctgtgcggcagaactcagccaccgagagcgcagacagcatcgagatttatgtcccggaggcccagaccaggctctgagaccatgcaggaggaaagaaacgattttaaatcattaaaaacacaaaaactaagtgcgaacggaacagagttttctcaacctttgctatggttattctgtctagagaccctgagccaactttcaaattgacgcatacaagggctcacaatttggcttttttgggtccctcccagctttaggttatgaagattttactcacaaaaaaaatcaacaaaaatcacgaaactagaaaactttttttttcctcttgctggccgtggtggactagatagatggacgtcggcaactcccggcccagcctccatactgcggtctttttactcgttctatctgatgagaactcacactagcttgtttacaagatgacgacagtccaagggcagccttgggcacctgccatgtccctcctttccccagctatccccgctctgaccttgattttcattcttatgtttttctcttttcccttcagagctcacacagtggtcaccattgtggcaagcggctttctgggtctcagccctctctgcggttgagggcccagaggacagagagatggacatgcgtcccctccctccccccgccaagtgctcacacacaacctcacgcgcacacacacacacgcagatggaggcgcctcactgggaggtgccccgccagccctgggcagtgtcaggcaggactcactcaccgctgagcagatgagggaagttttagtcttggcgggtggaaatgagacgaagccacagttatcacactccagactcctgcccttttattttctccagccccttcttccttcagcaaaatctaggactcccgagtggcttccagggggccgtcagtcctcagccgcgcctgtgtccggtgcccgaggggcgggcggcggtgtctgtatgtatgtgtacatatgcacatagaccttagagtgtatagttaacaaacgcccatctgctcacccatgcccacccagcgccgccgccgctggctctcggggcacctggcaggaggcgggtgtgtgaatagcatatatttttacatgtactatatctaggtgtgtgtacaagtgtgtgtaaaaatatataccttgtgtgtaagcagccctttttttttttggtctccacccccctccccccgccccgcactcctaagggcccatctgcccagcctctgagttttctgttctattttttttttaaccccaattatccttctctctctcctgcccccgcatcccactcccagggtgtcacgagccctgagctgcaatggcccgggcctgcagggcggggtaggggagggcaggggctgagccccgaagccagctcagtacctgaggggctgctctatgctgtgtatgcgcctctctggcatccgagacatcctcttggctggcgcttgctgcagggggggacccccccccgtccccaggtgaaccaagggtctgctccggggcccatttccagcttggccgccgtctgtgaccttgggcaagtcacttgacctctgtgtgcctcaacttcctcctctgtaaaacggggacagtccctgcccctccctacctcacaggcatgttgtgagaataaatgaggtaacgtgtacc

SEQ ID NO: 127303 - DNA, 2396 bp, Homo sapiens
  Payload ID: 4915
  Gene Symbol: DLGAP4
  Gene Name: discs, large (Drosophila) homolog-associated protein 4
  ENST ID: ENST00000489701
  CDS Start-End: 1229-1963
tcactttcctcttaccgaatcaggcctggacttgctttctggctgggttactttccctctgatgactggctgcctaggccagggctcagggcgtctgagggtgcttagtagaactctgggcccagcagctctgagagagaggctggagggtcagtcctttgtccagaccctgactgtgggcagtcctgttgtcttccattgggaagaaggtgtgcctcttcccaccagaacctcgtgaatgctgcatgcacactcttcatggacagtgtcatccctaccccacagatgggaacaaggactctggtgtcacacagcctaagctaggcttagtgcccagttcttgctcccccatactaactgctaccctcctaagggagatatactcccttaaacattttgagcaaattgaggttggcttccgttttctgatctagggcaaaaaaccccatttgtttgggactttaggtcaaacaaatccattcctttcctgaaatcctcagtgagttagtcctgtctctgctggtggccatagatttcaagagttgctctaaacaaacgtccaggtcttggtggaaactgtccctgggccagtcagagaaccagcccagactccctgccagtggctggggagtggtagaaatttggctcgcccccccatccccaccctacccacaggcccagttgtgtctgtaccagaaatgaggagtgatgccaagcctaggcctggcccagccttagcttctgcaatgcaacctatgtaatcacacccattttacaaggaggaaactggggccatacaacaggttcatcatgcctagtggcgtataagaagaccccgccaccggtccctccacgcaccacttcaaagccgttcatctcagtcacagtccagagcagtactgagtctgcccaggacacctacctggacagccaggaccacaagagcgaggtgactagccagtcgggcctgagcaactcgtcggacagcctggacagcagtacccgaccgcccagcgtgacacggggtggagtcgccccagcccctgaggccccagagccacccccaaaacatgcagctctgaaaagtgaacaagggacgctgaccagctctgagtcccaccccgaggccgcccccaaaaggaaactgtcatcgataggaatacaagagaggactagaaggaacggttcccacctctcggaggacaacggacccaaagcgatcgatgtgatggcaccctcctcagaaagcagcgtcccctctcacagtatgtcctcccgacgggacacagactcggatacccaggatgccaatgactcaagctgtaagtcatctgagaggagcctcccggactgtacccctcaccccaactccatcagcatcgatgccggtccccggcaggcccccaagattgcccagatcaagcgcaacctctcctatggagacaacagcgaccctgccctagaggcgtcctcgctgcccccacccgacccctggctcgagacctcctccagctccccagcagagccggcacagccaggggcctgccgccgagacggctactggttcctaaagctactgcaggcagaaacagagcggctggaaggctggtgctgccagatggacaaggagaccaaagagaacaacctctctgaagaagtcttaggaaaagtcctcagtgctgtgggcagtgcccagctactgatgtcccagaaattccagcagttccggggcctctgtgagcaaaacttgaaccctgatgccaacccacgccccacagcccaggacctggcagggttctgggacctgctacagctgtccatcgaggatatcagcatgaagttcgatgaactctaccacctcaaggccaacagctggcagctggtggagacccccgagaagaggaaggtgagcatggagcagtgcggaggggaagtccagggacaaattcctggtcggcaataacgctgcccacatcggaagagaagaaaccaccccctccggtcccaaagaagccagccaaatccaagccggcagtgagccgcgacaaggcctcagacgccagcgacaagcagcgccaggaggcccgcaagagactcctggcggccaagcgggcagcttctgtgcggcagaactcagccaccgagagcgcagacagcatcgagatttatgtcccggaggcccagaccaggctctgagaccatgcaggaggaaagaaacgattttaaatcattaaaaacacaaaaactaagtgcgaacggaacagagttttctcaacctttgctatggttattctgtctagagaccctgagccaactttcaaattgacgcatacaagggctcacaatttggcttttttgggtccctcccagctttaggttatgaagattttactcac

SEQ ID NO: 127304 - DNA, 3110 bp, Homo sapiens
  Payload ID: 4915
  Gene Symbol: DLGAP4
  Gene Name: discs, large (Drosophila) homolog-associated protein 4
  ENST ID: ENST00000475894
  CDS Start-End: 647-1504
acatgccaagcgggctgcgcgcgcccctgcccggcccgggagtccctgacgacgcgcgcgcggctgacgcggggggcggggaggggcggggcaggtgcgggactttaacccggagccccgcccctcgggcgtacaaaaccggagcctcgggccgggctgcgtgagggaggagggttcatcatgcctagtggcgtataagaagaccccgccaccggtccctccacgcaccacttcaaagccgttcatctcagtcacagtccagagcagtactgagtctgcccaggacacctacctggacagccaggaccacaagagcgaggtgactagccagtcgggcctgagcaactcgtcggacagcctggacagcagtacccgaccgcccagcgtgacacggggtggagtcgccccagcccctgaggccccagagccacccccaaaacatgcagctctgaaaagtgaacaagggacgctgaccagctctgagtcccaccccgaggccgcccccaaaaggaaactgtcatcgataggaatacaagttgactgcattcagccagtgccaaaagaggagcccagtcccgctaccaaattccagtccatcggggttcaggtagaggacgactggcgaagcagcgtcccctctcacagtatgtcctcccgacgggacacagactcggatacccaggatgccaatgactcaagctgtaagtcatctgagaggagcctcccggactgtacccctcaccccaactccatcagcatcgatgccggtccccggcaggcccccaagattgcccagatcaagcgcaacctctcctatggagacaacagcgaccctgccctagaggcgtcctcgctgcccccacccgacccctggctcgagacctcctccagctccccagcagagccggcacagccaggggcctgccgccgagacggctactggttcctaaagctactgcaggcagaaacagagcggctggaaggctggtgctgccagatggacaaggagaccaaagagaacaacctctctgaagaagtcttaggaaaagtcctcagtgctgtgggcagtgcccagctactgatgtcccagaaattccagcagttccggggcctctgtgagcaaaacttgaaccctgatgccaacccacgccccacagcccaggacctggcagggttctgggacctgctacagctgtccatcgaggatatcagcatgaagttcgatgaactctaccacctcaaggccaacagctggcagctggtggagacccccgagaagaggaaggaagagaagaaaccaccccctccggtcccaaagaagccagccaaatccaagccggcagtgagccgcgacaaggcctcagacgccagcgacaagcagcgccaggaggcccgcaagagactcctggcggccaagcgggcagcttctgtgcggcagaactcagccaccgagagcgcagacagcatcgagatttatgtcccggaggcccagaccaggctctgagaccatgcaggaggaaagaaacgattttaaatcattaaaaacacaaaaactaagtgcgaacggaacagagttttctcaacctttgctatggttattctgtctagagaccctgagccaactttcaaattgacgcatacaagggctcacaatttggcttttttgggtccctcccagctttaggttatgaagattttactcacaaaaaaaatcaacaaaaatcacgaaactagaaaactttttttttcctcttgctggccgtggtggactagatagatggacgtcggcaactcccggcccagcctccatactgcggtctttttactcgttctatctgatgagaactcacactagcttgtttacaagatgacgacagtccaagggcagccttgggcacctgccatgtccctcctttccccagctatccccgctctgaccttgattttcattcttatgtttttctcttttcccttcagagctcacacagtggtcaccattgtggcaagcggctttctgggtctcagccctctctgcggttgagggcccagaggacagagagatggacatgcgtcccctccctccccccgccaagtgctcacacacaacctcacgcgcacacacacacacgcagatggaggcgcctcactgggaggtgccccgccagccctgggcagtgtcaggcaggactcactcaccgctgagcagatgagggaagttttagtcttggcgggtggaaatgagacgaagccacagttatcacactccagactcctgcccttttattttctccagccccttcttccttcagcaaaatctaggactcccgagtggcttccagggggccgtcagtcctcagccgcgcctgtgtccggtgcccgaggggcgggcggcggtgtctgtatgtatgtgtacatatgcacatagaccttagagtgtatagttaacaaacgcccatctgctcacccatgcccacccagcgccgccgccgctggctctcggggcacctggcaggaggcgggtgtgtgaatagcatatatttttacatgtactatatctaggtgtgtgtacaagtgtgtgtaaaaatatataccttgtgtgtaagcagccctttttttttttggtctccacccccctccccccgccccgcactcctaagggcccatctgcccagcctctgagttttctgttctattttttttttaaccccaattatccttctctctctcctgcccccgcatcccactcccagggtgtcacgagccctgagctgcaatggcccgggcctgcagggcggggtaggggagggcaggggctgagccccgaagccagctcagtacctgaggggctgctctatgctgtgtatgcgcctctctggcatccgagacatcctcttggctggcgcttgctgcagggggggacccccccccgtccccaggtgaaccaagggtctgctccggggcccatttccagcttggccgccgtctgtgaccttgggcaagtcacttgacctctgtgtgcctcaacttcctcctctgtaaaacggggacagtccctgcccctccctacctcacaggcatgttgtgagaataaatgaggtaacgtgtaccaa

SEQ ID NO: 127305 - DNA, 839 bp, Homo sapiens
  Payload ID: 4915
  Gene Symbol: DLGAP4
  Gene Name: discs, large (Drosophila) homolog-associated protein 4
  ENST ID: ENST00000482872
  CDS Start-End: 700-839
gtacaaaaccggagcctcgggccgggctgcgtgagggaggagggctgtgtgaggcattgtgtaatcagccaggctctttcccgaccattgttctccaccaacaggcctggaagtcggaagccagtggagttctccctgtttcacaggttcatcatgcctagtggcgtataagaagaccccgccaccggtccctccacgcaccacttcaaagccgttcatctcagtcacagtccagagcagtactgagtctgcccaggacacctacctggacagccaggaccacaagagcgaggtgactagccagtcgggcctgagcaactcgtcggacagcctggacagcagtacccgaccgcccagcgtgacacggggtggagtcgccccagcccctgaggccccagagccacccccaaaacatgcagctctgaaaagtgaacaagggacgctgaccagctctgagtcccaccccgaggccgcccccaaaaggaaactgtcatcgataggaatacaagagaggactagaaggaacggttcccacctctcggaggacaacggacccaaagcgatcgatgtgatggcaccctcctcagagttgactgcattcagccagtgccaaaagaggagcccagtcccgctaccaaattccagtccatcggggttcaggtagaggacgactggcgaagcagcgtcccctctcacagtatgtcctcccgacgggacacagactcggatacccaggatgccaatgactcaagctgtaagtcatctgagaggagcctcccggactgtacccctcaccccaactccatcagcatcgatgccggtccccggcaggcccccaa

SEQ ID NO: 127306 - DNA, 794 bp, Homo sapiens
  Payload ID: 4915
  Gene Symbol: DLGAP4
  Gene Name: discs, large (Drosophila) homolog-associated protein 4
  ENST ID: ENST00000495241
  CDS Start-End: 418-794
ggagcctcgggccgggctgcgtgagggaggagggttcatcatgcctagtggcgtataagaagaccccgccaccggtccctccacgcaccacttcaaagccgttcatctcagtcacagtccagagcagtactgagtctgcccaggacacctacctggacagccaggaccacaagagcgaggtgactagccagtcgggcctgagcaactcgtcggacagcctggacagcagtacccgaccgcccagcgtgacacggggtggagtcgccccagcccctgaggccccagagccacccccaaaacatgcagctctgaaaagtgaacaagggacgctgaccagctctgagtcccaccccgaggccgcccccaaaaggaaactgtcatcgataggaatacaaaagcagcgtcccctctcacagtatgtcctcccgacgggacacagactcggatacccaggatgccaatgactcaagctgtaagtcatctgagaggagcctcccggactgtacccctcaccccaactccatcagcatcgatgccggtccccggcaggcccccaagattgcccagatcaagcgcaacctctcctatggagacaacagcgaccctgccctagaggcgtcctcgctgcccccacccgacccctggctcgagacctcctccagctccccagcagagccggcacagccaggggcctgccgccgagacggctactggttcctaaagctactgcaggcagaaacagagcggctggaaggctggtgctgccagatggacaaggagaccaaagagaacaa

SEQ ID NO: 127307 - DNA, 2973 bp, Homo sapiens
  Payload ID: 4916
  Gene Symbol: DLGAP5
  Gene Name: discs, large (Drosophila) homolog-associated protein 5
  Uniprot ID: Q15398
  ENST ID: ENST00000247191
  CDS Start-End: 218-2758
agcaaaccaatcgcaagcctcgttgagtggaaggggtgggatcttccccggaagtgttggttaaagcccctccaatcagcggctcggtgcggcaagtttgaatttcgtggaggctcgggttgtgagggttcctgcttcggagtcggcggtggtcgtccagaccgagtgttctttactttttgtttggttgaggtttcacgctagaaggtggctcaggatgtcttcatcacattttgccagtcgacacaggaaggatataagtactgaaatgattagaactaaaattgctcataggaaatcactgtctcagaaagaaaatagacataaggaatacgaacgaaatagacactttggtttgaaagatgtaaacattccaaccttggaaggtagaattcttgttgaattagatgagacatctcaagggcttgttccagaaaagaccaatgttaagccaagggcaatgaaaactattctaggtgatcaacgaaaacagatgctccaaaaatacaaagaagaaaagcaacttcaaaaattgaaagagcagagagagaaagctaaacgaggaatatttaaagtgggtcgttatagacctgatatgccttgttttcttttatcaaaccagaatgctgtgaaagctgagccaaaaaaggctattccatcttctgtacggattacaaggtcaaaggccaaagaccaaatggagcagactaagattgataacgagagtgatgttcgagcaatccgacctggtccaagacaaacttctgaaaagaaagtgtcagacaaagagaaaaaagttgtgcagcctgtaatgcccacgtcgttgagaatgactcgatcagctactcaagcagcaaagcaggttcccagaacagtctcatctaccacagcaagaaagccagtcacaagagctgctaatgaaaacgaaccagaaggaaaggtgccaagtaaaggaagacctgccaaaaatgtagaaacaaaacccgacaagggtatttcttgtaaagtcgatagtgaagaaaatactttgaattcacaaactaatgcaacaagtggaatgaatccagatggagtcttatcaaaaatggaaaacttacctgagataaatactgcaaaaataaaagggaagaattcctttgcacctaaggattttatgtttcagccactggatggtctgaagacctatcaagtaacacctatgactcccagaagtgccaatgcttttttgacacccagttacacctggactcctttaaaaacagaagttgatgagtctcaagcaacaaaagaaattttggcacaaaaatgtaaaacttactctaccaagacaatacagcaagattcaaataaattgccatgtcctttgggtcctctaactgtttggcatgaagaacatgttttaaataaaaatgaagctactactaaaaatttaaatggccttccaataaaagaagtcccatcacttgaaagaaatgaaggtcgaattgctcagccccaccatggtgtgccatatttcagaaatatcctccagtcagaaactgagaaattaacttcacattgcttcgagtgggacaggaaacttgaattggacattccagatgatgctaaagatcttattcgcacagcagttggtcaaacaagactccttatgaaggaaaggtttaaacagtttgaaggactggttgatgattgtgaatataaacgaggtataaaggagactacctgtacagatctggatggattttgggatatggttagttttcagatagaagatgtaatccacaaattcaacaatctgatcaaacttgaggaatctgggtggcaagtcaataataatatgaatcataatatgaacaaaaatgtctttaggaaaaaagttgtctcaggtatagcaagtaaaccaaaacaggatgatgctggaagaattgcagcgagaaatcgcctagctgccataaaaaatgcaatgagagagagaattaggcaggaagaatgtgctgaaacagcagtttctgtgataccaaaggaagttgataaaatagtgttcgatgctggatttttcagagttgaaagtcctgttaaattattctcaggactttctgtctcttctgaaggcccttctcaaagacttggaacacctaagtctgtcaacaaagctgtatctcagagtagaaatgagatgggcattccacaacaaactacatcaccagaaaatgccggtcctcagaatacgaaaagtgaacatgtgaagaagactttgtttttgagtattcctgaaagcaggagcagcatagaagatgctcagtgtcctggattaccagatttaattgaagaaaatcatgttgtaaataagacagacttgaaggtggattgtttatccagtgagagaatgagtttgcctcttcttgctggtggagtagcagatgatattaatactaacaaaaaagaaggaatttcagatgttgtggaaggaatggaactgaattcttcaattacatcacaggatgttttgatgagtagccctgaaaaaaatacagcttcacaaaatagcatcttagaagaaggggaaactaaaatttctcagtcagaactatttgataataaaagtctcactactgaatgccaccttcttgattcaccaggtctaaactgcagtaatccatttactcagctggagaggagacatcaagaacatgccagacacatttcttttggtggtaacctgattactttttcacctctacaaccaggagaattttgaatttaaaaataaatccaaacattttccttcatattatcaatgcttatatattccttagactattgaaattttggagaaaatgtatttgtgttcacttctatagcatataatgttttaatattctgtgttcatcaaagtgtattttagatatactctttctcaagggaagtggggatattttgtacattttcaacacagaataaaaaatgtactgt

SEQ ID NO: 127308 - DNA, 2954 bp, Homo sapiens
  Payload ID: 4916
  Gene Symbol: DLGAP5
  Gene Name: discs, large (Drosophila) homolog-associated protein 5
  Uniprot ID: Q15398
  ENST ID: ENST00000395425
  CDS Start-End: 84-2612
cttcggagtcggcggtggtcgtccagaccgagtgttctttactttttgtttggttgaggtttcacgctagaaggtggctcaggatgtcttcatcacattttgccagtcgacacaggaaggatataagtactgaaatgattagaactaaaattgctcataggaaatcactgtctcagaaagaaaatagacataaggaatacgaacgaaatagacactttggtttgaaagatgtaaacattccaaccttggaaggtagaattcttgttgaattagatgagacatctcaagggcttgttccagaaaagaccaatgttaagccaagggcaatgaaaactattctaggtgatcaacgaaaacagatgctccaaaaatacaaagaagaaaagcaacttcaaaaattgaaagagcagagagagaaagctaaacgaggaatatttaaagtgggtcgttatagacctgatatgccttgttttcttttatcaaaccagaatgctgtgaaagctgagccaaaaaaggctattccatcttctgtacggattacaaggtcaaaggccaaagaccaaatggagcagactaagattgataacgagagtgatgttcgagcaatccgacctggtccaagacaaacttctgaaaagaaagtgtcagacaaagagaaaaaagttgtgcagcctgtaatgcccacgtcgttgagaatgactcgatcagctactcaagcagcaaagcaggttcccagaacagtctcatctaccacagcaagaaagccagtcacaagagctgctaatgaaaacgaaccagaaggaaaggtgccaagtaaaggaagacctgccaaaaatgtagaaacaaaacccgacaagggtatttcttgtaaagtcgatagtgaagaaaatactttgaattcacaaactaatgcaacaagtggaatgaatccagatggagtcttatcaaaaatggaaaacttacctgagataaatactgcaaaaataaaagggaagaattcctttgcacctaaggattttatgtttcagccactggatggtctgaagacctatcaagtaacacctatgactcccagaagtgccaatgcttttttgacacccagttacacctggactcctttaaaaacagaagttgatgagtctcaagcaacaaaagaaattttggcacaaaaatgtaaaacttactctaccaagacaatacagcaagattcaaataaattgccatgtcctttgggtcctctaactgtttggcatgaagaacatgttttaaataaaaatgaagctactactaaaaatttaaatggccttccaataaaagaagtcccatcacttgaaagaaatgaaggtcgaattgctcagccccaccatggtgtgccatatttcagaaatatcctccagtcagaaactgagaaattaacttcacattgcttcgagtgggacaggaaacttgaattggacattccagatgatgctaaagatcttattcgcacagcagttggtcaaacaagactccttatgaaggaaaggtttaaacagtttgaaggactggttgatgattgtgaatataaacgaggtataaaggagactacctgtacagatctggatggattttgggatatggttagttttcagatagaagatgtaatccacaaattcaacaatctgatcaaacttgaggaatctgggtggcaagtcaataataatatgaatcataatatgaacaaaaatgtctttaggaaaaaagttgtctcaggtatagcaagtaaaccaaaacaggatgatgctggaagaattgcagcgagaaatcgcctagctgccataaaaaatgcaatgagagagagaattaggcaggaagaatgtgctgaaacagcagtttctgtgataccaaaggaagttgataaaatagtgttcgatgctggatttttcagagttgaaagtcctgttaaattattctcaggactttctgtctcttctgaaggcccttctcaaagacttggaacacctaagtctgtcaacaaagctgtatctcagagtagaaatgagatgggcattccacaacaaactacatcaccagaaaatgccggtcctcagaatacgaaaagtgaacatgtgaagaagactttgtttttgagtattcctgaaagcaggagcagcatagaagatgctcagtgtcctggattaccagatttaattgaagaaaatcatgttgtaaataagacagacttgaaggtggattgtttatccagtgagagaatgagtttgcctcttcttgctggtggagtagcagatgatattaatactaacaaaaaagaaggaatttcagatgttgtggaaggaatggaactgaattcttcaattacatcacaggatgttttgatgagtagccctgaaaaaaatacagcttcacaaaatagcatcttagaagaaggggaaactaaaatttctcagtcagaactatttgataataaaagtctcactactgaatgccaccttcttgattcagtgggatcttgctatgttgctcgggctggtcttgaagtcctgggttcaagtgatcctaccacctcagcctcccgagtagctgggactacagccaggtctaaactgcagtaatccatttactcagctggagaggagacatcaagaacatgccagacacatttcttttggtggtaacctgattactttttcacctctacaaccaggagaattttgaatttaaaaataaatccaaacattttccttcatattatcaatgcttatatattccttagactattgaaattttggagaaaatgtatttgtgttcacttctatagcatataatgttttaatattctgtgttcatcaaagtgtattttagatatactctttctcaagggaagtggggatattttgtacattttcaacacagaataaaaaatgtactgtgccttgcctctcttgtttaaaagg

SEQ ID NO: 127309 - DNA, 808 bp, Homo sapiens
  Payload ID: 4916
  Gene Symbol: DLGAP5
  Gene Name: discs, large (Drosophila) homolog-associated protein 5
  ENST ID: ENST00000557645
  CDS Start-End: 106-808
catggcaactaaaaacgcccggttgagaacctctagtcaagcaagattaacgcattctggactttcaagctggaggaaacgccactcagccaaacaaaatttaggatgtcttcatcacattttgccagtcgacacaggaaggatataagtactgaaatgattagaactaaaattgctcataggaaatcactgtctcagaaagaaaatagacataaggaatacgaacgaaatagacactttggtttgaaagatgtaaacattccaaccttggaaggtagaattcttgttgaattagatgagacatctcaagggcttgttccagaaaagaccaatgttaagccaagggcaatgaaaactattctaggtgatcaacgaaaacagatgctccaaaaatacaaagaagaaaagcaacttcaaaaattgaaagagcagagagagaaagctaaacgaggaatatttaaagtgggtcgttatagacctgatatgccttgttttcttttatcaaaccagaatgctgtgaaagctgagccaaaaaaggctattccatcttctgtacggattacaaggtcaaaggccaaagaccaaatggagcagactaagattgataacgagagtgatgttcgagcaatccgacctggtccaagacaaacttctgaaaagaaagtgtcagacaaagagaaaaaagttgtgcagcctgtaatgcccacgtcgttgagaatgactcgatcagctactcaagcagcaaagcaggttcccagaacagtctcatctaccacagcaagaaagccagtcacaagagctgctaatg

SEQ ID NO: 127310 - DNA, 641 bp, Homo sapiens
  Payload ID: 4916
  Gene Symbol: DLGAP5
  Gene Name: discs, large (Drosophila) homolog-associated protein 5
  ENST ID: ENST00000554067
  CDS Start-End: 256-588
tccaatcagcggctcggtgcggcaagtttgaatttcgtggaggctcgggttgtgagggttcctgcttcggagtcggcggtggtcgtccagaccgagtgttctttactttttgtttggttgaggtttcacgctagaaggtggctcaggtcccatggcaactaaaaacgcccggttgagaacctctagtcaagcaagattaacgcattctggactttcaagctggaggaaacgccactcagccaaacaaaatttaggatgtcttcatcacattttgccagtcgacacaggaaggatataagtactgaaatgattagaactaaaattgctcataggaaatcactgtctcagaaagaaaatagacataaggaatacgaacgaaatagacactttggtttgaaagatgtaaacattccaaccttggaaggtagaattcttgttgaattagatgagacatctcaagggcttgttccagaaaagaccaatgttaagccaagggcaatgaaaactattctaggtgatcaacgaaaacagatgctccaaaaatacaaagaagaaaagcaacttcaaaaattgaaagagcagagagagaaagctaaacgaggaatatttaaagtgggtcgttatagacctgatatgccttg

SEQ ID NO: 127311 - DNA, 5034 bp, Homo sapiens
  Payload ID: 4917
  Gene Symbol: DLG1
  Gene Name: discs, large homolog 1 (Drosophila)
  Uniprot ID: Q12959
  ENST ID: ENST00000346964
  CDS Start-End: 191-2971
gttggaaacggcactgctgagtgaggttgaggggtgtctcggtatgtgcgccttggatctggtgtaggcgaggtcacgcctctcttcagacagcccgagccttcccggcctggcgcgtttagttcggaactgcgggacgcgccggtgggctagggcaaggtgtgtgccctcttcctgattctggagaaaaatgccggtccggaagcaagatacccagagagcattgcaccttttggaggaatatcgttcaaaactaagccaaactgaagacagacagctcagaagttccatagaacgggttattaacatatttcagagcaacctctttcaggctttaatagatattcaagaattttatgaagtgaccttactggataatccaaaatgtatagatcgttcaaagccgtctgaaccaattcaacctgtgaatacttgggagatttccagccttccaagctctactgtgacttcagagacactgccaagcagccttagccctagtgtagagaaatacaggtatcaggatgaagatacacctcctcaagagcatatttccccacaaatcacaaatgaagtgataggtccagaattggttcatgtctcagagaagaacttatcagagattgagaatgtccatggatttgtttctcattctcatatttcaccaataaagccaacagaagctgttcttccctctcctcccactgtccctgtgatccctgtcctgccagtccctgctgagaatactgtcatcctacccaccataccacaggcaaatcctcccccagtactggtcaacacagatagcttggaaacaccaacttacgttaatggcacagatgcagattatgaatatgaagaaatcacacttgaaaggggaaattcagggcttggtttcagcattgcaggaggtacggacaacccacacattggagatgactcaagtattttcattaccaaaattatcacagggggagcagccgcccaagatggaagattgcgggtcaatgactgtatattacgagtaaatgaagtagatgttcgtgatgtaacacatagcaaagcagttgaagcgttgaaagaagcagggtctattgtacgcttgtatgtaaaaagaaggaaaccagtgtcagaaaaaataatggaaataaagctcattaaaggtcctaaaggtcttgggtttagcattgctggaggtgttggaaatcagcatattcctggggataatagcatctatgtaaccaaaataattgaaggaggtgcagcacataaggatggcaaacttcagattggagataaacttttagcagtgaataacgtatgtttagaagaagttactcatgaagaagcagtaactgccttaaagaacacatctgattttgtttatttgaaagtggcaaaacccacaagtatgtatatgaatgatggctatgcaccacctgatatcaccaactcttcttctcagcctgttgataaccatgttagcccatcttccttcttgggccagacaccagcatctccagccagatactccccagtttctaaagcagtacttggagatgatgaaattacaagggaacctagaaaagttgttcttcatcgtggctcaacgggccttggtttcaacattgtaggaggagaagatggagaaggaatatttatttcctttatcttagccggaggacctgctgatctaagtggagagctcagaaaaggagatcgtattatatcggtaaacagtgttgacctcagagctgctagtcatgagcaggcagcagctgcattgaaaaatgctggccaggctgtcacaattgttgcacaatatcgacctgaagaatacagtcgttttgaagctaaaatacatgatttacgggagcagatgatgaatagtagtattagttcagggtcaggttctcttcgaactagccagaagcgatccctctatgtcagagccctttttgattatgacaagactaaagacagtgggcttcccagtcagggactgaacttcaaatttggagatatcctccatgttattaatgcttctgatgatgaatggtggcaagccaggcaggttacaccagatggtgagagcgatgaggtcggagtgattcccagtaaacgcagagttgagaagaaagaacgagcccgattaaaaacagtgaaattcaattctaaaacgagagataaagggcagtcattcaatgacaagcgtaaaaagaacctcttttcccgaaaattccccttctacaagaacaaggaccagagtgagcaggaaacaagtgatgctgaccagcatgtaacttctaatgccagcgatagtgaaagtagttaccgtggtcaagaagaatacgtcttatcttatgaaccagtgaatcaacaagaagttaattatactcgaccagtgatcatattgggacctatgaaagacaggataaatgatgacttgatctcagaatttcctgacaaatttggatcctgtgttcctcatacaactagaccaaaacgagattatgaggtagatggaagagattatcattttgtgacttcaagagagcagatggaaaaagatatccaggaacataaattcattgaagctggccagtataacaatcatctatatggaacaagtgttcagtctgtacgagaagtagcagaaaagggcaaacactgtatccttgatgtgtctggaaatgccataaagagattacagattgcacagctttaccctatctccatttttattaaacccaaatccatggaaaatatcatggaaatgaataagcgtctaacagaagaacaagccagaaaaacatttgagagagccatgaaactggaacaggagtttactgaacatttcacagctattgtacagggggatacgctggaagacatttacaaccaagtgaaacagatcatagaagaacaatctggttcttacatctgggttccggcaaaagaaaagctatgaaaactcatgtttctctgtttctcttttccacaattccattttctttggcatctctttgccctttcctctggagtctttcttgagtactgatttcatgttgaattgtatcccacacatcatggtctgcagcttctttttcacatgtagtgtctccttcaagttacatcgtgtgtattatttaatgtcactattggttagtggccatttttcagaactgaagatggaatggcctgaccagctattaagaacgtggggagacgcagaaattgtggtaaaattccttaatgtttaagggaaagtaactttaagagatttttggaaaagctttatatacattcttttcaaatttcagtacaaatgaaaaagtggttttaatcagtgatttagtagactttgagcaactgtgcacgcttcagtttaatagcatggtttggccagtgtattactctcaagtccttttctcaatcaacttctatcatcaaagcaattgtttcattatagataaataaggacattttttaatttaaaaattcatgtctgagttgactttcataagggatttcattttttcctcaacattcttaaagccttttagtatttgacggttcttttttcccaggacatttgctaggaataacaacgtttcaatgtttttaatctacttgagcaacactatcgtgtcttacaaaagttgttcatatgtaaatgatcatcacatttcgtgaattgaggccatgttcaggtgctaaggaagttcgccttttacacagaagattgagaaaatttcctagatataaatacagataaatcagacgttacagtggtgacgtagtaaccatcatggcaatggaaaggagtccaattcatagcctaaaacttcaaatgtattcttaggagtcagattttactgaatattttacccacaatagctgcctattttgttataataaaatatatataaatatatatataaaactttctttaaactgtaactatgggaattattttctttacatagttgcgcacacacacaaacatatatatatatttaaaatatattttgtttcttttgccacctactcctaactttttgtttggtttttaaattaaatattaattgaatagacttatcttccttaatcatgtgaactgaaaatgggggcatggtggtcatgaggaggaaacatttagggaaattagattataagtaaaagtgtgggcatattctcctcttttctacaaaggttttcaaatggttcctgaggttttttgttgttgtccgtgttgttactgttgttcttgtcatcaggtttgattttggtccttgccctttccttctagttctccttttattaataggaaggcaggcaaaagccccatttatgtgtgtgttttcccctcagacagctttcatccactgctctgcactagaattgcacaaatcttcatggtgagcaattttaagaaatgttagtgaaaggtagaaattatttcacaaatcagtttctctggtccttcatattaataataatatttggcttcccattgctctttggagttgtttattaaatatgtgtttttgacaacctcctcattagtttcttaaatgagtactggtttgtaaagaattatcaacattatccattccatttatgaagaagaggagaacagctaataaactgtattgtaaaatccatatgttaagtgtgtcttgaattttgaaagaaaaaatatattttgcaagctaacattttcttgaaacaatttgaggcatcatgtaacttataaccgaatccaagagccgttaggcagcagagtgtgttaccacattgaaatacacagtgctgctgttagactaaatgtcgtaggttgttaaccacatagaaacacactagtatgaagaaaactgttgtaaaatctcaagagcttcagaaactgccttacaagaccgcagcataagctattttgaagtatttaccaaatagtcacatgttgtaaaatatcaagtggttataaaaggatgccatttatatattaaaatttacataacattgttttctgga

SEQ ID NO: 127312 - DNA, 4931 bp, Homo sapiens
  Payload ID: 4917
  Gene Symbol: DLG1
  Gene Name: discs, large homolog 1 (Drosophila)
  ENST ID: ENST00000357674
  CDS Start-End: 191-2869
gttggaaacggcactgctgagtgaggttgaggggtgtctcggtatgtgcgccttggatctggtgtaggcgaggtcacgcctctcttcagacagcccgagccttcccggcctggcgcgtttagttcggaactgcgggacgcgccggtgggctagggcaaggtgtgtgccctcttcctgattctggagaaaaatgccggtccggaagcaagatacccagagagcattgcaccttttggaggaatatcgttcaaaactaagccaaactgaagacagacagctcagaagttccatagaacgggttattaacatatttcagagcaacctctttcaggctttaatagatattcaagaattttatgaagtgaccttactggataatccaaaatgtatagatcgttcaaagccgtctgaaccaattcaacctgtgaatacttgggagatttccagccttccaagctctactgtgacttcagagacactgccaagcagccttagccctagtgtagagaaatacaggtatcaggatgaagatacacctcctcaagagcatatttccccacaaatcacaaatgaagtgataggtccagaattggttcatgtctcagagaagaacttatcagagattgagaatgtccatggatttgtttctcattctcatatttcaccaataaaggcaaatcctcccccagtactggtcaacacagatagcttggaaacaccaacttacgttaatggcacagatgcagattatgaatatgaagaaatcacacttgaaaggggaaattcagggcttggtttcagcattgcaggaggtacggacaacccacacattggagatgactcaagtattttcattaccaaaattatcacagggggagcagccgcccaagatggaagattgcgggtcaatgactgtatattacgagtaaatgaagtagatgttcgtgatgtaacacatagcaaagcagttgaagcgttgaaagaagcagggtctattgtacgcttgtatgtaaaaagaaggaaaccagtgtcagaaaaaataatggaaataaagctcattaaaggtcctaaaggtcttgggtttagcattgctggaggtgttggaaatcagcatattcctggggataatagcatctatgtaaccaaaataattgaaggaggtgcagcacataaggatggcaaacttcagattggagataaacttttagcagtgaataacgtatgtttagaagaagttactcatgaagaagcagtaactgccttaaagaacacatctgattttgtttatttgaaagtggcaaaacccacaagtatgtatatgaatgatggctatgcaccacctgatatcaccaactcttcttctcagcctgttgataaccatgttagcccatcttccttcttgggccagacaccagcatctccagccagatactccccagtttctaaagcagtacttggagatgatgaaattacaagggaacctagaaaagttgttcttcatcgtggctcaacgggccttggtttcaacattgtaggaggagaagatggagaaggaatatttatttcctttatcttagccggaggacctgctgatctaagtggagagctcagaaaaggagatcgtattatatcggtaaacagtgttgacctcagagctgctagtcatgagcaggcagcagctgcattgaaaaatgctggccaggctgtcacaattgttgcacaatatcgacctgaagaatacagtcgttttgaagctaaaatacatgatttacgggagcagatgatgaatagtagtattagttcagggtcaggttctcttcgaactagccagaagcgatccctctatgtcagagccctttttgattatgacaagactaaagacagtgggcttcccagtcagggactgaacttcaaatttggagatatcctccatgttattaatgcttctgatgatgaatggtggcaagccaggcaggttacaccagatggtgagagcgatgaggtcggagtgattcccagtaaacgcagagttgagaagaaagaacgagcccgattaaaaacagtgaaattcaattctaaaacgagagataaagggtcattcaatgacaagcgtaaaaagaacctcttttcccgaaaattccccttctacaagaacaaggaccagagtgagcaggaaacaagtgatgctgaccagcatgtaacttctaatgccagcgatagtgaaagtagttaccgtggtcaagaagaatacgtcttatcttatgaaccagtgaatcaacaagaagttaattatactcgaccagtgatcatattgggacctatgaaagacaggataaatgatgacttgatctcagaatttcctgacaaatttggatcctgtgttcctcatacaactagaccaaaacgagattatgaggtagatggaagagattatcattttgtgacttcaagagagcagatggaaaaagatatccaggaacataaattcattgaagctggccagtataacaatcatctatatggaacaagtgttcagtctgtacgagaagtagcagaaaagggcaaacactgtatccttgatgtgtctggaaatgccataaagagattacagattgcacagctttaccctatctccatttttattaaacccaaatccatggaaaatatcatggaaatgaataagcgtctaacagaagaacaagccagaaaaacatttgagagagccatgaaactggaacaggagtttactgaacatttcacagctattgtacagggggatacgctggaagacatttacaaccaagtgaaacagatcatagaagaacaatctggttcttacatctgggttccggcaaaagaaaagctatgaaaactcatgtttctctgtttctcttttccacaattccattttctttggcatctctttgccctttcctctggagtctttcttgagtactgatttcatgttgaattgtatcccacacatcatggtctgcagcttctttttcacatgtagtgtctccttcaagttacatcgtgtgtattatttaatgtcactattggttagtggccatttttcagaactgaagatggaatggcctgaccagctattaagaacgtggggagacgcagaaattgtggtaaaattccttaatgtttaagggaaagtaactttaagagatttttggaaaagctttatatacattcttttcaaatttcagtacaaatgaaaaagtggttttaatcagtgatttagtagactttgagcaactgtgcacgcttcagtttaatagcatggtttggccagtgtattactctcaagtccttttctcaatcaacttctatcatcaaagcaattgtttcattatagataaataaggacattttttaatttaaaaattcatgtctgagttgactttcataagggatttcattttttcctcaacattcttaaagccttttagtatttgacggttcttttttcccaggacatttgctaggaataacaacgtttcaatgtttttaatctacttgagcaacactatcgtgtcttacaaaagttgttcatatgtaaatgatcatcacatttcgtgaattgaggccatgttcaggtgctaaggaagttcgccttttacacagaagattgagaaaatttcctagatataaatacagataaatcagacgttacagtggtgacgtagtaaccatcatggcaatggaaaggagtccaattcatagcctaaaacttcaaatgtattcttaggagtcagattttactgaatattttacccacaatagctgcctattttgttataataaaatatatataaatatatatataaaactttctttaaactgtaactatgggaattattttctttacatagttgcgcacacacacaaacatatatatatatttaaaatatattttgtttcttttgccacctactcctaactttttgtttggtttttaaattaaatattaattgaatagacttatcttccttaatcatgtgaactgaaaatgggggcatggtggtcatgaggaggaaacatttagggaaattagattataagtaaaagtgtgggcatattctcctcttttctacaaaggttttcaaatggttcctgaggttttttgttgttgtccgtgttgttactgttgttcttgtcatcaggtttgattttggtccttgccctttccttctagttctccttttattaataggaaggcaggcaaaagccccatttatgtgtgtgttttcccctcagacagctttcatccactgctctgcactagaattgcacaaatcttcatggtgagcaattttaagaaatgttagtgaaaggtagaaattatttcacaaatcagtttctctggtccttcatattaataataatatttggcttcccattgctctttggagttgtttattaaatatgtgtttttgacaacctcctcattagtttcttaaatgagtactggtttgtaaagaattatcaacattatccattccatttatgaagaagaggagaacagctaataaactgtattgtaaaatccatatgttaagtgtgtcttgaattttgaaagaaaaaatatattttgcaagctaacattttcttgaaacaatttgaggcatcatgtaacttataaccgaatccaagagccgttaggcagcagagtgtgttaccacattgaaatacacagtgctgctgttagactaaatgtcgtaggttgttaaccacatagaaacacactagtatgaagaaaactgttgtaaaatctcaagagcttcagaaactgccttacaagaccgcagcataagctattttgaagtatttaccaaatagtcacatgttgtaaaatatcaagtggttataaaaggatgccatttatatattaaaatttacataacattgttttctgg

SEQ ID NO: 127313 - DNA, 716 bp, Homo sapiens
  Payload ID: 4917
  Gene Symbol: DLG1
  Gene Name: discs, large homolog 1 (Drosophila)
  ENST ID: ENST00000392380
  CDS Start-End: 93-716
gcggccgctgccctgtccggcccccgctggagcagcccggaggcagcgagcaaggagaaaggtgtgtgccctcttcctgattctggagaaaaatgccggtccggaagcaagatacccagagagcattgcaccttttggaggaatatcgttcaaaactaagccaaactgaagacagacagctcagaagttccatagaacgggttattaacatatttcagagcaacctctttcaggctttaatagatattcaagaattttatgaagtgaccttactggataatccaaaatgtatagatcgttcaaagccgtctgaaccaattcaacctgtgaatacttgggagatttccagccttccaagctctactgtgacttcagagacactgccaagcagccttagccctagtgtagagaaatacaggtatcaggatgaagatacacctcctcaagagcatatttccccacaaatcacaaatgaagtgataggtccagaattggttcatgtctcagagaagaacttatcagagattgagaatgtccatggatttgtttctcattctcatatttcaccaataaagccaacagaagctgttcttccctctcctcccactgtccctgtgatccctgtcctgccagtccctgctgagaatactgtcatcctacccaccataccacaggcaaatcctcccccagtactggtcaacacagatagcttggaa

SEQ ID NO: 127314 - DNA, 2833 bp, Homo sapiens
  Payload ID: 4917
  Gene Symbol: DLG1
  Gene Name: discs, large homolog 1 (Drosophila)
  ENST ID: ENST00000392381
  CDS Start-End: 475-2451
ggcggaaagtttcgggggagagcggttgggggcgcggaaggaggcgaggttccgggggtggggcgtgcggcagcaactgggcgagcgggccggggggccgcggcgagcgaggaggcggcgcggccgagaaggaggacgaggccgcgggggtgcggcggcccaggggagctcctcccccgtcccttcgccccctccgctcggctccgcgggccccgggcggggcgggggtacgtggagcggggccgggctggggagctgctccgagtctggccggggcgcaccccagttccgagcgcacgccgctcaccggaactttgtggcggcgccgcaggtgtgggggcccgcggaggtgtgcatgcggggcgcgagggcgtcgcggagagcggccgctgccctgtccggcccccgctggagcagcccggaggcagcgagcaaggagaaaggtgtgtgccctcttcctgattctggagaaaaatgccggtccggaagcaagatacccagagagcattgcaccttttggaggaatatcgttcaaaactaagccaaactgaagacagacagctcagaagttccatagaacgggttattaacatatttcagagcaacctctttcaggctttaatagatattcaagaattttatgaagtgaccttactggataatccaaaatgtatagatcgttcaaagccgtctgaaccaattcaacctgtgaatacttgggagatttccagccttccaagctctactgtgacttcagagacactgccaagcagccttagccctagtgtagagaaatacaggtatcaggatgaagatacacctcctcaagagcatatttccccacaaatcacaaatgaagtgataggtccagaattggttcatgtctcagagaagaacttatcagagattgagaatgtccatggatttgtttctcattctcatatttcaccaataaagccaacagaagctgttcttccctctcctcccactgtccctgtgatccctgtcctgccagtccctgctgagaatactgtcatcctacccaccataccacaggcaaatcctcccccagtactggtcaacacagatagcttggaaacaccaacttacgttaatggcacagatgcagattatgaatatgaagaaatcacacttgaaaggggaaattcagggcttggtttcagcattgcaggaggtacggacaacccacacattggagatgactcaagtattttcattaccaaaattatcacagggggagcagccgcccaagatggaagattgcgggtcaatgactgtatattacgagtaaatgaagtagatgttcgtgatgtaacacatagcaaagcagttgaagcgttgaaagaagcagggtctattgtacgcttgtatgtaaaaagaaggaaaccagtgtcagaaaaaataatggaaataaagctcattaaaggtcctaaaggtcttgggtttagcattgctggaggtgttggaaatcagcatattcctggggataatagcatctatgtaaccaaaataattgaaggaggtgcagcacataaggatggcaaacttcagattggagataaacttttagcagtgaataacgtatgtttagaagaagttactcatgaagaagcagtaactgccttaaagaacacatctgattttgtttatttgaaagtggcaaaacccacaagtatgtatatgaatgatggctatgcaccacctgatatcaccaactcttcttctcagcctgttgataaccatgttagcccatcttccttcttgggccagacaccagcatctccagccagatactccccagtttctaaagcagtacttggagatgatgaaattacaagggaacctagaaaagttgttcttcatcgtggctcaacgggccttggtttcaacattgtaggaggagaagatggagaaggaatatttatttcctttatcttagccggaggacctgctgatctaagtggagagctcagaaaaggagatcgtattatatcggtaaacagtgttgacctcagagctgctagtcatgagcaggcagcagctgcattgaaaaatgctggccaggctgtcacaattgttgcacaatatcgacctgaagaatacagtcgttttgaagctaaaatacatgatttacgggagcagatgatgaatagtagtattagttcagggtcaggttctcttcgaactagccagaagcgatccctctatgtcagagccctttttgattatgacaagactaaagacagtgggcttcccagtcagggactgaacttcaaatttggagatatcctccatgttattaatgcttctgatgatgaatggtggcaagccaggcaggttacaccagatggtgagagcgatgaggtcggagtgattcccagtaaacgcaggtatgcctgtttcttaccacttgaatgtgaggcaacataaataattgatgttcttttaaattttttttaatttgtgacaacatggatggacctggagtgcattattctaattgaaaaaagccagacacagaaagacaaaaatcgtatgatcacatttttatgtgaaatctaaagtagtcgaagtcatacagagaagaatggtggttaccaggggttaggaggatggggaaatgagatacaaagtttccgtgacacaagatgagtgagttctgcacctccaacatagttgagaagaaagaacgagcccgattaaaaacagtgaaattcaattctaaaacgagagataaagggttcctcagagccttcaaactttaagattgaaatcaagacagtctgcttggctaatgaactgtgaacttatt

SEQ ID NO: 127315 - DNA, 2690 bp, Homo sapiens
  Payload ID: 4917
  Gene Symbol: DLG1
  Gene Name: discs, large homolog 1 (Drosophila)
  Uniprot ID: Q12959
  ENST ID: ENST00000392382
  CDS Start-End: 75-2690
ggcggaaagtttcgggggagagcggttgggggcgcggaaggaggtgtgtgccctcttcctgattctggagaaaaatgccggtccggaagcaagatacccagagagcattgcaccttttggaggaatatcgttcaaaactaagccaaactgaagacagacagctcagaagttccatagaacgggttattaacatatttcagagcaacctctttcaggctttaatagatattcaagaattttatgaagtgaccttactggataatccaaaatgtatagatcgttcaaagccgtctgaaccaattcaacctgtgaatacttgggagatttccagccttccaagctctactgtgacttcagagacactgccaagcagccttagccctagtgtagagaaatacaggtatcaggatgaagatacacctcctcaagagcatatttccccacaaatcacaaatgaagtgataggtccagaattggttcatgtctcagagaagaacttatcagagattgagaatgtccatggatttgtttctcattctcatatttcaccaataaaggcaaatcctcccccagtactggtcaacacagatagcttggaaacaccaacttacgttaatggcacagatgcagattatgaatatgaagaaatcacacttgaaaggggaaattcagggcttggtttcagcattgcaggaggtacggacaacccacacattggagatgactcaagtattttcattaccaaaattatcacagggggagcagccgcccaagatggaagattgcgggtcaatgactgtatattacgagtaaatgaagtagatgttcgtgatgtaacacatagcaaagcagttgaagcgttgaaagaagcagggtctattgtacgcttgtatgtaaaaagaaggaaaccagtgtcagaaaaaataatggaaataaagctcattaaaggtcctaaaggtcttgggtttagcattgctggaggtgttggaaatcagcatattcctggggataatagcatctatgtaaccaaaataattgaaggaggtgcagcacataaggatggcaaacttcagattggagataaacttttagcagtgaataacgtatgtttagaagaagttactcatgaagaagcagtaactgccttaaagaacacatctgattttgtttatttgaaagtggcaaaacccacaagtatgtatatgaatgatggctatgcaccacctgatatcaccaactcttcttctcagcctgttgataaccatgttagcccatcttccttcttgggccagacaccagcatctccagccagatactccccagtttctaaagcagtacttggagatgatgaaattacaagggaacctagaaaagttgttcttcatcgtggctcaacgggccttggtttcaacattgtaggaggagaagatggagaaggaatatttatttcctttatcttagccggaggacctgctgatctaagtggagagctcagaaaaggagatcgtattatatcggtaaacagtgttgacctcagagctgctagtcatgagcaggcagcagctgcattgaaaaatgctggccaggctgtcacaattgttgcacaatatcgacctgaagaatacagtcgttttgaagctaaaatacatgatttacgggagcagatgatgaatagtagtattagttcagggtcaggttctcttcgaactagccagaagcgatccctctatgtcagagccctttttgattatgacaagactaaagacagtgggcttcccagtcagggactgaacttcaaatttggagatatcctccatgttattaatgcttctgatgatgaatggtggcaagccaggcaggttacaccagatggtgagagcgatgaggtcggagtgattcccagtaaacgcagagttgagaagaaagaacgagcccgattaaaaacagtgaaattcaattctaaaacgagagataaaggggagatccctgacgacatgggatcaaaaggcctgaagcatgtaacttctaatgccagcgatagtgaaagtagttaccgtggtcaagaagaatacgtcttatcttatgaaccagtgaatcaacaagaagttaattatactcgaccagtgatcatattgggacctatgaaagacaggataaatgatgacttgatctcagaatttcctgacaaatttggatcctgtgttcctcatacaactagaccaaaacgagattatgaggtagatggaagagattatcattttgtgacttcaagagagcagatggaaaaagatatccaggaacataaattcattgaagctggccagtataacaatcatctatatggaacaagtgttcagtctgtacgagaagtagcagaaaagggcaaacactgtatccttgatgtgtctggaaatgccataaagagattacagattgcacagctttaccctatctccatttttattaaacccaaatccatggaaaatatcatggaaatgaataagcgtctaacagaagaacaagccagaaaaacatttgagagagccatgaaactggaacaggagtttactgaacatttcacagctattgtacagggggatacgctggaagacatttacaaccaagtgaaacagatcatagaagaacaatctggttcttacatctgggttccggcaaaagaaaagctatga

SEQ ID NO: 127316 - DNA, 710 bp, Homo sapiens
  Payload ID: 4917
  Gene Symbol: DLG1
  Gene Name: discs, large homolog 1 (Drosophila)
  ENST ID: ENST00000412364
  CDS Start-End: 393-710
ctggctcaggggccaagggtcggagcgcttcacccgcccgtacccagtagcaggtggggagtgtggatacttgtgcgggggaagaggcggcctcaggtctaggctctttggggaggggacgctttcgaggagagtttggaagccgacttctgtctgttcttaatttggaggggtacccactccaaggaaaagctttccacgttgacagacaactgctgcgttttgagactctttctttgacttggtaaaactttggaacgtggggttttcaaataggctgcgagggttttctatttcgataggggaaaatgctagtttaacatgattctatcctttttcctttccgttgtgtgttttaaaggtgtgtgccctcttcctgattctggagaaaaatgccggtccggaagcaagatacccagagagcattgcaccttttggaggaatatcgttcaaaactaagccaaactgaagacagacagctcagaagttccatagaacgggttattaacatatttcagagcaacctctttcaggctttaatagatattcaagaattttatgaagtgaccttactggataatccaaaatgtatagatcgttcaaagccgtctgaaccaattcaacctgtgaatacttgggagatttccagccttccaagctctactgtgacttcagagacactgccaagcagccttagccctagtgtagag

SEQ ID NO: 127317 - DNA, 2977 bp, Homo sapiens
  Payload ID: 4917
  Gene Symbol: DLG1
  Gene Name: discs, large homolog 1 (Drosophila)
  Uniprot ID: Q12959
  ENST ID: ENST00000448528
  CDS Start-End: 191-2905
gttggaaacggcactgctgagtgaggttgaggggtgtctcggtatgtgcgccttggatctggtgtaggcgaggtcacgcctctcttcagacagcccgagccttcccggcctggcgcgtttagttcggaactgcgggacgcgccggtgggctagggcaaggtgtgtgccctcttcctgattctggagaaaaatgccggtccggaagcaagatacccagagagcattgcaccttttggaggaatatcgttcaaaactaagccaaactgaagacagacagctcagaagttccatagaacgggttattaacatatttcagagcaacctctttcaggctttaatagatattcaagaattttatgaagtgaccttactggataatccaaaatgtatagatcgttcaaagccgtctgaaccaattcaacctgtgaatacttgggagatttccagccttccaagctctactgtgacttcagagacactgccaagcagccttagccctagtgtagagaaatacaggtatcaggatgaagatacacctcctcaagagcatatttccccacaaatcacaaatgaagtgataggtccagaattggttcatgtctcagagaagaacttatcagagattgagaatgtccatggatttgtttctcattctcatatttcaccaataaagccaacagaagctgttcttccctctcctcccactgtccctgtgatccctgtcctgccagtccctgctgagaatactgtcatcctacccaccataccacaggcaaatcctcccccagtactggtcaacacagatagcttggaaacaccaacttacgttaatggcacagatgcagattatgaatatgaagaaatcacacttgaaaggggaaattcagggcttggtttcagcattgcaggaggtacggacaacccacacattggagatgactcaagtattttcattaccaaaattatcacagggggagcagccgcccaagatggaagattgcgggtcaatgactgtatattacgagtaaatgaagtagatgttcgtgatgtaacacatagcaaagcagttgaagcgttgaaagaagcagggtctattgtacgcttgtatgtaaaaagaaggaaaccagtgtcagaaaaaataatggaaataaagctcattaaaggtcctaaaggtcttgggtttagcattgctggaggtgttggaaatcagcatattcctggggataatagcatctatgtaaccaaaataattgaaggaggtgcagcacataaggatggcaaacttcagattggagataaacttttagcagtgaataacgtatgtttagaagaagttactcatgaagaagcagtaactgccttaaagaacacatctgattttgtttatttgaaagtggcaaaacccacaagtatgtatatgaatgatggctatgcaccacctgatatcaccaactcttcttctcagcctgttgataaccatgttagcccatcttccttcttgggccagacaccagcatctccagccagatactccccagtttctaaagcagtacttggagatgatgaaattacaagggaacctagaaaagttgttcttcatcgtggctcaacgggccttggtttcaacattgtaggaggagaagatggagaaggaatatttatttcctttatcttagccggaggacctgctgatctaagtggagagctcagaaaaggagatcgtattatatcggtaaacagtgttgacctcagagctgctagtcatgagcaggcagcagctgcattgaaaaatgctggccaggctgtcacaattgttgcacaatatcgacctgaagaatacagtcgttttgaagctaaaatacatgatttacgggagcagatgatgaatagtagtattagttcagggtcaggttctcttcgaactagccagaagcgatccctctatgtcagagccctttttgattatgacaagactaaagacagtgggcttcccagtcagggactgaacttcaaatttggagatatcctccatgttattaatgcttctgatgatgaatggtggcaagccaggcaggttacaccagatggtgagagcgatgaggtcggagtgattcccagtaaacgcagagttgagaagaaagaacgagcccgattaaaaacagtgaaattcaattctaaaacgagagataaaggggagatccctgacgacatgggatcaaaaggcctgaagcatgtaacttctaatgccagcgatagtgaaagtagttaccgtggtcaagaagaatacgtcttatcttatgaaccagtgaatcaacaagaagttaattatactcgaccagtgatcatattgggacctatgaaagacaggataaatgatgacttgatctcagaatttcctgacaaatttggatcctgtgttcctcatacaactagaccaaaacgagattatgaggtagatggaagagattatcattttgtgacttcaagagagcagatggaaaaagatatccaggaacataaattcattgaagctggccagtataacaatcatctatatggaacaagtgttcagtctgtacgagaagtagcagaaaagggcaaacactgtatccttgatgtgtctggaaatgccataaagagattacagattgcacagctttaccctatctccatttttattaaacccaaatccatggaaaatatcatggaaatgaataagcgtctaacagaagaacaagccagaaaaacatttgagagagccatgaaactggaacaggagtttactgaacatttcacagctattgtacagggggatacgctggaagacatttacaaccaagtgaaacagatcatagaagaacaatctggttcttacatctgggttccggcaaaagaaaagctatgaaaactcatgtttctctgtttctcttttccacaattccattttctttggcatctctttgccctttcctctgga

SEQ ID NO: 127318 - DNA, 543 bp, Homo sapiens
  Payload ID: 4917
  Gene Symbol: DLG1
  Gene Name: discs, large homolog 1 (Drosophila)
  ENST ID: ENST00000436682
  CDS Start-End: 174-543
agcaaggagaaaggcaagcgagaggagggggcccgagcagggcgggcggccagtcccgctggtcccctctcagcgctctgcggccgctgctggctcaggggccaagggtcggagcgcttcacccgcccgtacccagtagcaggtgtgtgccctcttcctgattctggagaaaaatgccggtccggaagcaagatacccagagagcattgcaccttttggaggaatatcgttcaaaactaagccaaactgaagacagacagctcagaagttccatagaacgggttattaacatatttcagagcaacctctttcaggctttaatagatattcaagaattttatgaagtgaccttactggataatccaaaatgtatagatcgttcaaagccgtctgaaccaattcaacctgtgaatacttgggagatttccagccttccaagctctactgtgacttcagagacactgccaagcagccttagccctagtgtagagaaatacaggtatcaggatgaagatacacctcctcaagagcatatttccccac

SEQ ID NO: 127319 - DNA, 629 bp, Homo sapiens
  Payload ID: 4917
  Gene Symbol: DLG1
  Gene Name: discs, large homolog 1 (Drosophila)
  ENST ID: ENST00000456699
  CDS Start-End: 93-629
gcggccgctgccctgtccggcccccgctggagcagcccggaggcagcgagcaaggagaaaggtgtgtgccctcttcctgattctggagaaaaatgccggtccggaagcaagatacccagagagcattgcaccttttggaggaatatcgttcaaaactaagccaaactgaagacagacagctcagaagttccatagaacgggttattaacatatttcagagcaacctctttcaggctttaatagatattcaagaattttatgaagtgaccttactggataatccaaaatgtatagatcgttcaaagccgtctgaaccaattcaacctgtgaatacttgggagatttccagccttccaagctctactgtgacttcagagacactgccaagcagccttagccctagtgtagagaaatacaggtatcaggatgaagatacacctcctcaagagcatatttccccacaaatcacaaatgaagtgataggtccagaattggttcatgtctcagagaagaacttatcagagattgagaatgtccatggatttgtttctcattctcatatttcaccaataaaggcaaatcctcccccagtactggtcaacacagatagcttggaaacaccaacttac

SEQ ID NO: 127320 - DNA, 2516 bp, Homo sapiens
  Payload ID: 4917
  Gene Symbol: DLG1
  Gene Name: discs, large homolog 1 (Drosophila)
  Uniprot ID: Q12959
  ENST ID: ENST00000443183
  CDS Start-End: 51-2453
agctggtagagaagtaagcctgcttggcaaccacctgcagggctgcagagatgaattacattttcggaaacaacacacttctatactctcgcggcagtcgaggaggcaatactagctctagccatggctcagcaggcccaaagcagaaacactgggcaaaaaagggctcgtcagatgaactgcaagctgagccagaaccttcacgctggcagcagatagttgcatttttcactcgaagacacagctttattgactgcatctcggtagccaccagctccacccaggcaaatcctcccccagtactggtcaacacagatagcttggaaacaccaacttacgttaatggcacagatgcagattatgaatatgaagaaatcacacttgaaaggggaaattcagggcttggtttcagcattgcaggaggtacggacaacccacacattggagatgactcaagtattttcattaccaaaattatcacagggggagcagccgcccaagatggaagattgcgggtcaatgactgtatattacgagtaaatgaagtagatgttcgtgatgtaacacatagcaaagcagttgaagcgttgaaagaagcagggtctattgtacgcttgtatgtaaaaagaaggaaaccagtgtcagaaaaaataatggaaataaagctcattaaaggtcctaaaggtcttgggtttagcattgctggaggtgttggaaatcagcatattcctggggataatagcatctatgtaaccaaaataattgaaggaggtgcagcacataaggatggcaaacttcagattggagataaacttttagcagtgaataacgtatgtttagaagaagttactcatgaagaagcagtaactgccttaaagaacacatctgattttgtttatttgaaagtggcaaaacccacaagtatgtatatgaatgatggctatgcaccacctgatatcaccaactcttcttctcagcctgttgataaccatgttagcccatcttccttcttgggccagacaccagcatctccagccagatactccccagtttctaaagcagtacttggagatgatgaaattacaagggaacctagaaaagttgttcttcatcgtggctcaacgggccttggtttcaacattgtaggaggagaagatggagaaggaatatttatttcctttatcttagccggaggacctgctgatctaagtggagagctcagaaaaggagatcgtattatatcggtaaacagtgttgacctcagagctgctagtcatgagcaggcagcagctgcattgaaaaatgctggccaggctgtcacaattgttgcacaatatcgacctgaagaatacagtcgttttgaagctaaaatacatgatttacgggagcagatgatgaatagtagtattagttcagggtcaggttctcttcgaactagccagaagcgatccctctatgtcagagccctttttgattatgacaagactaaagacagtgggcttcccagtcagggactgaacttcaaatttggagatatcctccatgttattaatgcttctgatgatgaatggtggcaagccaggcaggttacaccagatggtgagagcgatgaggtcggagtgattcccagtaaacgcagagttgagaagaaagaacgagcccgattaaaaacagtgaaattcaattctaaaacgagagataaaggggagatccctgacgacatgggatcaaaaggcctgaagcatgtaacttctaatgccagcgatagtgaaagtagttacctaatcttgattacagatgagtatggctgctcaaaaggtggtcaagaagaatacgtcttatcttatgaaccagtgaatcaacaagaagttaattatactcgaccagtgatcatattgggacctatgaaagacaggataaatgatgacttgatctcagaatttcctgacaaatttggatcctgtgttcctcatacaactagaccaaaacgagattatgaggtagatggaagagattatcattttgtgacttcaagagagcagatggaaaaagatatccaggaacataaattcattgaagctggccagtataacaatcatctatatggaacaagtgttcagtctgtacgagaagtagcagaaaagggcaaacactgtatccttgatgtgtctggaaatgccataaagagattacagattgcacagctttaccctatctccatttttattaaacccaaatccatggaaaatatcatggaaatgaataagcgtctaacagaagaacaagccagaaaaacatttgagagagccatgaaactggaacaggagtttactgaacatttcacagctattgtacagggggatacgctggaagacatttacaaccaagtgaaacagatcatagaagaacaatctggttcttacatctgggttccggcaaaagaaaagctatgaaaactcatgtttctctgtttctcttttccacaattccattttctttggcatctctttgccctt

SEQ ID NO: 127321 - DNA, 1771 bp, Homo sapiens
  Payload ID: 4917
  Gene Symbol: DLG1
  Gene Name: discs, large homolog 1 (Drosophila)
  ENST ID: ENST00000419227
  CDS Start-End: 191-1303
gttggaaacggcactgctgagtgaggttgaggggtgtctcggtatgtgcgccttggatctggtgtaggcgaggtcacgcctctcttcagacagcccgagccttcccggcctggcgcgtttagttcggaactgcgggacgcgccggtgggctagggcaaggtgtgtgccctcttcctgattctggagaaaaatgccggtccggaagcaagatacccagagagcattgcaccttttggaggaatatcgttcaaaactaagccaaactgaagacagacagctcagaagttccatagaacgggttattaacatatttcagagcaacctctttcaggctttaatagatattcaagaattttatgaagtgaccttactggataatccaaaatgtatagatcgttcaaagccgtctgaaccaattcaacctgtgaatacttgggagatttccagccttccaagctctactgtgacttcagagacactgccaagcagccttagccctagtgtagagaaatacaggtatcaggatgaagatacacctcctcaagagcatatttccccacaaatcacaaatgaagtgataggtccagaattggttcatgtctcagagaagaacttatcagagattgagaatgtccatggatttgtttctcattctcatatttcaccaataaaggttaatggcacagatgcagattatgaatatgaagaaatcacacttgaaaggggaaattcagggcttggtttcagcattgcaggaggtacggacaacccacacattggagatgactcaagtattttcattaccaaaattatcacagggggagcagccgcccaagatggaagattgcgggtcaatgactgtatattacgagtaaatgaagtagatgttcgtgatgtaacacatagcaaagcagttgaagcgttgaaagaagcagggtctattgtacgcttgtatgtaaaaagaaggaaaccagtgtcagaaaaaataatggaaataaagctcattaaaggtcctaaaggtcttgggtttagcattgctggaggtgttggaaatcagcatattcctggggataatagcatctatgtaaccaaaataattgaaggaggtgcagcacataaggatggcaaacttcagattggagataaacttttagcagtgaataacgtatgtttagaagaagttactcatgaagaagcagtaactgccttaaagaacacatctgattttgtttatttgaaagtggcaaaacccacaagtatgtatatgaatgatggctatgcaccacctgatatcaccaactaatacagtcgttttgaagctaaaatacatgatttacgggagcagatgatgaatagtagtattagttcagggtcaggttctcttcgaactagccagaagcgatccctctatgtcagagccctttttgattatgacaagactaaagacagtgggcttcccagtcagggactgaacttcaaatttggagatatcctccatgttattaatgcttctgatgatgaatggtggcaagccaggcaggttacaccagatggtgagagcgatgaggtcggagtgattcccagtaaacgcagcagtcattcaatgacaagcgtaaaaagaacctcttttcccgaaaattccccttctacaagaacaaggaccagagtgagcaggaaacaagtgatgctgaccgagatccctgacgacatgggatcaaaaggcctgaagcatgtaacttctaatgccagcgatagtgaaagtagttaccgt

SEQ ID NO: 127322 - DNA, 858 bp, Homo sapiens
  Payload ID: 4917
  Gene Symbol: DLG1
  Gene Name: discs, large homolog 1 (Drosophila)
  ENST ID: ENST00000447466
  CDS Start-End: 1-858
tttttcactcgaagacacagctttattgactgcatctcggtagccaccagctccacccaggcaaatcctcccccagtactggtcaacacagatagcttggaaacaccaacttacggaaattcagggcttggtttcagcattgcaggaggtacggacaacccacacattggagatgactcaagtattttcattaccaaaattatcacagggggagcagccgcccaagatggaagattgcgggtcaatgactgtatattacgagtaaatgaagtagatgttcgtgatgtaacacatagcaaagcagttgaagcgttgaaagaagcagggtctattgtacgcttgtatgtaaaaagaaggaaaccagtgtcagaaaaaataatggaaataaagctcattaaaggtcctaaaggtcttgggtttagcattgctggaggtgttggaaatcagcatattcctggggataatagcatctatgtaaccaaaataattgaaggaggtgcagcacataaggatggcaaacttcagattggagataaacttttagcagtgaataacgtatgtttagaagaagttactcatgaagaagcagtaactgccttaaagaacacatctgattttgtttatttgaaagtggcaaaacccacaagtatgtatatgaatgatggctatgcaccacctgatatcaccaactcttcttctcagcctgttgataaccatgttagcccatcttccttcttgggccagacaccagcatctccagccagatactccccagtttctaaagcagtacttggagatgatgaaattacaagggaacctagaaaagttgttcttcatcgtggctcaacgggccttggt

SEQ ID NO: 127323 - DNA, 3053 bp, Homo sapiens
  Payload ID: 4917
  Gene Symbol: DLG1
  Gene Name: discs, large homolog 1 (Drosophila)
  Uniprot ID: Q12959
  ENST ID: ENST00000452595
  CDS Start-End: 324-2690
atcagctaacaaaagaacagcttttggttcctgcagacgctggtgaaaaaataatcatgagaaagaaatccaccttatgtcgtcttttttgtctgcaaaaataaactcagccatcatacagctaacaggtacagagggaagatacgagctctttcataggaagaaatcactgagaaaatgagcatcatttctcaaggtttttattttcactgatctacaagtgatgctgctgtaattgtagctgcagtttttaccgatcattcaccactcagcagctggtagagaagtaagcctgcttggcaaccacctgcagggctgcagagatgaattacattttcggaaacaacacacttctatactctcgcggcagtcgaggaggcaatactagctctagccatggctcagcaggcccaaagcagaaacactgggcaaaaaagggctcgtcagatgaactgcaagctgagccagaaccttcacgctggcagcagatagttgcatttttcactcgaagacacagctttattgactgcatctcggtagccaccagctccacccaggcaaatcctcccccagtactggtcaacacagatagcttggaaacaccaacttacgttaatggcacagatgcagattatgaatatgaagaaatcacacttgaaaggggaaattcagggcttggtttcagcattgcaggaggtacggacaacccacacattggagatgactcaagtattttcattaccaaaattatcacagggggagcagccgcccaagatggaagattgcgggtcaatgactgtatattacgagtaaatgaagtagatgttcgtgatgtaacacatagcaaagcagttgaagcgttgaaagaagcagggtctattgtacgcttgtatgtaaaaagaaggaaaccagtgtcagaaaaaataatggaaataaagctcattaaaggtcctaaaggtcttgggtttagcattgctggaggtgttggaaatcagcatattcctggggataatagcatctatgtaaccaaaataattgaaggaggtgcagcacataaggatggcaaacttcagattggagataaacttttagcagtgaataacgtatgtttagaagaagttactcatgaagaagcagtaactgccttaaagaacacatctgattttgtttatttgaaagtggcaaaacccacaagtatgtatatgaatgatggctatgcaccacctgatatcaccaactcttcttctcagcctgttgataaccatgttagcccatcttccttcttgggccagacaccagcatctccagccagatactccccagtttctaaagcagtacttggagatgatgaaattacaagggaacctagaaaagttgttcttcatcgtggctcaacgggccttggtttcaacattgtaggaggagaagatggagaaggaatatttatttcctttatcttagccggaggacctgctgatctaagtggagagctcagaaaaggagatcgtattatatcggtaaacagtgttgacctcagagctgctagtcatgagcaggcagcagctgcattgaaaaatgctggccaggctgtcacaattgttgcacaatatcgacctgaagaatacagtcgttttgaagctaaaatacatgatttacgggagcagatgatgaatagtagtattagttcagggtcaggttctcttcgaactagccagaagcgatccctctatgtcagagccctttttgattatgacaagactaaagacagtgggcttcccagtcagggactgaacttcaaatttggagatatcctccatgttattaatgcttctgatgatgaatggtggcaagccaggcaggttacaccagatggtgagagcgatgaggtcggagtgattcccagtaaacgcagagttgagaagaaagaacgagcccgattaaaaacagtgaaattcaattctaaaacgagagataaaggggagatccctgacgacatgggatcaaaaggcctgaagcatgtaacttctaatgccagcgatagtgaaagtagttaccgtggtcaagaagaatacgtcttatcttatgaaccagtgaatcaacaagaagttaattatactcgaccagtgatcatattgggacctatgaaagacaggataaatgatgacttgatctcagaatttcctgacaaatttggatcctgtgttcctcatacaactagaccaaaacgagattatgaggtagatggaagagattatcattttgtgacttcaagagagcagatggaaaaagatatccaggaacataaattcattgaagctggccagtataacaatcatctatatggaacaagtgttcagtctgtacgagaagtagcagaaaagggcaaacactgtatccttgatgtgtctggaaatgccataaagagattacagattgcacagctttaccctatctccatttttattaaacccaaatccatggaaaatatcatggaaatgaataagcgtctaacagaagaacaagccagaaaaacatttgagagagccatgaaactggaacaggagtttactgaacatttcacagctattgtacagggggatacgctggaagacatttacaaccaagtgaaacagatcatagaagaacaatctggttcttacatctgggttccggcaaaagaaaagctatgaaaactcatgtttctctgtttctcttttccacaattccattttctttggcatctctttgccctttcctctggagtctttcttgagtactgatttcatgttgaattgtatcccacacatcatggtctgcagcttctttttcacatgtagtgtctccttcaagttacatcgtgtgtattatttaatgtcactattggttagtggccatttttcagaactgaagatggaatggcctgaccagctattaagaacgtggggagacgcagaaattgtggtaaaattccttaatgtttaagggaaagtaactttaagagatttttggaaaagctttatatacattcttttcaaatttcagtacaaatgaaa

SEQ ID NO: 127324 - DNA, 309 bp, Homo sapiens
  Payload ID: 4917
  Gene Symbol: DLG1
  Gene Name: discs, large homolog 1 (Drosophila)
  ENST ID: ENST00000434148
  CDS Start-End: 203-309
tgcgggggaagaggcggcctcaggtctaggctctttggggaggggacgctttcgaggagagtttggaagccgacttctgtctgttcttaatttggaggggtacccactccaaggaaaagctttccacgttgacagacaactgctgcgttttgagactctttctttgacttggtgtgtgccctcttcctgattctggagaaaaatgccggtccggaagcaagatacccagagagcattgcaccttttggaggaatatcgttcaaaactaagccaaactgaagacagacagctcagaagttccatagaacg

SEQ ID NO: 127325 - DNA, 3994 bp, Homo sapiens
  Payload ID: 4917
  Gene Symbol: DLG1
  Gene Name: discs, large homolog 1 (Drosophila)
  Uniprot ID: Q12959
  ENST ID: ENST00000419354
  CDS Start-End: 288-3002
agttctgtcactcactcggggtaactttgggcaaattctctctggacctcctaatagggaggtcctcgtcaccccgaggaagttcgaagacgtgggcagtgacttggaaagcttcccgagattccccttctataacctgggtggctcagaccgggagcggggtcccagccggccggtaattccgcccggaggtgcgcacgaaacaaacctgcagcgctggccgagggcggctcagcttcggagggcgcgactccgggtgtgtgccctcttcctgattctggagaaaaatgccggtccggaagcaagatacccagagagcattgcaccttttggaggaatatcgttcaaaactaagccaaactgaagacagacagctcagaagttccatagaacgggttattaacatatttcagagcaacctctttcaggctttaatagatattcaagaattttatgaagtgaccttactggataatccaaaatgtatagatcgttcaaagccgtctgaaccaattcaacctgtgaatacttgggagatttccagccttccaagctctactgtgacttcagagacactgccaagcagccttagccctagtgtagagaaatacaggtatcaggatgaagatacacctcctcaagagcatatttccccacaaatcacaaatgaagtgataggtccagaattggttcatgtctcagagaagaacttatcagagattgagaatgtccatggatttgtttctcattctcatatttcaccaataaagccaacagaagctgttcttccctctcctcccactgtccctgtgatccctgtcctgccagtccctgctgagaatactgtcatcctacccaccataccacaggcaaatcctcccccagtactggtcaacacagatagcttggaaacaccaacttacgttaatggcacagatgcagattatgaatatgaagaaatcacacttgaaaggggaaattcagggcttggtttcagcattgcaggaggtacggacaacccacacattggagatgactcaagtattttcattaccaaaattatcacagggggagcagccgcccaagatggaagattgcgggtcaatgactgtatattacgagtaaatgaagtagatgttcgtgatgtaacacatagcaaagcagttgaagcgttgaaagaagcagggtctattgtacgcttgtatgtaaaaagaaggaaaccagtgtcagaaaaaataatggaaataaagctcattaaaggtcctaaaggtcttgggtttagcattgctggaggtgttggaaatcagcatattcctggggataatagcatctatgtaaccaaaataattgaaggaggtgcagcacataaggatggcaaacttcagattggagataaacttttagcagtgaataacgtatgtttagaagaagttactcatgaagaagcagtaactgccttaaagaacacatctgattttgtttatttgaaagtggcaaaacccacaagtatgtatatgaatgatggctatgcaccacctgatatcaccaactcttcttctcagcctgttgataaccatgttagcccatcttccttcttgggccagacaccagcatctccagccagatactccccagtttctaaagcagtacttggagatgatgaaattacaagggaacctagaaaagttgttcttcatcgtggctcaacgggccttggtttcaacattgtaggaggagaagatggagaaggaatatttatttcctttatcttagccggaggacctgctgatctaagtggagagctcagaaaaggagatcgtattatatcggtaaacagtgttgacctcagagctgctagtcatgagcaggcagcagctgcattgaaaaatgctggccaggctgtcacaattgttgcacaatatcgacctgaagaatacagtcgttttgaagctaaaatacatgatttacgggagcagatgatgaatagtagtattagttcagggtcaggttctcttcgaactagccagaagcgatccctctatgtcagagccctttttgattatgacaagactaaagacagtgggcttcccagtcagggactgaacttcaaatttggagatatcctccatgttattaatgcttctgatgatgaatggtggcaagccaggcaggttacaccagatggtgagagcgatgaggtcggagtgattcccagtaaacgcagagttgagaagaaagaacgagcccgattaaaaacagtgaaattcaattctaaaacgagagataaaggggagatccctgacgacatgggatcaaaaggcctgaagcatgtaacttctaatgccagcgatagtgaaagtagttaccgtggtcaagaagaatacgtcttatcttatgaaccagtgaatcaacaagaagttaattatactcgaccagtgatcatattgggacctatgaaagacaggataaatgatgacttgatctcagaatttcctgacaaatttggatcctgtgttcctcatacaactagaccaaaacgagattatgaggtagatggaagagattatcattttgtgacttcaagagagcagatggaaaaagatatccaggaacataaattcattgaagctggccagtataacaatcatctatatggaacaagtgttcagtctgtacgagaagtagcagaaaagggcaaacactgtatccttgatgtgtctggaaatgccataaagagattacagattgcacagctttaccctatctccatttttattaaacccaaatccatggaaaatatcatggaaatgaataagcgtctaacagaagaacaagccagaaaaacatttgagagagccatgaaactggaacaggagtttactgaacatttcacagctattgtacagggggatacgctggaagacatttacaaccaagtgaaacagatcatagaagaacaatctggttcttacatctgggttccggcaaaagaaaagctatgaaaactcatgtttctctgtttctcttttccacaattccattttctttggcatctctttgccctttcctctggagtctttcttgagtactgatttcatgttgaattgtatcccacacatcatggtctgcagcttctttttcacatgtagtgtctccttcaagttacatcgtgtgtattatttaatgtcactattggttagtggccatttttcagaactgaagatggaatggcctgaccagctattaagaacgtggggagacgcagaaattgtggtaaaattccttaatgtttaagggaaagtaactttaagagatttttggaaaagctttatatacattcttttcaaatttcagtacaaatgaaaaagtggttttaatcagtgatttagtagactttgagcaactgtgcacgcttcagtttaatagcatggtttggccagtgtattactctcaagtccttttctcaatcaacttctatcatcaaagcaattgtttcattatagataaataaggacattttttaatttaaaaattcatgtctgagttgactttcataagggatttcattttttcctcaacattcttaaagccttttagtatttgacggttcttttttcccaggacatttgctaggaataacaacgtttcaatgtttttaatctacttgagcaacactatcgtgtcttacaaaagttgttcatatgtaaatgatcatcacatttcgtgaattgaggccatgttcaggtgctaaggaagttcgccttttacacagaagattgagaaaatttcctagatataaatacagataaatcagacgttacagtggtgacgtagtaaccatcatggcaatggaaaggagtccaattcatagcctaaaacttcaaatgtattcttaggagtcagattttactgaatattttacccacaatagctgcctattttgttataataaaatatatataaatatatatataaaactttctttaaactgtaa

SEQ ID NO: 127326 - DNA, 2682 bp, Homo sapiens
  Payload ID: 4917
  Gene Symbol: DLG1
  Gene Name: discs, large homolog 1 (Drosophila)
  Uniprot ID: Q12959
  ENST ID: ENST00000450955
  CDS Start-End: 1-2682
atgccggtccggaagcaagatacccagagagcattgcaccttttggaggaatatcgttcaaaactaagccaaactgaagacagacagctcagaagttccatagaacgggttattaacatatttcagagcaacctctttcaggctttaatagatattcaagaattttatgaagtgaccttactggataatccaaaatgtatagatcgttcaaagccgtctgaaccaattcaacctgtgaatacttgggagatttccagccttccaagctctactgtgacttcagagacactgccaagcagccttagccctagtgtagagaaatacaggtatcaggatgaagatacacctcctcaagagcatatttccccacaaatcacaaatgaagtgataggtccagaattggttcatgtctcagagaagaacttatcagagattgagaatgtccatggatttgtttctcattctcatatttcaccaataaaggcaaatcctcccccagtactggtcaacacagatagcttggaaacaccaacttacgttaatggcacagatgcagattatgaatatgaagaaatcacacttgaaaggggaaattcagggcttggtttcagcattgcaggaggtacggacaacccacacattggagatgactcaagtattttcattaccaaaattatcacagggggagcagccgcccaagatggaagattgcgggtcaatgactgtatattacgagtaaatgaagtagatgttcgtgatgtaacacatagcaaagcagttgaagcgttgaaagaagcagggtctattgtacgcttgtatgtaaaaagaaggaaaccagtgtcagaaaaaataatggaaataaagctcattaaaggtcctaaaggtcttgggtttagcattgctggaggtgttggaaatcagcatattcctggggataatagcatctatgtaaccaaaataattgaaggaggtgcagcacataaggatggcaaacttcagattggagataaacttttagcagtgaataacgtatgtttagaagaagttactcatgaagaagcagtaactgccttaaagaacacatctgattttgtttatttgaaagtggcaaaacccacaagtatgtatatgaatgatggctatgcaccacctgatatcaccaactcttcttctcagcctgttgataaccatgttagcccatcttccttcttgggccagacaccagcatctccagccagatactccccagtttctaaagcagtacttggagatgatgaaattacaagggaacctagaaaagttgttcttcatcgtggctcaacgggccttggtttcaacattgtaggaggagaagatggagaaggaatatttatttcctttatcttagccggaggacctgctgatctaagtggagagctcagaaaaggagatcgtattatatcggtaaacagtgttgacctcagagctgctagtcatgagcaggcagcagctgcattgaaaaatgctggccaggctgtcacaattgttgcacaatatcgacctgaagaatacagtcgttttgaagctaaaatacatgatttacgggagcagatgatgaatagtagtattagttcagggtcaggttctcttcgaactagccagaagcgatccctctatgtcagagccctttttgattatgacaagactaaagacagtgggcttcccagtcagggactgaacttcaaatttggagatatcctccatgttattaatgcttctgatgatgaatggtggcaagccaggcaggttacaccagatggtgagagcgatgaggtcggagtgattcccagtaaacgcagagttgagaagaaagaacgagcccgattaaaaacagtgaaattcaattctaaaacgagagataaagggcagtcattcaatgacaagcgtaaaaagaacctcttttcccgaaaattccccttctacaagaacaaggaccagagtgagcaggaaacaagtgatgctgaccagcatgtaacttctaatgccagcgatagtgaaagtagttaccgtggtcaagaagaatacgtcttatcttatgaaccagtgaatcaacaagaagttaattatactcgaccagtgatcatattgggacctatgaaagacaggataaatgatgacttgatctcagaatttcctgacaaatttggatcctgtgttcctcatacaactagaccaaaacgagattatgaggtagatggaagagattatcattttgtgacttcaagagagcagatggaaaaagatatccaggaacataaattcattgaagctggccagtataacaatcatctatatggaacaagtgttcagtctgtacgagaagtagcagaaaagggcaaacactgtatccttgatgtgtctggaaatgccataaagagattacagattgcacagctttaccctatctccatttttattaaacccaaatccatggaaaatatcatggaaatgaataagcgtctaacagaagaacaagccagaaaaacatttgagagagccatgaaactggaacaggagtttactgaacatttcacagctattgtacagggggatacgctggaagacatttacaaccaagtgaaacagatcatagaagaacaatctggttcttacatctgggttccggcaaaagaaaagctatga

SEQ ID NO: 127327 - DNA, 539 bp, Homo sapiens
  Payload ID: 4917
  Gene Symbol: DLG1
  Gene Name: discs, large homolog 1 (Drosophila)
  ENST ID: ENST00000453607
  CDS Start-End: 174-539
gtagaaaaattgctacctctaagaatggatcctggagagatctagttacagttataacttcttcatttatggttttatctcacagctttatttatttttatttacatgttttgttcaactaggcaacttaaaatagttttgctttatgtataaaatattgtaatggtagagtaatggattgcctgtgcattgtaaccacaaagaaatacaggtatcaggatgaagatacacctcctcaagagcatatttccccacaaatcacaaatgaagtgataggtccagaattggttcatgtctcagagaagaacttatcagagattgagaatgtccatggatttgtttctcattctcatatttcaccaataaaggttaatggcacagatgcagattatgaatatgaagaaatcacacttgaaaggggaaattcagggcttggtttcagcattgcaggaggtacggacaacccacacattggagatgactcaagtattttcattaccaaaattatcacagggggagcagccgcccaagatggaaga

SEQ ID NO: 127328 - DNA, 2854 bp, Homo sapiens
  Payload ID: 4917
  Gene Symbol: DLG1
  Gene Name: discs, large homolog 1 (Drosophila)
  Uniprot ID: Q12959
  ENST ID: ENST00000422288
  CDS Start-End: 1-2562
atgccggtccggaagcaagatacccagagagcattgcaccttttggaggaatatcgttcaaaactaagccaaactgaagacagacagctcagaagttccatagaacgggttattaacatatttcagagcaacctctttcaggctttaatagatattcaagaattttatgaagtgaccttactggataatccaaaatgtatagatcgttcaaagccgtctgaaccaattcaacctgtgaatacttgggagatttccagccttccaagctctactgtgacttcagagacactgccaagcagccttagccctagtgtagagaaatacaggtatcaggatgaagatacacctcctcaagagcatatttccccacaaatcacaaatgaagtgataggtccagaattggttcatgtctcagagaagaacttatcagagattgagaatgtccatggatttgtttctcattctcatatttcaccaataaaggttaatggcacagatgcagattatgaatatgaagaaatcacacttgaaaggggaaattcagggcttggtttcagcattgcaggaggtacggacaacccacacattggagatgactcaagtattttcattaccaaaattatcacagggggagcagccgcccaagatggaagattgcgggtcaatgactgtatattacgagtaaatgaagtagatgttcgtgatgtaacacatagcaaagcagttgaagcgttgaaagaagcagggtctattgtacgcttgtatgtaaaaagaaggaaaccagtgtcagaaaaaataatggaaataaagctcattaaaggtcctaaaggtcttgggtttagcattgctggaggtgttggaaatcagcatattcctggggataatagcatctatgtaaccaaaataattgaaggaggtgcagcacataaggatggcaaacttcagattggagataaacttttagcagtgaataacgtatgtttagaagaagttactcatgaagaagcagtaactgccttaaagaacacatctgattttgtttatttgaaagtggcaaaacccacaagtatgtatatgaatgatggctatgcaccacctgatatcaccaactcttcttctcagcctgttgataaccatgttagcccatcttccttcttgggccagacaccagcatctccagccagatactccccagtttctaaagcagtacttggagatgatgaaattacaagggaacctagaaaagttgttcttcatcgtggctcaacgggccttggtttcaacattgtaggaggagaagatggagaaggaatatttatttcctttatcttagccggaggacctgctgatctaagtggagagctcagaaaaggagatcgtattatatcggtaaacagtgttgacctcagagctgctagtcatgagcaggcagcagctgcattgaaaaatgctggccaggctgtcacaattgttgcacaatatcgacctgaagaatacagtcgttttgaagctaaaatacatgatttacgggagcagatgatgaatagtagtattagttcagggtcaggttctcttcgaactagccagaagcgatccctctatgtcagagccctttttgattatgacaagactaaagacagtgggcttcccagtcagggactgaacttcaaatttggagatatcctccatgttattaatgcttctgatgatgaatggtggcaagccaggcaggttacaccagatggtgagagcgatgaggtcggagtgattcccagtaaacgcagagttgagaagaaagaacgagcccgattaaaaacagtgaaattcaattctaaaacgagagataaaggggagatccctgacgacatgggatcaaaaggcctgaagcatgtaacttctaatgccagcgatagtgaaagtagttaccgtggtcaagaagaatacgtcttatcttatgaaccagtgaatcaacaagaagttaattatactcgaccagtgatcatattgggacctatgaaagacaggataaatgatgacttgatctcagaatttcctgacaaatttggatcctgtgttcctcatacaactagaccaaaacgagattatgaggtagatggaagagattatcattttgtgacttcaagagagcagatggaaaaagatatccaggaacataaattcattgaagctggccagtataacaatcatctatatggaacaagtgttcagtctgtacgagaagtagcagaaaagggcaaacactgtatccttgatgtgtctggaaatgccataaagagattacagattgcacagctttaccctatctccatttttattaaacccaaatccatggaaaatatcatggaaatgaataagcgtctaacagaagaacaagccagaaaaacatttgagagagccatgaaactggaacaggagtttactgaacatttcacagctattgtacagggggatacgctggaagacatttacaaccaagtgaaacagatcatagaagaacaatctggttcttacatctgggttccggcaaaagaaaagctatgaaaactcatgtttctctgtttctcttttccacaattccattttctttggcatctctttgccctttcctctggagtctttcttgagtactgatttcatgttgaattgtatcccacacatcatggtctgcagcttctttttcacatgtagtgtctccttcaagttacatcgtgtgtattatttaatgtcactattggttagtggccatttttcagaactgaagatggaatggcctgaccagctattaagaacgtggggagacgcagaaattgtggtaaaattccttaatgtttaa

SEQ ID NO: 127329 - DNA, 582 bp, Homo sapiens
  Payload ID: 4917
  Gene Symbol: DLG1
  Gene Name: discs, large homolog 1 (Drosophila)
  ENST ID: ENST00000419553
  CDS Start-End: 120-582
ggtggggatctacccccggggtcgccaggcgctgtctctgccgcggagttggaaacggcactgctgagtgaggttgaggggtgtctcggtgtgtgccctcttcctgattctggagaaaaatgccggtccggaagcaagatacccagagagcattgcaccttttggaggaatatcgttcaaaactaagccaaactgaagacagacagctcagaagttccatagaacgggttattaacatatttcagagcaacctctttcaggctttaatagatattcaagaattttatgaagtgaccttactggataatccaaaatgtatagatcgttcaaagccgtctgaaccaattcaacctgtgaatacttgggagatttccagccttccaagctctactgtgacttcagagacactgccaagcagccttagccctagtgtagagaaatacaggtatcaggatgaagatacacctcctcaagagcatatttccccacaaatcacaaatgaagtgataggtccagaattggttcatgtctcagagaagaacttatcagagattgagaatgtccatggatttgtttctcatt

SEQ ID NO: 127330 - DNA, 7730 bp, Homo sapiens
  Payload ID: 4918
  Gene Symbol: DLG2
  Gene Name: discs, large homolog 2 (Drosophila)
  Uniprot ID: Q15700
  ENST ID: ENST00000280241
  CDS Start-End: 195-2924
gcagataatgctgtgcggagctgctgtcgctgctcccactgctcccacgatgcactgcttatagcagctgtcaaagatactgaggaatccacggtggaaaaaagacttttacaactggctggaagaaaggggtgtgagggaggagacatttctgtgcagagctgaccaaaggaaagagtaggcatcagtgcagtatgaatgcatacctcaccaagcaacacagctgcagccgggggtccgatgggatggatgccgtcaggagtgcgcccaccctgatcagggatgcccactgtgcttgtggctggcagaggaactgtcaggggctcgggtacagttctcagaccatgccctcctcaggaccagggggcccagcttcaaacaggaccggggggtccagcttcaacaggaccttgtgggacagtgtgcggaaaagcccccacaagacgagcaccaagggcaaagggacttgtggggagcattgtacctgcccacatggttggttcagcccagcacaggccagtcctgctcctataattgtcaacacagatactttggacacaattccttatgtcaatgggacagaaattgaatatgaatttgaagaaattacactggagagggggaattctggcctgggattcagtattgctggggggacagataatccccacattggagatgaccctggcatatttattacgaagattataccaggaggtgctgcagcagaggatggcagactcagggtcaatgattgtatcttgcgggtgaatgaggttgatgtgtcagaggtttcccacagtaaagcggtggaagccctgaaggaagcagggtctatcgttcggctgtatgtgcgtagaagacgacctattttggagaccgttgtggaaatcaaactgttcaaaggccctaaaggtttaggcttcagtattgcaggaggtgtggggaaccaacacattcctggagacaacagcatttatgtaactaaaattatagatggaggagctgcacaaaaagatggaaggttgcaagtaggagatagactactaatggtaaacaactacagtttagaagaagtaacacacgaagaggcagtagcaatattaaagaacacatcagaggtagtttatttaaaagttggcaaacccactaccatttatatgactgatccttatggtccacctgatattactcactcttattctccaccaatggaaaaccatctactctctggcaacaatggcactttagaatataaaacctccctgccacccatctctccaggaaggtactcaccaattccaaagcacatgcttgttgacgacgactacaccaggcctccggaacctgtttacagcactgtgaacaaactatgtgataagcctgcttctcccaggcactattcccctgttgagtgtgacaaaagcttcctcctctcagctccctattcccactaccacctaggcctgctacctgactctgagatgaccagtcattcccaacatagcaccgcaactcgtcagccttcaatgactctccaacgggccgtctccctggaaggagagcctcgcaaggtagtcctgcacaaaggctccactggcctgggcttcaacattgtcggtggggaagatggagaaggtatttttgtgtccttcattctggctggtggaccagcagacctaagtggggagctccagagaggagaccagatcctatcggtgaatggcattgacctccgtggtgcatcccacgagcaggcagctgctgcactaaagggggctggacagacagtgacgattatagcacaatatcaacctgaagattacgctcgatttgaggccaaaatccatgacctacgagagcagatgatgaaccacagcatgagctccgggtccggatccctgcgaaccaatcagaaacgctccctctacgtcagagccatgttcgactacgacaagagcaaggacagtgggctgccaagtcaaggacttagttttaaatatggagatattctccacgttatcaatgcctctgatgatgagtggtggcaagccaggagagtcatgctggagggagacagtgaggagatgggggtcatccccagcaaaaggagggtggaaagaaaggaacgtgcccgattgaagacagtgaagtttaatgccaaacctggagtgattgattcgaaagggtcattcaatgacaagcgtaaaaagagcttcatcttttcacgaaaattcccattctacaagaacaaggagcagagtgagcaggaaaccagtgatcctgaacgaggacaagaagacctcattctttcctatgagcctgttacaaggcaggaaataaactacacccggccggtgattatcctggggcccatgaaggatcggatcaatgacgacttgatatctgaattccctgataaatttggctcctgtgtgcctcatactacgaggccaaagcgagactacgaggtggatggcagagactatcactttgtcatttccagagaacaaatggagaaagatatccaagagcacaagtttatagaagccggccagtacaatgacaatttatatggaaccagtgtgcagtctgtgagatttgtagcagaaagaggcaaacactgtatacttgatgtatcaggaaatgctatcaagcggttacaagttgcccagctctatcccattgccatcttcataaaacccaggtctctggaacctcttatggagatgaataagcgtctaacagaggaacaagccaagaaaacctatgatcgagcaattaagctagaacaagaatttggagaatattttacagctattgtccaaggagatactttagaagatatatataaccaatgcaagcttgttattgaagagcaatctgggcctttcatctggattccctcaaaggaaaagttataaattagctactgcgcctctgacaacgacagaagagcatttagaagaacaaaatatatataacatactacttggaggcttttatgtttttgttgcatttatgtttttgcagtcaatgtgaattcttacgaatgtacaacacaaactgtatgaagccatgaaggaaacagaggggccaaagggtgggacagaaaagacattgcagtatgaaggaaggctttggtttgctcaaagtgccaggtgtagggatgaacctctgacgggctttctgcccaagagatgagatgagagcctcctcaccccagcagatgtccagagctgatttagctgcagagctctctgtgtcttttgctttaaagaaaaattgccagcactcgaacctcatcagccttcccattacccacatctgtaattggtacactttgaattttataactatgcacatcttttgatttcttaacaagcaaatgaaagaaagaaggaaaaaagaaaggaatccctttggagatgacatactatcagggaaggataagtgtgtagttttttgactggcatctgcaaagacaagaatttcataaaatttgcaagtgtatggaggactaacctcactgacaggaggggattccacctgggattagctttatgattgttgattgcctattttgccatttataaactgaaagaaggcactaaagatgagaataatttatacaataaaaatatattaaatgtatagaaacaaatttctataggttaaaaaagttttgtgaaatattttgtaaagactaatattgaaagactaaatgtatgcaacatcagcagatgatcaaattcaagacctgaaagttgcactctcccttttgttgccaatgatctgttaagagcatctgagttccttttaagtctgacaaagacttcttcctcacttacctcccttccacattagtgatacactctcatgcagcacatcccttaatgagttgccctcatggatatttttggaagacatttggttaatgcatttttttatgctgatggcttttcagagacaaacttatgcaaatgatctaaagggaagtttttgctttcctctagttaaataacctgagcctgccatgcaaatagttgaataactttgttcctagttactgacatacaattcttaaaggaccatttagcattttggccaacaatgagtaattaggattagtacctttttgttttacagagtaactgagagttttgtaacatccagagatggtactagagccaatgagagatctgttcctagatgcactatttctttgaggaagagagagaagagaagtgtctggttgggggtgagggggtgcagacttttttgtttctatgtacagagcaaagagatagagtcacaaggaaagacaattaatgactttgagctcaaccaactgaactgcctttcttggagctgcacctggaccaagtttattttttaacaattataataacgatgatttaaaaaaagaaacctcccaaagcctataaactgaactagaagagttggtttcccactttagagtggatggcgacatcagcattgcttttgcccatggtgtttggggagagacttttcagtgataataaccactctactctgggttctgtgcatgcccagactaagccccatcgccttatttctggggtacatccagacctggcagggattctgccacactgtgcagcaaaccagcatgtaggctgggtaggagagcaagagatagagccatcagagtgatggggcttcttcacagtaagaacatcggagcttagaatgagagtctctttccaaaaacaggcattgttcatcttacgctaaacatcattgtctgcctggctacagtcaccaaaacaaaacagaaatgcaaaattatgcatcttcccatagtcctgaggcttcctttgccaatggaagggctagcaatgcattctccctctcatgaaagttaaatttccagagacttccttagattgctcaaaatgttaaagatatgtccatgtctgcaattcgccagtttcaggtcaaggcctactttcatcaatattgctcccagaagttttctgacaccagaatgccattcctgatcccagctctatttttaggccaccacgataacttctttggtttctcaactgagcatgcaaccatttatttaaaagactgtcattaatgagtagatgttttcgcgggtcgtgtgatgtgctttccatttactagtgttgctgtggctaagtacaatcaaattgaaccaccaacccttggttttgtagtaatataactatttattttcctagtgtagatgctttcagattagaattggcatttgcactgatttttttatgtagatttatataaatatatagatacatatatatttgcttgaagaatcaccaagcaaattggtgagagggtcttttccaatagaatttacacctccatttgttgtgttgtcttgcacttcccaatgttgatgtctctatggctccaatgaactggtgtattttgcagcaaatctgatgacttgtatggaaatggcatgaaagttacccagattacatctggtgcaaatgcactcggagcctggggccagactggtgctaacactgcaaactttgtccagagctctctccaacctgaaggcttgctgggggtgcaatgtcaccttcacacatgctgggccctttcagaaaagtgccagatcgtgtaactggtgctatttttcatgctctggtacaatgtgtagcaccacgggggtctcagctttaccaaaatcaaaattccatttgtcagctaagtgcagaggcatttgttttttgctctcctcccacagaattgtcggccatttatttgcaggccttttgcgggatttcttggctatttatttgcaggccttttttcccagccccaaattcttgggttggctctgtctgcttaaagagcctgtcttcacaaagctgcactcgggtgcctctgtgcgctgtcttagatcctactgccggcccttcaggactccgagccaggaaagaactctccaacctctggctcgagactctactttttttctcattcttttccttactctcctcctccttctacttccgactaattccatctctttttttttttgttcctctccttttcctattcctccttcccaccatctctgagttgttgactttctcctataatccttctctattccctttctctttttgtccacctctcctttagtctctgtttctctgcccttcttattcctcttctgtcctttctcctctcctcaaatctctgatcatcttctcccgtacatccctgtattgatttttctgtcctctaaagggctcatggctgattcagacagcaagtccatgcactggactaatgacacaaatactttaggtcgccgtttcacctactcagcccagaaagtaaagctgagcgtgaggccctgacctggagcctgctccagcccgcctcccggagccagcctgcaccgttgccctggcagcgatgatgcatgtgctgtgggccctgccggcgcctgagtgcctctgcctgaacactgctcctaagcgagcccactcccagcactaccgcatggctctgaggacattttctttcaataaaggcagactctggccccaattattctgatagcaaacctcttcctcctcattgaagccatgccatcaccttggtttggagagagacatttttttcccattcataagctttctttttcccatttttatgtgaagccccctctgcttttcagctggtgattgctctggtgagactgaatggacttgctggtgaaatgaaatctcttctttcctgtcttggtcctgcctaaattcctacaaatatatttaagccaaggactcaggctaattcctaagttgatcacattaatttgttactcctagagggaaaaagatcaattcccttgaagcatgtggagtacctcctgtgacagctgacttgccaggggactccctacagaattctgtgatatacattttacttctgtgtatgtatggtatatatggtatgtataccatgtacacacgttacattgagtatgaatgactgtggttggaaacacacacacacactcaagtctgtaaatatccttcctcactgaaacctgtgctttggaaatcatttcttgtacagctgtgcagtttcttgtaacagctgaggacaaagctaagacaggcggacaatttagacaaagatcatctaaagagtatagtatctccctagcaactcatgaggacagacaaccaagtggcaaggttgactcccaatgggatggcagacttttcttctctcctttttgagtttgtgtttcctaagtgtttcttaacttctgagtgcaccaggctgtacccgttagatcctttcaatatgacagttttgtgcttctctctgacaggatgtttctccaccgagctgtagcacaggatgggagggaggtgggaatactccttgcctaggctggagtttacagagacactgcacagcttacactcctgttaagtgtaaatattcaacacttccattccatttgtgtaaaaaataaagcacacacgattataaaatcaagatgtatatttcatactcagtgtgtctgtgcatatttattgcgtttctagttgtcagcggtgggtggccccattgtaaaaatgcctgatagagtgtttataaacatgtcatggttttattataagatataaatattaaaacattttatactttatggcaaa

SEQ ID NO: 127331 - DNA, 5139 bp, Homo sapiens
  Payload ID: 4918
  Gene Symbol: DLG2
  Gene Name: discs, large homolog 2 (Drosophila)
  Uniprot ID: Q15700
  ENST ID: ENST00000376104
  CDS Start-End: 313-3240
acagaagaaaaaaatgaaagggacagcaagctggattctgagttactgaggggaagactcagcctggatttcaaaactgaacactgaagtggtttgcaacagttacctggctcttggcctcaatccagctggatcaaactgagacctgaaaagagatattgactcctgtggcagtggaaagacccaagaatgccagtcaagaagacaggtgggccataagatactgaccgagctttatcattactggaagaatactgcaaaaaattaaggaaaccagaggagcagctgttgaaaaatgcggttaaaaaggtgatgggtatctttaagagcagcttattccaagctttgctagatatccaagaattttatgaggtgacattgctaaattctcaaaaaagttgtgagcagaagatagaagaagccaatcaagttttacagaaatgggagaagacatcccttcttgctccgtgccatgacagacttcaaaaatcttcagagcttacagattgcagtggatcaaaggaaaatgcttcatgtattgagcaaaataaagaaaatcagagttttgaaaatgaaactgatgagacgacaactcaaaaccaaggcagatgcccagcccagaattgttcagtggaagcccctgcttggatgcctgtccaccactgtactaagtatcgatatcaagatgaggacgctccacatgatcattccttacctcgactaacccacgaagtaagaggcccagaactcgtgcatgtatcagaaaagaacctctctcaaatagaaaatgtccatggatatgtcttgcagtctcatatttctcctctgaaggccagtcctgctcctataattgtcaacacagatactttggacacaattccttatgtcaatgggacagaaattgaatatgaatttgaagaaattacactggagagggggaattctggcctgggattcagtattgctggggggacagataatccccacattggagatgaccctggcatatttattacgaagattataccaggaggtgctgcagcagaggatggcagactcagggtcaatgattgtatcttgcgggtgaatgaggttgatgtgtcagaggtttcccacagtaaagcggtggaagccctgaaggaagcagggtctatcgttcggctgtatgtgcgtagaagacgacctattttggagaccgttgtggaaatcaaactgttcaaaggccctaaaggtttaggcttcagtattgcaggaggtgtggggaaccaacacattcctggagacaacagcatttatgtaactaaaattatagatggaggagctgcacaaaaagatggaaggttgcaagtaggagatagactactaatggtaaacaactacagtttagaagaagtaacacacgaagaggcagtagcaatattaaagaacacatcagaggtagtttatttaaaagttggcaaacccactaccatttatatgactgatccttatggtccacctgatattactcactcttattctccaccaatggaaaaccatctactctctggcaacaatggcactttagaatataaaacctccctgccacccatctctccaggaaggtactcaccaattccaaagcacatgcttgttgacgacgactacaccaggcctccggaacctgtttacagcactgtgaacaaactatgtgataagcctgcttctcccaggcactattcccctgttgagtgtgacaaaagcttcctcctctcagctccctattcccactaccacctaggcctgctacctgactctgagatgaccagtcattcccaacatagcaccgcaactcgtcagccttcaatgactctccaacgggccgtctccctggaaggagagcctcgcaaggtagtcctgcacaaaggctccactggcctgggcttcaacattgtcggtggggaagatggagaaggtatttttgtgtccttcattctggctggtggaccagcagacctaagtggggagctccagagaggagaccagatcctatcggtgaatggcattgacctccgtggtgcatcccacgagcaggcagctgctgcactaaagggggctggacagacagtgacgattatagcacaatatcaacctgaagattacgctcgatttgaggccaaaatccatgacctacgagagcagatgatgaaccacagcatgagctccgggtccggatccctgcgaaccaatcagaaacgctccctctacgtcagagccatgttcgactacgacaagagcaaggacagtgggctgccaagtcaaggacttagttttaaatatggagatattctccacgttatcaatgcctctgatgatgagtggtggcaagccaggagagtcatgctggagggagacagtgaggagatgggggtcatccccagcaaaaggagggtggaaagaaaggaacgtgcccgattgaagacagtgaagtttaatgccaaacctggagtgattgattcgaaagggtcattcaatgacaagcgtaaaaagagcttcatcttttcacgaaaattcccattctacaagaacaaggagcagagtgagcaggaaaccagtgatcctgaacgaggacaagaagacctcattctttcctatgagcctgttacaaggcaggaaataaactacacccggccggtgattatcctggggcccatgaaggatcggatcaatgacgacttgatatctgaattccctgataaatttggctcctgtgtgcctcatactacgaggccaaagcgagactacgaggtggatggcagagactatcactttgtcatttccagagaacaaatggagaaagatatccaagagcacaagtttatagaagccggccagtacaatgacaatttatatggaaccagtgtgcagtctgtgagatttgtagcagaaagaggcaaacactgtatacttgatgtatcaggaaatgctatcaagcggttacaagttgcccagctctatcccattgccatcttcataaaacccaggtctctggaacctcttatggagatgaataagcgtctaacagaggaacaagccaagaaaacctatgatcgagcaattaagctagaacaagaatttggagaatattttacagctattgtccaaggagatactttagaagatatatataaccaatgcaagcttgttattgaagagcaatctgggcctttcatctggattccctcaaaggaaaagttataaattagctactgcgcctctgacaacgacagaagagcatttagaagaacaaaatatatataacatactacttggaggcttttatgtttttgttgcatttatgtttttgcagtcaatgtgaattcttacgaatgtacaacacaaactgtatgaagccatgaaggaaacagaggggccaaagggtgggacagaaaagacattgcagtatgaaggaaggctttggtttgctcaaagtgccaggtgtagggatgaacctctgacgggctttctgcccaagagatgagatgagagcctcctcaccccagcagatgtccagagctgatttagctgcagagctctctgtgtcttttgctttaaagaaaaattgccagcactcgaacctcatcagccttcccattacccacatctgtaattggtacactttgaattttataactatgcacatcttttgatttcttaacaagcaaatgaaagaaagaaggaaaaaagaaaggaatccctttggagatgacatactatcagggaaggataagtgtgtagttttttgactggcatctgcaaagacaagaatttcataaaatttgcaagtgtatggaggactaacctcactgacaggaggggattccacctgggattagctttatgattgttgattgcctattttgccatttataaactgaaagaaggcactaaagatgagaataatttatacaataaaaatatattaaatgtatagaaacaaatttctataggttaaaaaagttttgtgaaatattttgtaaagactaatattgaaagactaaatgtatgcaacatcagcagatgatcaaattcaagacctgaaagttgcactctcccttttgttgccaatgatctgttaagagcatctgagttccttttaagtctgacaaagacttcttcctcacttacctcccttccacattagtgatacactctcatgcagcacatcccttaatgagttgccctcatggatatttttggaagacatttggttaatgcatttttttatgctgatggcttttcagagacaaacttatgcaaatgatctaaagggaagtttttgctttcctctagttaaataacctgagcctgccatgcaaatagttgaataactttgttcctagttactgacatacaattcttaaaggaccatttagcattttggccaacaatgagtaattaggattagtacctttttgttttacagagtaactgagagttttgtaacatccagagatggtactagagccaatgagagatctgttcctagatgcactatttctttgaggaagagagagaagagaagtgtctggttgggggtgagggggtgcagacttttttgtttctatgtacagagcaaagagatagagtcacaaggaaagacaattaatgactttgagctcaaccaactgaactgcctttcttggagctgcacctggaccaagtttattttttaacaattataataacgatgatttaaaaaaagaaacctcccaaagcctataaactgaactagaagagttggtttcccactttagagtggatggcgacatcagcattgcttttgcccatggtgtttggggagagacttttcagtgataataaccactctactctgggttctgtgcatgcccagactaagccccatcgccttatttctggggtacatccagacctggcagggattctgccacactgtgcagcaaaccagcatgtaggctgggtaggagagcaagagatagagccatcagagtgatggggcttcttcacagtaagaacatcggagcttagaatgagagtctctttccaaaaacaggcattgttcatcttacgctaaacatcattgtctgcctggctacagtcaccaaaacaaaacagaaa

SEQ ID NO: 127332 - DNA, 738 bp, Homo sapiens
  Payload ID: 4918
  Gene Symbol: DLG2
  Gene Name: discs, large homolog 2 (Drosophila)
  ENST ID: ENST00000398299
  CDS Start-End: 41-738
gtgaagctctccgggccccaaactatcagtagcataaaatatgaccaaggtcaatgggacagaaattgaatatgaatttgaagaaattacactggagagggggaattctggcctgggattcagtattgctggggggacagataatccccacattggagatgaccctggcatatttattacgaagattataccaggaggtgctgcagcagaggatggcagactcagggtcaatgattgtatcttgcgggtgaatgaggttgatgtgtcagaggtttcccacagtaaagcggtggaagccctgaaggaagcagggtctatcgttcggctgtatgtgcgtagaagacgacctattttggagaccgttgtggaaatcaaactgttcaaaggccctaaaggtttaggcttcagtattgcaggaggtgtggggaaccaacacattcctggagacaacagcatttatgtaactaaaattatagatggaggagctgcacaaaaagatggaaggttgcaagtaggagatagactactaatggtaaacaactacagtttagaagaagtaacacacgaagaggcagtagcaatattaaagaacacatcagaggtagtttatttaaaagttggcaaacccactaccatttatatgactgatccttatggtccacctgatattactcactcttattctccaccaatggaaaaccatctactctctggcaacaatggcactttagaatataa

SEQ ID NO: 127333 - DNA, 2070 bp, Homo sapiens
  Payload ID: 4918
  Gene Symbol: DLG2
  Gene Name: discs, large homolog 2 (Drosophila)
  ENST ID: ENST00000398301
  CDS Start-End: 195-1853
gcagataatgctgtgcggagctgctgtcgctgctcccactgctcccacgatgcactgcttatagcagctgtcaaagatactgaggaatccacggtggaaaaaagacttttacaactggctggaagaaaggggtgtgagggaggagacatttctgtgcagagctgaccaaaggaaagagtaggcatcagtgcagtatgaatgcatacctcaccaagcaacacagctgcagccgggggtccgatgggatggatgccgtcaggagtgcgcccaccctgatcagggatgcccactgtgcttgtggctggcagaggaactgtcaggggctcgggtacagttctcagaccatgccctcctcaggaccagggggcccagcttcaaacaggaccggggggtccagcttcaacaggaccttgtgggacagtgtgcggaaaagcccccacaagacgagcaccaagggcaaagggacttgtggggagcattgtacctgcccacatggttggttcagcccagcacaggccagtcctgctcctataattgtcaacacagatactttggacacaattccttatgtcaatgggacagaaattgaatatgaatttgaagaaattacactggagagggggaattctggcctgggattcagtattgctggggggacagataatccccacattggagatgaccctggcatatttattacgaagattataccaggaggtgctgcagcagaggatggcagactcagggtcaatgattgtatcttgcgggtgaatgaggttgatgtgtcagaggtttcccacagtaaagcggtggaagccctgaaggaagcagggtctatcgttcggctgtatgtgcgtagaagacgacctattttggagaccgttgtggaaatcaaactgttcaaaggccctaaaggtttaggcttcagtattgcaggaggtgtggggaaccaacacattcctggagacaacagcatttatgtaactaaaattatagatggaggagctgcacaaaaagatggaaggttgcaagtaggagatagactactaatggtaaacaactacagtttagaagaagtaacacacgaagaggcagtagcaatattaaagaacacatcagaggtagtttatttaaaagttggcaaacccactaccatttatatgactgatccttatggtccacctgatattactcactcttattctccaccaatggaaaaccatctactctctggcaacaatggcactttagaatataaaacctccctgccacccatctctccaggaaggtactcaccaattccaaagcacatgcttgttgacgacgactacaccaggcctccggaacctgtttacagcactgtgaacaaactatgtgataagcctgcttctcccaggcactattcccctgttgagtgtgacaaaagcttcctcctctcagctccctattcccactaccacctaggcctgctacctgactctgagatgaccagtcattcccaacatagcaccgcaactcgtcagccttcaatgactctccaacgggccgtctccctggaaggagagcctcgcaaggtagtcctgcacaaaggctccactggcctgggcttcaacattgtcggtggggaagatggagaaggtatttttgtgtccttcattctggctggtggaccagcagacctaagtggggagctccagagaggagaccagatcctatcggtgaatggcattgacctccgtggtgcatcccacgagcaggcagctgctgcactaaagggggctggacagacagtgacgattatagcacaatatcaacctgaaggtcagtcagaactcaaactaataatgttctgatatgtctctgtgtggatctgtaccctcattactaataatttttattaactagagtcaccatcattggtgttttgtaaacctacctatagtgaaaaattgatggttcatgtccaaagaacgtgaaccgtggctttgttacctctaatcttccaggaaaatatcaagcagttagaaaggcctatgaaaatatgaattcaaataaatagcaaccagcatc

SEQ ID NO: 127334 - DNA, 783 bp, Homo sapiens
  Payload ID: 4918
  Gene Symbol: DLG2
  Gene Name: discs, large homolog 2 (Drosophila)
  ENST ID: ENST00000398304
  CDS Start-End: 157-546
aggcaagtgtgaaccggacagcagacaggagaacctggcaccaaggagacggagaagctgcctttggtgcctcctgcctcctccctgctttgttccaataattttgtgctcgattacgctcgatttgaggccaaaatccatgacctacgagagcagatgatgaaccacagcatgagctccgggtccggatccctgcgaaccaatcagaaacgctccctctacgtcagagccatgttcgactacgacaagagcaaggacagtgggctgccaagtcaaggacttagttttaaatatggagatattctccacgttatcaatgcctctgatgatgagtggtggcaagccaggagagtcatgctggagggagacagtgaggagatgggggtcatccccagcaaaaggagggtggaaagaaaggaacgtgcccgattgaagacagtgaagtttaatgccaaacctggagtgattgattcgaaaggggacatccccggattaggtgacgacggttatggaacaaagactctgaatactttcttcatttgctaaaaagaagaaacagcaatcaagcagcgggttcctgtaaaatggagataaagttttcatcttctttatcttatctgagttttcttaatgcagcctcctctgcggcttttacttgcctttcgctcacatttctggtagccttgcatgagtgtattcctttccgttctggctgctcttcaatgcttggtatctctttaatttgctgtgctgttcttgcagaacatgtttcttctaatgcca

SEQ ID NO: 127335 - DNA, 2789 bp, Homo sapiens
  Payload ID: 4918
  Gene Symbol: DLG2
  Gene Name: discs, large homolog 2 (Drosophila)
  ENST ID: ENST00000330014
  CDS Start-End: 18-2393
aacaatgtgaacaagctatgcaacatgcatttattccggccagtcctgctcctataattgtcaacacagatactttggacacaattccttatgtcaatgggacagaaattgaatatgaatttgaagaaattacactggagagggggaattctggcctgggattcagtattgctggggggacagataatccccacattggagatgaccctggcatatttattacgaagattataccaggaggtgctgcagcagaggatggcagactcagggtcaatgattgtatcttgcgggtgaatgaggttgatgtgtcagaggtttcccacagtaaagcggtggaagccctgaaggaagcagggtctatcgttcggctgtatgtgcgtagaagacgacctattttggagaccgttgtggaaatcaaactgttcaaaggccctaaaggtttaggcttcagtattgcaggaggtgtggggaaccaacacattcctggagacaacagcatttatgtaactaaaattatagatggaggagctgcacaaaaagatggaaggttgcaagtaggagatagactactaatggtaaacaactacagtttagaagaagtaacacacgaagaggcagtagcaatattaaagaacacatcagaggtagtttatttaaaagttggcaaacccactaccatttatatgactgatccttatggtccacctgatattactcactcttattctccaccaatggaaaaccatctactctctggcaacaatggcactttagaatataaaacctccctgccacccatctctccaggaaggtactcaccaattccaaagcacatgcttgttgacgacgactacaccaggcctccggaacctgtttacagcactgtgaacaaactatgtgataagcctgcttctcccaggcactattcccctgttgagtgtgacaaaagcttcctcctctcagctccctattcccactaccacctaggcctgctacctgactctgagatgaccagtcattcccaacatagcaccgcaactcgtcagccttcaatgactctccaacgggccgtctccctggaaggagagcctcgcaaggtagtcctgcacaaaggctccactggcctgggcttcaacattgtcggtggggaagatggagaaggtatttttgtgtccttcattctggctggtggaccagcagacctaagtggggagctccagagaggagaccagatcctatcggtgaatggcattgacctccgtggtgcatcccacgagcaggcagctgctgcactaaagggggctggacagacagtgacgattatagcacaatatcaacctgaagattacgctcgatttgaggccaaaatccatgacctacgagagcagatgatgaaccacagcatgagctccgggtccggatccctgcgaaccaatcagaaacgctccctctacgtcagagccatgttcgactacgacaagagcaaggacagtgggctgccaagtcaaggacttagttttaaatatggagatattctccacgttatcaatgcctctgatgatgagtggtggcaagccaggagagtcatgctggagggagacagtgaggagatgggggtcatccccagcaaaaggagggtggaaagaaaggaacgtgcccgattgaagacagtgaagtttaatgccaaacctggagtgattgattcgaaaggggacatccccggattaggtgacgacggttatggaacaaagactctgagaggacaagaagacctcattctttcctatgagcctgttacaaggcaggaaataaactacacccggccggtgattatcctggggcccatgaaggatcggatcaatgacgacttgatatctgaattccctgataaatttggctcctgtgtgcctcatactacgaggccaaagcgagactacgaggtggatggcagagactatcactttgtcatttccagagaacaaatggagaaagatatccaagagcacaagtttatagaagccggccagtacaatgacaatttatatggaaccagtgtgcagtctgtgagatttgtagcagaaagaggcaaacactgtatacttgatgtatcaggaaatgctatcaagcggttacaagttgcccagctctatcccattgccatcttcataaaacccaggtctctggaacctcttatggagatgaataagcgtctaacagaggaacaagccaagaaaacctatgatcgagcaattaagctagaacaagaatttggagaatattttacagctattgtccaaggagatactttagaagatatatataaccaatgcaagcttgttattgaagagcaatctgggcctttcatctggattccctcaaaggaaaagttataaattagctactgcgcctctgacaacgacagaagagcatttagaagaacaaaatatatataacatactacttggaggcttttatgtttttgttgcatttatgtttttgcagtcaatgtgaattcttacgaatgtacaacacaaactgtatgaagccatgaaggaaacagaggggccaaagggtgggacagaaaagacattgcagtatgaaggaaggctttggtttgctcaaagtgccaggtgtagggatgaacctctgacgggctttctgcccaagagatgagatgagagcctcctcaccccagcagatgtccagagctgatttagctgcagagctctctgtgtcttttgctttaaagaaaaattgccagcactcgaacctcatcagccttcccatta

SEQ ID NO: 127336 - DNA, 7890 bp, Homo sapiens
  Payload ID: 4918
  Gene Symbol: DLG2
  Gene Name: discs, large homolog 2 (Drosophila)
  Uniprot ID: Q15700
  ENST ID: ENST00000398309
  CDS Start-End: 472-3084
atttacagtctgcgatgcgatcccattgtaaagtatttaataggataacaccggggctctccagaaatataagtaactcattggttaaatttcaattcttcacctttccccccctccttcctgagtgagctcattcccccctccttcttcttcttcttttttttttttaatccagtgatttaaaatgctagaaggaaaagcaactgaggtcttaactttcagacgctgaattctcatctaattgaaattactgggcataatgctatatatagccaatgaagagattttgagctctcactcagtgccttcaagacatgtcgttttgtagtcagagaaaacagagatcaatgcattttcaaactgacagagggaacggatgctctttagtagcacatgcccaggatcgtgtgtgtggggcttgcgctgtgctgagaagctgaataccggtccatatgctccttatttactgcaatgttctttgcatgttactgtgcactccggactaacgtgaagaagtatcgatatcaagatgaggacgctccacatgatcattccttacctcgactaacccacgaagtaagaggcccagaactcgtgcatgtatcagaaaagaacctctctcaaatagaaaatgtccatggatatgtcttgcagtctcatatttctcctctgaaggccagtcctgctcctataattgtcaacacagatactttggacacaattccttatgtcaatgggacagaaattgaatatgaatttgaagaaattacactggagagggggaattctggcctgggattcagtattgctggggggacagataatccccacattggagatgaccctggcatatttattacgaagattataccaggaggtgctgcagcagaggatggcagactcagggtcaatgattgtatcttgcgggtgaatgaggttgatgtgtcagaggtttcccacagtaaagcggtggaagccctgaaggaagcagggtctatcgttcggctgtatgtgcgtagaagacgacctattttggagaccgttgtggaaatcaaactgttcaaaggccctaaaggtttaggcttcagtattgcaggaggtgtggggaaccaacacattcctggagacaacagcatttatgtaactaaaattatagatggaggagctgcacaaaaagatggaaggttgcaagtaggagatagactactaatggtaaacaactacagtttagaagaagtaacacacgaagaggcagtagcaatattaaagaacacatcagaggtagtttatttaaaagttggcaaacccactaccatttatatgactgatccttatggtccacctgatattactcactcttattctccaccaatggaaaaccatctactctctggcaacaatggcactttagaatataaaacctccctgccacccatctctccaggaaggtactcaccaattccaaagcacatgcttgttgacgacgactacaccaggcctccggaacctgtttacagcactgtgaacaaactatgtgataagcctgcttctcccaggcactattcccctgttgagtgtgacaaaagcttcctcctctcagctccctattcccactaccacctaggcctgctacctgactctgagatgaccagtcattcccaacatagcaccgcaactcgtcagccttcaatgactctccaacgggccgtctccctggaaggagagcctcgcaaggtagtcctgcacaaaggctccactggcctgggcttcaacattgtcggtggggaagatggagaaggtatttttgtgtccttcattctggctggtggaccagcagacctaagtggggagctccagagaggagaccagatcctatcggtgaatggcattgacctccgtggtgcatcccacgagcaggcagctgctgcactaaagggggctggacagacagtgacgattatagcacaatatcaacctgaagattacgctcgatttgaggccaaaatccatgacctacgagagcagatgatgaaccacagcatgagctccgggtccggatccctgcgaaccaatcagaaacgctccctctacgtcagagccatgttcgactacgacaagagcaaggacagtgggctgccaagtcaaggacttagttttaaatatggagatattctccacgttatcaatgcctctgatgatgagtggtggcaagccaggagagtcatgctggagggagacagtgaggagatgggggtcatccccagcaaaaggagggtggaaagaaaggaacgtgcccgattgaagacagtgaagtttaatgccaaacctggagtgattgattcgaaagggtcattcaatgacaagcgtaaaaagagcttcatcttttcacgaaaattcccattctacaagaacaaggagcagagtgagcaggaaaccagtgatcctgaacgaggacaagaagacctcattctttcctatgagcctgttacaaggcaggaaataaactacacccggccggtgattatcctggggcccatgaaggatcggatcaatgacgacttgatatctgaattccctgataaatttggctcctgtgtgcctcatactacgaggccaaagcgagactacgaggtggatggcagagactatcactttgtcatttccagagaacaaatggagaaagatatccaagagcacaagtttatagaagccggccagtacaatgacaatttatatggaaccagtgtgcagtctgtgagatttgtagcagaaagaggcaaacactgtatacttgatgtatcaggaaatgctatcaagcggttacaagttgcccagctctatcccattgccatcttcataaaacccaggtctctggaacctcttatggagatgaataagcgtctaacagaggaacaagccaagaaaacctatgatcgagcaattaagctagaacaagaatttggagaatattttacagctattgtccaaggagatactttagaagatatatataaccaatgcaagcttgttattgaagagcaatctgggcctttcatctggattccctcaaaggaaaagttataaattagctactgcgcctctgacaacgacagaagagcatttagaagaacaaaatatatataacatactacttggaggcttttatgtttttgttgcatttatgtttttgcagtcaatgtgaattcttacgaatgtacaacacaaactgtatgaagccatgaaggaaacagaggggccaaagggtgggacagaaaagacattgcagtatgaaggaaggctttggtttgctcaaagtgccaggtgtagggatgaacctctgacgggctttctgcccaagagatgagatgagagcctcctcaccccagcagatgtccagagctgatttagctgcagagctctctgtgtcttttgctttaaagaaaaattgccagcactcgaacctcatcagccttcccattacccacatctgtaattggtacactttgaattttataactatgcacatcttttgatttcttaacaagcaaatgaaagaaagaaggaaaaaagaaaggaatccctttggagatgacatactatcagggaaggataagtgtgtagttttttgactggcatctgcaaagacaagaatttcataaaatttgcaagtgtatggaggactaacctcactgacaggaggggattccacctgggattagctttatgattgttgattgcctattttgccatttataaactgaaagaaggcactaaagatgagaataatttatacaataaaaatatattaaatgtatagaaacaaatttctataggttaaaaaagttttgtgaaatattttgtaaagactaatattgaaagactaaatgtatgcaacatcagcagatgatcaaattcaagacctgaaagttgcactctcccttttgttgccaatgatctgttaagagcatctgagttccttttaagtctgacaaagacttcttcctcacttacctcccttccacattagtgatacactctcatgcagcacatcccttaatgagttgccctcatggatatttttggaagacatttggttaatgcatttttttatgctgatggcttttcagagacaaacttatgcaaatgatctaaagggaagtttttgctttcctctagttaaataacctgagcctgccatgcaaatagttgaataactttgttcctagttactgacatacaattcttaaaggaccatttagcattttggccaacaatgagtaattaggattagtacctttttgttttacagagtaactgagagttttgtaacatccagagatggtactagagccaatgagagatctgttcctagatgcactatttctttgaggaagagagagaagagaagtgtctggttgggggtgagggggtgcagacttttttgtttctatgtacagagcaaagagatagagtcacaaggaaagacaattaatgactttgagctcaaccaactgaactgcctttcttggagctgcacctggaccaagtttattttttaacaattataataacgatgatttaaaaaaagaaacctcccaaagcctataaactgaactagaagagttggtttcccactttagagtggatggcgacatcagcattgcttttgcccatggtgtttggggagagacttttcagtgataataaccactctactctgggttctgtgcatgcccagactaagccccatcgccttatttctggggtacatccagacctggcagggattctgccacactgtgcagcaaaccagcatgtaggctgggtaggagagcaagagatagagccatcagagtgatggggcttcttcacagtaagaacatcggagcttagaatgagagtctctttccaaaaacaggcattgttcatcttacgctaaacatcattgtctgcctggctacagtcaccaaaacaaaacagaaatgcaaaattatgcatcttcccatagtcctgaggcttcctttgccaatggaagggctagcaatgcattctccctctcatgaaagttaaatttccagagacttccttagattgctcaaaatgttaaagatatgtccatgtctgcaattcgccagtttcaggtcaaggcctactttcatcaatattgctcccagaagttttctgacaccagaatgccattcctgatcccagctctatttttaggccaccacgataacttctttggtttctcaactgagcatgcaaccatttatttaaaagactgtcattaatgagtagatgttttcgcgggtcgtgtgatgtgctttccatttactagtgttgctgtggctaagtacaatcaaattgaaccaccaacccttggttttgtagtaatataactatttattttcctagtgtagatgctttcagattagaattggcatttgcactgatttttttatgtagatttatataaatatatagatacatatatatttgcttgaagaatcaccaagcaaattggtgagagggtcttttccaatagaatttacacctccatttgttgtgttgtcttgcacttcccaatgttgatgtctctatggctccaatgaactggtgtattttgcagcaaatctgatgacttgtatggaaatggcatgaaagttacccagattacatctggtgcaaatgcactcggagcctggggccagactggtgctaacactgcaaactttgtccagagctctctccaacctgaaggcttgctgggggtgcaatgtcaccttcacacatgctgggccctttcagaaaagtgccagatcgtgtaactggtgctatttttcatgctctggtacaatgtgtagcaccacgggggtctcagctttaccaaaatcaaaattccatttgtcagctaagtgcagaggcatttgttttttgctctcctcccacagaattgtcggccatttatttgcaggccttttgcgggatttcttggctatttatttgcaggccttttttcccagccccaaattcttgggttggctctgtctgcttaaagagcctgtcttcacaaagctgcactcgggtgcctctgtgcgctgtcttagatcctactgccggcccttcaggactccgagccaggaaagaactctccaacctctggctcgagactctactttttttctcattcttttccttactctcctcctccttctacttccgactaattccatctctttttttttttgttcctctccttttcctattcctccttcccaccatctctgagttgttgactttctcctataatccttctctattccctttctctttttgtccacctctcctttagtctctgtttctctgcccttcttattcctcttctgtcctttctcctctcctcaaatctctgatcatcttctcccgtacatccctgtattgatttttctgtcctctaaagggctcatggctgattcagacagcaagtccatgcactggactaatgacacaaatactttaggtcgccgtttcacctactcagcccagaaagtaaagctgagcgtgaggccctgacctggagcctgctccagcccgcctcccggagccagcctgcaccgttgccctggcagcgatgatgcatgtgctgtgggccctgccggcgcctgagtgcctctgcctgaacactgctcctaagcgagcccactcccagcactaccgcatggctctgaggacattttctttcaataaaggcagactctggccccaattattctgatagcaaacctcttcctcctcattgaagccatgccatcaccttggtttggagagagacatttttttcccattcataagctttctttttcccatttttatgtgaagccccctctgcttttcagctggtgattgctctggtgagactgaatggacttgctggtgaaatgaaatctcttctttcctgtcttggtcctgcctaaattcctacaaatatatttaagccaaggactcaggctaattcctaagttgatcacattaatttgttactcctagagggaaaaagatcaattcccttgaagcatgtggagtacctcctgtgacagctgacttgccaggggactccctacagaattctgtgatatacattttacttctgtgtatgtatggtatatatggtatgtataccatgtacacacgttacattgagtatgaatgactgtggttggaaacacacacacacactcaagtctgtaaatatccttcctcactgaaacctgtgctttggaaatcatttcttgtacagctgtgcagtttcttgtaacagctgaggacaaagctaagacaggcggacaatttagacaaagatcatctaaagagtatagtatctccctagcaactcatgaggacagacaaccaagtggcaaggttgactcccaatgggatggcagacttttcttctctcctttttgagtttgtgtttcctaagtgtttcttaacttctgagtgcaccaggctgtacccgttagatcctttcaatatgacagttttgtgcttctctctgacaggatgtttctccaccgagctgtagcacaggatgggagggaggtgggaatactccttgcctaggctggagtttacagagacactgcacagcttacactcctgttaagtgtaaatattcaacacttccattccatttgtgtaaaaaataaagcacacacgattataaaatcaagatgtatatttcatactcagtgtgtctgtgcatatttattgcgtttctagttgtcagcggtgggtggccccattgtaaaaatgcctgatagagtgtttataaacatgtcatggttttattataagatataaatattaaaacattttatactttatggcaaa

SEQ ID NO: 127337 - DNA, 1831 bp, Homo sapiens
  Payload ID: 4918
  Gene Symbol: DLG2
  Gene Name: discs, large homolog 2 (Drosophila)
  ENST ID: ENST00000404783
  CDS Start-End: 313-1359
atatttatcaggatgagttacaaggaaatatatgtacccagtgagcgagaatgctgcatggtcaccccctgtgatgtaaaatatgagaatctaggaggggctgttttataattcatcaggttccgctagtgagttctgtcagagtcttagttataaaggcaagtgtgaaccggacagcagacaggagaacctggcaccaaggagacggagaagctgcctttggtgcctcctgcctcctccctgctttgttccaataattttgtgctcgattacgctcgatttgaggccaaaatccatgacctacgagagcagatgatgaaccacagcatgagctccgggtccggatccctgcgaaccaatcagaaacgctccctctacgtcagagccatgttcgactacgacaagagcaaggacagtgggctgccaagtcaaggacttagttttaaatatggagatattctccacgttatcaatgcctctgatgatgagtggtggcaagccaggagagtcatgctggagggagacagtgaggagatgggggtcatccccagcaaaaggagggtggaaagaaaggaacgtgcccgattgaagacagtgaagtttaatgccaaacctggagtgattgattcgaaaggggacatccccggattaggtgacgacggttatggaacaaagactctgaaacatgtttcttctaatgccagcgatagcgaaagtagctaccgaggacaagaagacctcattctttcctatgagcctgttacaaggcaggaaataaactacacccggccggtgattatcctggggcccatgaaggatcggatcaatgacgacttgatatctgaattccctgataaatttggctcctgtgtgcctcatactacgaggccaaagcgagactacgaggtggatggcagagactatcactttgtcatttccagagaacaaatggagaaagatatccaagagcacaagtttatagaagccggccagtacaatgacaatttatatggaaccagtgtgcagtctgtgagatttgtagcagaaagaggcaaacactgtatacttgatgtatcaggaaatgctatcaagcggttacaagttgcccagctctatcccattgccatcttcataaaacccaggtctctggaacctcttatggagatgaataagcgtctaacagaggaacaagccaagaaaacctatgatcgagcaattaagctagaacaagaatttggagaatattttacagctattgtccaaggagatactttagaagatatatataaccaatgcaagcttgttattgaagagcaatctgggcctttcatctggattccctcaaaggaaaagttataaattagctactgcgcctctgacaacgacagaagagcatttagaagaacaaaatatatataacatactacttggaggcttttatgtttttgttgcatttatgtttttgcagtcaatgtgaattcttacgaatgtacaacacaaactgtatgaagccatgaaggaaacagaggggccaaagggtgggacagaaaagacattgcagtatgaaggaaggctttggtttgctcaaagtgccaggtgtagggatgaacctctgacgggctttctgcccaagagatgagatgagagcctcctcaccccagcagatgtccagagctgatttagctgcagagctctctgtgtcttttgctttaaagaaaaattgccagcactcgaacctcatcagccttcccattacccacatctgtaattggtacactttgaattttataactatgcacatcttttgatttcttaacaagcaaatgaaaga

SEQ ID NO: 127338 - DNA, 849 bp, Homo sapiens
  Payload ID: 4918
  Gene Symbol: DLG2
  Gene Name: discs, large homolog 2 (Drosophila)
  ENST ID: ENST00000420775
  CDS Start-End: 186-849
agtgagttctgtcagagtcttagttataaaggcaagtgtgaaccggacagcagacaggagaacctggcaccaaggagacggagaagctgcctttggtgcctcctgcctcctccctgctttgttccaataattttgtgctcgattacgctcgatttgaggccaaaatccatgacctacgagagcagatgatgaaccacagcatgagctccgggtccggatccctgcgaaccaatcagaaacgctccctctacgtcagagccatgttcgactacgacaagagcaaggacagtgggctgccaagtcaaggacttagttttaaatatggagatattctccacgttatcaatgcctctgatgatgagtggtggcaagccaggagagtcatgctggagggagacagtgaggagatgggggtcatccccagcaaaaggagggtggaaagaaaggaacgtgcccgattgaagacagtgaagtttaatgccaaacctggagtgattgattcgaaagggtcattcaatgacaagcgtaaaaagagcttcatcttttcacgaaaattcccattctacaagaacaaggagcagagtgagcaggaaaccagtgatcctgaacgaggacaagaagacctcattctttcctatgagcctgttacaaggcaggaaataaactacacccggccggtgattatcctggggcccatgaaggatcggatcaatgacgacttgatatctgaattccctgataaatttggctcctgtgtgcctcatactacgaggccaaagcgagactacgaggtggatggcagagactatcactttgtcatttccagagaacaaatggagaaagatatcc

SEQ ID NO: 127339 - DNA, 5927 bp, Homo sapiens
  Payload ID: 4918
  Gene Symbol: DLG2
  Gene Name: discs, large homolog 2 (Drosophila)
  Uniprot ID: Q15700
  ENST ID: ENST00000426717
  CDS Start-End: 282-1286
atgtacccagtgagcgagaatgctgcatggtcaccccctgtgatgtaaaatatgagaatctaggaggggctgttttataattcatcaggttccgctagtgagttctgtcagagtcttagttataaaggcaagtgtgaaccggacagcagacaggagaacctggcaccaaggagacggagaagctgcctttggtgcctcctgcctcctccctgctttgttccaataattttgtgctcgattacgctcgatttgaggccaaaatccatgacctacgagagcagatgatgaaccacagcatgagctccgggtccggatccctgcgaaccaatcagaaacgctccctctacgtcagagccatgttcgactacgacaagagcaaggacagtgggctgccaagtcaaggacttagttttaaatatggagatattctccacgttatcaatgcctctgatgatgagtggtggcaagccaggagagtcatgctggagggagacagtgaggagatgggggtcatccccagcaaaaggagggtggaaagaaaggaacgtgcccgattgaagacagtgaagtttaatgccaaacctggagtgattgattcgaaaggggacatccccggattaggtgacgacggttatggaacaaagactctgagaggacaagaagacctcattctttcctatgagcctgttacaaggcaggaaataaactacacccggccggtgattatcctggggcccatgaaggatcggatcaatgacgacttgatatctgaattccctgataaatttggctcctgtgtgcctcatactacgaggccaaagcgagactacgaggtggatggcagagactatcactttgtcatttccagagaacaaatggagaaagatatccaagagcacaagtttatagaagccggccagtacaatgacaatttatatggaaccagtgtgcagtctgtgagatttgtagcagaaagaggcaaacactgtatacttgatgtatcaggaaatgctatcaagcggttacaagttgcccagctctatcccattgccatcttcataaaacccaggtctctggaacctcttatggagatgaataagcgtctaacagaggaacaagccaagaaaacctatgatcgagcaattaagctagaacaagaatttggagaatattttacagctattgtccaaggagatactttagaagatatatataaccaatgcaagcttgttattgaagagcaatctgggcctttcatctggattccctcaaaggaaaagttataaattagctactgcgcctctgacaacgacagaagagcatttagaagaacaaaatatatataacatactacttggaggcttttatgtttttgttgcatttatgtttttgcagtcaatgtgaattcttacgaatgtacaacacaaactgtatgaagccatgaaggaaacagaggggccaaagggtgggacagaaaagacattgcagtatgaaggaaggctttggtttgctcaaagtgccaggtgtagggatgaacctctgacgggctttctgcccaagagatgagatgagagcctcctcaccccagcagatgtccagagctgatttagctgcagagctctctgtgtcttttgctttaaagaaaaattgccagcactcgaacctcatcagccttcccattacccacatctgtaattggtacactttgaattttataactatgcacatcttttgatttcttaacaagcaaatgaaagaaagaaggaaaaaagaaaggaatccctttggagatgacatactatcagggaaggataagtgtgtagttttttgactggcatctgcaaagacaagaatttcataaaatttgcaagtgtatggaggactaacctcactgacaggaggggattccacctgggattagctttatgattgttgattgcctattttgccatttataaactgaaagaaggcactaaagatgagaataatttatacaataaaaatatattaaatgtatagaaacaaatttctataggttaaaaaagttttgtgaaatattttgtaaagactaatattgaaagactaaatgtatgcaacatcagcagatgatcaaattcaagacctgaaagttgcactctcccttttgttgccaatgatctgttaagagcatctgagttccttttaagtctgacaaagacttcttcctcacttacctcccttccacattagtgatacactctcatgcagcacatcccttaatgagttgccctcatggatatttttggaagacatttggttaatgcatttttttatgctgatggcttttcagagacaaacttatgcaaatgatctaaagggaagtttttgctttcctctagttaaataacctgagcctgccatgcaaatagttgaataactttgttcctagttactgacatacaattcttaaaggaccatttagcattttggccaacaatgagtaattaggattagtacctttttgttttacagagtaactgagagttttgtaacatccagagatggtactagagccaatgagagatctgttcctagatgcactatttctttgaggaagagagagaagagaagtgtctggttgggggtgagggggtgcagacttttttgtttctatgtacagagcaaagagatagagtcacaaggaaagacaattaatgactttgagctcaaccaactgaactgcctttcttggagctgcacctggaccaagtttattttttaacaattataataacgatgatttaaaaaaagaaacctcccaaagcctataaactgaactagaagagttggtttcccactttagagtggatggcgacatcagcattgcttttgcccatggtgtttggggagagacttttcagtgataataaccactctactctgggttctgtgcatgcccagactaagccccatcgccttatttctggggtacatccagacctggcagggattctgccacactgtgcagcaaaccagcatgtaggctgggtaggagagcaagagatagagccatcagagtgatggggcttcttcacagtaagaacatcggagcttagaatgagagtctctttccaaaaacaggcattgttcatcttacgctaaacatcattgtctgcctggctacagtcaccaaaacaaaacagaaatgcaaaattatgcatcttcccatagtcctgaggcttcctttgccaatggaagggctagcaatgcattctccctctcatgaaagttaaatttccagagacttccttagattgctcaaaatgttaaagatatgtccatgtctgcaattcgccagtttcaggtcaaggcctactttcatcaatattgctcccagaagttttctgacaccagaatgccattcctgatcccagctctatttttaggccaccacgataacttctttggtttctcaactgagcatgcaaccatttatttaaaagactgtcattaatgagtagatgttttcgcgggtcgtgtgatgtgctttccatttactagtgttgctgtggctaagtacaatcaaattgaaccaccaacccttggttttgtagtaatataactatttattttcctagtgtagatgctttcagattagaattggcatttgcactgatttttttatgtagatttatataaatatatagatacatatatatttgcttgaagaatcaccaagcaaattggtgagagggtcttttccaatagaatttacacctccatttgttgtgttgtcttgcacttcccaatgttgatgtctctatggctccaatgaactggtgtattttgcagcaaatctgatgacttgtatggaaatggcatgaaagttacccagattacatctggtgcaaatgcactcggagcctggggccagactggtgctaacactgcaaactttgtccagagctctctccaacctgaaggcttgctgggggtgcaatgtcaccttcacacatgctgggccctttcagaaaagtgccagatcgtgtaactggtgctatttttcatgctctggtacaatgtgtagcaccacgggggtctcagctttaccaaaatcaaaattccatttgtcagctaagtgcagaggcatttgttttttgctctcctcccacagaattgtcggccatttatttgcaggccttttgcgggatttcttggctatttatttgcaggccttttttcccagccccaaattcttgggttggctctgtctgcttaaagagcctgtcttcacaaagctgcactcgggtgcctctgtgcgctgtcttagatcctactgccggcccttcaggactccgagccaggaaagaactctccaacctctggctcgagactctactttttttctcattcttttccttactctcctcctccttctacttccgactaattccatctctttttttttttgttcctctccttttcctattcctccttcccaccatctctgagttgttgactttctcctataatccttctctattccctttctctttttgtccacctctcctttagtctctgtttctctgcccttcttattcctcttctgtcctttctcctctcctcaaatctctgatcatcttctcccgtacatccctgtattgatttttctgtcctctaaagggctcatggctgattcagacagcaagtccatgcactggactaatgacacaaatactttaggtcgccgtttcacctactcagcccagaaagtaaagctgagcgtgaggccctgacctggagcctgctccagcccgcctcccggagccagcctgcaccgttgccctggcagcgatgatgcatgtgctgtgggccctgccggcgcctgagtgcctctgcctgaacactgctcctaagcgagcccactcccagcactaccgcatggctctgaggacattttctttcaataaaggcagactctggccccaattattctgatagcaaacctcttcctcctcattgaagccatgccatcaccttggtttggagagagacatttttttcccattcataagctttctttttcccatttttatgtgaagccccctctgcttttcagctggtgattgctctggtgagactgaatggacttgctggtgaaatgaaatctcttctttcctgtcttggtcctgcctaaattcctacaaatatatttaagccaaggactcaggctaattcctaagttgatcacattaatttgttactcctagagggaaaaagatcaattcccttgaagcatgtggagtacctcctgtgacagctgacttgccaggggactccctacagaattctgtgatatacattttacttctgtgtatgtatggtatatatggtatgtataccatgtacacacgttacattgagtatgaatgactgtggttggaaacacacacacacactcaagtctgtaaatatccttcctcactgaaacctgtgctttggaaatcatttcttgtacagctgtgcagtttcttgtaacagctgaggacaaagctaagacaggcggacaatttagacaaagatcatctaaagagtatagtatctccctagcaactcatgaggacagacaaccaagtggcaaggttgactcccaatgggatggcagacttttcttctctcctttttgagtttgtgtttcctaagtgtttcttaacttctgagtgcaccaggctgtacccgttagatcctttcaatatgacagttttgtgcttctctctgacaggatgtttctccaccgagctgtagcacaggatgggagggaggtgggaatactccttgcctaggctggagtttacagagacactgcacagcttacactcctgttaagtgtaaatattcaacacttccattccatttgtgtaaaaaataaagcacacacgattataaaa

SEQ ID NO: 127340 - DNA, 3027 bp, Homo sapiens
  Payload ID: 4918
  Gene Symbol: DLG2
  Gene Name: discs, large homolog 2 (Drosophila)
  Uniprot ID: Q15700
  ENST ID: ENST00000418306
  CDS Start-End: 26-2275
agtttgagtgttaccagctttcgctatgcaacggccaagtgtttctcgggctgagaattatcagcttttgtgggatactattgcttccttaaaacaatgtgaacaagctatgcaacatgcatttattccggtcaatgggacagaaattgaatatgaatttgaagaaattacactggagagggggaattctggcctgggattcagtattgctggggggacagataatccccacattggagatgaccctggcatatttattacgaagattataccaggaggtgctgcagcagaggatggcagactcagggtcaatgattgtatcttgcgggtgaatgaggttgatgtgtcagaggtttcccacagtaaagcggtggaagccctgaaggaagcagggtctatcgttcggctgtatgtgcgtagaagacgacctattttggagaccgttgtggaaatcaaactgttcaaaggccctaaaggtttaggcttcagtattgcaggaggtgtggggaaccaacacattcctggagacaacagcatttatgtaactaaaattatagatggaggagctgcacaaaaagatggaaggttgcaagtaggagatagactactaatggtaaacaactacagtttagaagaagtaacacacgaagaggcagtagcaatattaaagaacacatcagaggtagtttatttaaaagttggcaaacccactaccatttatatgactgatccttatggtccacctgatattactcactcttattctccaccaatggaaaaccatctactctctggcaacaatggcactttagaatataaaacctccctgccacccatctctccaggaaggtactcaccaattccaaagcacatgcttgttgacgacgactacaccagtcattcccaacatagcaccgcaactcgtcagccttcaatgactctccaacgggccgtctccctggaaggagagcctcgcaaggtagtcctgcacaaaggctccactggcctgggcttcaacattgtcggtggggaagatggagaaggtatttttgtgtccttcattctggctggtggaccagcagacctaagtggggagctccagagaggagaccagatcctatcggtgaatggcattgacctccgtggtgcatcccacgagcaggcagctgctgcactaaagggggctggacagacagtgacgattatagcacaatatcaacctgaagattacgctcgatttgaggccaaaatccatgacctacgagagcagatgatgaaccacagcatgagctccgggtccggatccctgcgaaccaatcagaaacgctccctctacgtcagagccatgttcgactacgacaagagcaaggacagtgggctgccaagtcaaggacttagttttaaatatggagatattctccacgttatcaatgcctctgatgatgagtggtggcaagccaggagagtcatgctggagggagacagtgaggagatgggggtcatccccagcaaaaggagggtggaaagaaaggaacgtgcccgattgaagacagtgaagtttaatgccaaacctggagtgattgattcgaaaggggacatccccggattaggtgacgacggttatggaacaaagactctgagaggacaagaagacctcattctttcctatgagcctgttacaaggcaggaaataaactacacccggccggtgattatcctggggcccatgaaggatcggatcaatgacgacttgatatctgaattccctgataaatttggctcctgtgtgcctcatactacgaggccaaagcgagactacgaggtggatggcagagactatcactttgtcatttccagagaacaaatggagaaagatatccaagagcacaagtttatagaagccggccagtacaatgacaatttatatggaaccagtgtgcagtctgtgagatttgtagcagaaagaggcaaacactgtatacttgatgtatcaggaaatgctatcaagcggttacaagttgcccagctctatcccattgccatcttcataaaacccaggtctctggaacctcttatggagatgaataagcgtctaacagaggaacaagccaagaaaacctatgatcgagcaattaagctagaacaagaatttggagaatattttacagctattgtccaaggagatactttagaagatatatataaccaatgcaagcttgttattgaagagcaatctgggcctttcatctggattccctcaaaggaaaagttataaattagctactgcgcctctgacaacgacagaagagcatttagaagaacaaaatatatataacatactacttggaggcttttatgtttttgttgcatttatgtttttgcagtcaatgtgaattcttacgaatgtacaacacaaactgtatgaagccatgaaggaaacagaggggccaaagggtgggacagaaaagacattgcagtatgaaggaaggctttggtttgctcaaagtgccaggtgtagggatgaacctctgacgggctttctgcccaagagatgagatgagagcctcctcaccccagcagatgtccagagctgatttagctgcagagctctctgtgtcttttgctttaaagaaaaattgccagcactcgaacctcatcagccttcccattacccacatctgtaattggtacactttgaattttataactatgcacatcttttgatttcttaacaagcaaatgaaagaaagaaggaaaaaagaaaggaatccctttggagatgacatactatcagggaaggataagtgtgtagttttttgactggcatctgcaaagacaagaatttcataaaatttgcaagtgtatggaggactaacctcactgacaggaggggattccacctgggattagctttatgattgttgattgcctattttgccatttataaactgaaagaaggcactaaagatgagaataatttatacaataaaaatatattaaatgtatagaaacaaatttctataggtt

SEQ ID NO: 127341 - DNA, 442 bp, Homo sapiens
  Payload ID: 4918
  Gene Symbol: DLG2
  Gene Name: discs, large homolog 2 (Drosophila)
  ENST ID: ENST00000434967
  CDS Start-End: 117-442
agagctgaatttgggaagcagctgcctgctatgctgaaaacccctggaaacttgctaaagagctgtggtgccgatatcacataagatttcaccagggcttcttctagccagaagacatgtcctttgacagccaatgtgaccttcgtagctctgagccagattacgctcgatttgaggccaaaatccatgacctacgagagcagatgatgaaccacagcatgagctccgggtccggatccctgcgaaccaatcagaaacgctccctctacgtcagagccatgttcgactacgacaagagcaaggacagtgggctgccaagtcaaggacttagttttaaatatggagatattctccacgttatcaatgcctctgatgatgagtggtggcaagccaggagagtcatgctggagggagacagtgaggagatgggggtcatccccag

SEQ ID NO: 127342 - DNA, 496 bp, Homo sapiens
  Payload ID: 4918
  Gene Symbol: DLG2
  Gene Name: discs, large homolog 2 (Drosophila)
  ENST ID: ENST00000457267
  CDS Start-End: 1-496
cgtaaaaagagcttcatcttttcacgaaaattcccattctacaagaacaaggagcagagtgagcaggaaaccagtgatcctgaactaaactacacccggccggtgattatcctggggcccatgaaggatcggatcaatgacgacttgatatctgaattccctgataaatttggctcctgtgtgcctcatactacgaggccaaagcgagactacgaggtggatggcagagactatcactttgtcatttccagagaacaaatggagaaagatatccaagagcacaagtttatagaagccggccagtacaatgacaatttatatggaaccagtgtgcagtctgtgagatttgtagcagaaagaggcaaacactgtatacttgatgtatcaggaaatgctatcaagcggttacaagttgcccagctctatcccattgccatcttcataaaacccaggtctctggaacctcttatggagatgaataagcgtctaacagagg

SEQ ID NO: 127343 - DNA, 2872 bp, Homo sapiens
  Payload ID: 4918
  Gene Symbol: DLG2
  Gene Name: discs, large homolog 2 (Drosophila)
  ENST ID: ENST00000524982
  CDS Start-End: 63-2663
gtgtggggcttgcgctgtgctgagaagctgaataccggtccatatgctccttatttactgcaatgttctttgcatgttactgtgcactccggactaacgtgaagaagtatcgatatcaagatgaggacgctccacatgatcattccttacctcgactaacccacgaagtaagaggcccagaactcgtgcatgtatcagaaaagaacctctctcaaatagaaaatgtccatggatatgtcttgcagtctcatatttctcctctgaaggccagtcctgctcctataattgtcaacacagatactttggacacaattccttatgtcaatgggacagaaattgaatatgaatttgaagaaattacactggagagggggaattctggcctgggattcagtattgctggggggacagataatccccacattggagatgaccctggcatatttattacgaagattataccaggaggtgctgcagcagaggatggcagactcagggtcaatgattgtatcttgcgggtgaatgaggttgatgtgtcagaggtttcccacagtaaagcggtggaagccctgaaggaagcagggtctatcgttcggctgtatgtgcgtagaagacgacctattttggagaccgttgtggaaatcaaactgttcaaaggccctaaaggtttaggcttcagtattgcaggaggtgtggggaaccaacacattcctggagacaacagcatttatgtaactaaaattatagatggaggagctgcacaaaaagatggaaggttgcaagtaggagatagactactaatggtaaacaactacagtttagaagaagtaacacacgaagaggcagtagcaatattaaagaacacatcagaggtagtttatttaaaagttggcaaacccactaccatttatatgactgatccttatggtccacctgatattactcactcttattctccaccaatggaaaaccatctactctctggcaacaatggcactttagaatataaaacctccctgccacccatctctccaggaaggtactcaccaattccaaagcacatgcttgttgacgacgactacaccaggcctccggaacctgtttacagcactgtgaacaaactatgtgataagcctgcttctcccaggcactattcccctgttgagtgtgacaaaagcttcctcctctcagctccctattcccactaccacctaggcctgctacctgactctgagatgaccagtcattcccaacatagcaccgcaactcgtcagccttcaatgactctccaacgggccgtctccctggaaggagagcctcgcaaggtagtcctgcacaaaggctccactggcctgggcttcaacattgtcggtggggaagatggagaaggtatttttgtgtccttcattctggctggtggaccagcagacctaagtggggagctccagagaggagaccagatcctatcggtgaatggcattgacctccgtggtgcatcccacgagcaggcagctgctgcactaaagggggctggacagacagtgacgattatagcacaatatcaacctgaagattacgctcgatttgaggccaaaatccatgacctacgagagcagatgatgaaccacagcatgagctccgggtccggatccctgcgaaccaatcagaaacgctccctctacgtcagagccatgttcgactacgacaagagcaaggacagtgggctgccaagtcaaggacttagttttaaatatggagatattctccacgttatcaatgcctctgatgatgagtggtggcaagccaggagagtcatgctggagggagacagtgaggagatgggggtcatccccagcaaaaggagggtggaaagaaaggaacgtgcccgattgaagacagtgaagtttaatgccaaacctggagtgattgattcgaaaggggacatccccggattaggtgacgacggttatggaacaaagactctgaaacatgtttcttctaatgccagcgatagcgaaagtagctaccgaggacaagaagacctcattctttcctatgagcctgttacaaggcaggaaataaactacacccggccggtgattatcctggggcccatgaaggatcggatcaatgacgacttgatatctgaattccctgataaatttggctcctgtgtgcctcatactacgaggccaaagcgagactacgaggtggatggcagagactatcactttgtcatttccagagaacaaatggagaaagatatccaagagcacaagtttatagaagccggccagtacaatgacaatttatatggaaccagtgtgcagtctgtgagatttgtagcagaaagaggcaaacactgtatacttgatgtatcaggaaatgctatcaagcggttacaagttgcccagctctatcccattgccatcttcataaaacccaggtctctggaacctcttatggagatgaataagcgtctaacagaggaacaagccaagaaaacctatgatcgagcaattaagctagaacaagaatttggagaatattttacagctattgtccaaggagatactttagaagatatatataaccaatgcaagcttgttattgaagagcaatctgggcctttcatctggattccctcaaaggaaaagttataaattagctactgcgcctctgacaacgacagaagagcatttagaagaacaaaatatatataacatactacttggaggcttttatgtttttgttgcatttatgtttttgcagtcaatgtgaattcttacgaatgtacaacacaaactgtatgaagccatgaaggaaacagaggggccaaagggtgggacagaaaagacattgcagtatgaag

SEQ ID NO: 127344 - DNA, 2892 bp, Homo sapiens
  Payload ID: 4918
  Gene Symbol: DLG2
  Gene Name: discs, large homolog 2 (Drosophila)
  ENST ID: ENST00000531015
  CDS Start-End: 26-2461
agtttgagtgttaccagctttcgctatgcaacggccaagtgtttctcgggctgagaattatcagcttttgtgggatactattgcttccttaaaacaatgtgaacaagctatgcaacatgcatttattccggccagtcctgctcctataattgtcaacacagatactttggacacaattccttatgtcaatgggacagaaattgaatatgaatttgaagaaattacactggagagggggaattctggcctgggattcagtattgctggggggacagataatccccacattggagatgaccctggcatatttattacgaagattataccaggaggtgctgcagcagaggatggcagactcagggtcaatgattgtatcttgcgggtgaatgaggttgatgtgtcagaggtttcccacagtaaagcggtggaagccctgaaggaagcagggtctatcgttcggctgtatgtgcgtagaagacgacctattttggagaccgttgtggaaatcaaactgttcaaaggccctaaaggtttaggcttcagtattgcaggaggtgtggggaaccaacacattcctggagacaacagcatttatgtaactaaaattatagatggaggagctgcacaaaaagatggaaggttgcaagtaggagatagactactaatggtaaacaactacagtttagaagaagtaacacacgaagaggcagtagcaatattaaagaacacatcagaggtagtttatttaaaagttggcaaacccactaccatttatatgactgatccttatggtccacctgatattactcactcttattctccaccaatggaaaaccatctactctctggcaacaatggcactttagaatataaaacctccctgccacccatctctccaggaaggtactcaccaattccaaagcacatgcttgttgacgacgactacaccaggcctccggaacctgtttacagcactgtgaacaaactatgtgataagcctgcttctcccaggcactattcccctgttgagtgtgacaaaagcttcctcctctcagctccctattcccactaccacctaggcctgctacctgactctgagatgaccagtcattcccaacatagcaccgcaactcgtcagccttcaatgactctccaacgggccgtctccctggaaggagagcctcgcaaggtagtcctgcacaaaggctccactggcctgggcttcaacattgtcggtggggaagatggagaaggtatttttgtgtccttcattctggctggtggaccagcagacctaagtggggagctccagagaggagaccagatcctatcggtgaatggcattgacctccgtggtgcatcccacgagcaggcagctgctgcactaaagggggctggacagacagtgacgattatagcacaatatcaacctgaagattacgctcgatttgaggccaaaatccatgacctacgagagcagatgatgaaccacagcatgagctccgggtccggatccctgcgaaccaatcagaaacgctccctctacgtcagagccatgttcgactacgacaagagcaaggacagtgggctgccaagtcaaggacttagttttaaatatggagatattctccacgttatcaatgcctctgatgatgagtggtggcaagccaggagagtcatgctggagggagacagtgaggagatgggggtcatccccagcaaaaggagggtggaaagaaaggaacgtgcccgattgaagacagtgaagtttaatgccaaacctggagtgattgattcgaaagggtcattcaatgacaagcgtaaaaagagcttcatcttttcacgaaaattcccattctacaagaacaaggagcagagtgagcaggaaaccagtgatcctgaacgaggacaagaagacctcattctttcctatgagcctgttacaaggcaggaaataaactacacccggccggtgattatcctggggcccatgaaggatcggatcaatgacgacttgatatctgaattccctgataaatttggctcctgtgtgcctcatactacgaggccaaagcgagactacgaggtggatggcagagactatcactttgtcatttccagagaacaaatggagaaagatatccaagagcacaagtttatagaagccggccagtacaatgacaatttatatggaaccagtgtgcagtctgtgagatttgtagcagaaagaggcaaacactgtatacttgatgtatcaggaaatgctatcaagcggttacaagttgcccagctctatcccattgccatcttcataaaacccaggtctctggaacctcttatggagatgaataagcgtctaacagaggaacaagccaagaaaacctatgatcgagcaattaagctagaacaagaatttggagaatattttacaggtaagttcacttttaccctggtagtgtgagaaaggggataaattgtctgacatttggcacagagagggttctgggcctggtgtacttgtgccctaaaaccttcctgttgagaatccctaatatctgtttcatatacaaggagtatccctctgcttcacccattttgatgtaaaaccctgggttctcctgagagttcagctgcagccagctcccaggttcccaccagccctacccaaaaccatgggcaggagatacccctgagctatctcctaccatgaaaaggatttgaggcattgctacctcattaaactatctccctgatatcatcagaaaacttgaaaaacaaaattttagggctcaaaatggtcagtgtccaaagcagttactcttgagaagaagcttggaggcgtccgtccccagctccatgagctttcatcagtgtccctatcagcagcacctg

SEQ ID NO: 127345 - DNA, 569 bp, Homo sapiens
  Payload ID: 4918
  Gene Symbol: DLG2
  Gene Name: discs, large homolog 2 (Drosophila)
  ENST ID: ENST00000529401
  CDS Start-End: 26-139
agtttgagtgttaccagctttcgctatgcaacggccaagtgtttctcgggctgagaattatcagcttttgtgggatactattgcttccttaaaacaatgtgaacaagctatgcaacatgcatttattccgttggaataaatcttccttgaagttcatgttattttcaagtgactcaagttagatgccatcatatttttccctgtaacttcgaaatcacttaaatgtcacaaactctgggctatatttgaagctcttctaattgaaccactatattttagttggatcacggccagtcctgctcctataattgtcaacacagatactttggacacaattccttatgtcaatgggacagaaattgaatatgaatttgaagaaattacactggagagggggaattctggcctgggattcagtattgctggggggacagataatccccacattggagatgaccctggcatatttattacgaagattataccaggaggtgctgcagcagaggatggcagactcagggtcaatgattgtatcttgcgggtgaatgaggttgatgtgtcagaggttt

SEQ ID NO: 127346 - DNA, 559 bp, Homo sapiens
  Payload ID: 4918
  Gene Symbol: DLG2
  Gene Name: discs, large homolog 2 (Drosophila)
  ENST ID: ENST00000529399
  CDS Start-End: 279-559
attaacactacgctgtgaataactttgtttactctcttccacattttaaaagaagataccagactaccacttcagagttggaatttcaaacaccagcagctagctgggaggcaggattgaatttggagataagaattcttcctggcgtccttcagcagcctccccaggcaggttttcacctcttcgacttttccaggactaagcctttttaactgagaagagaaagaaaaagagattacgctcgatttgaggccaaaatccatgacctacgagagcagatgatgaaccacagcatgagctccgggtccggatccctgcgaaccaatcagaaacgctccctctacgtcagagccatgttcgactacgacaagagcaaggacagtgggctgccaagtcaaggacttagttttaaatatggagatattctccacgttatcaatgcctctgatgatgagtggtggcaagccaggagagtcatgctggagggagacagtgaggagatgggggtcatccccagcaaaaggagggtggaaagaaaggaacgtgcccgattgaagac

SEQ ID NO: 127347 - DNA, 550 bp, Homo sapiens
  Payload ID: 4918
  Gene Symbol: DLG2
  Gene Name: discs, large homolog 2 (Drosophila)
  ENST ID: ENST00000527088
  CDS Start-End: 327-550
gatagaactgtgcggggcactcacaggagccttgttccaatcaaggaatccgctaaaagaccatgcagccacggagcccaggaagccaccgggaagttttgccggagctgatttctaggggattttctggtgcctagcagaatcctgcttgccttgagctgtatggaggagggctcgagtttcccatgaggggcccccttggaaaagccgtctgtacagaatccaagctctgcttctttctgtgtgcaatttccaaaaggcttttctcacctttgctgatttgctggtgtgatttccatgtactgagtcctgtgtagggatccaggatggattgcctgtgcattgtcaccacaaagcaaaaccaaggcagatgcccagcccagaattgttcagtggaagcccctgcttggatgcctgtccaccactgtactaagtatcgatatcaagatgaggacgctccacatgatcattccttacctcgactaacccacgaagtaagaggcccagaactcgtgcatgtatcagaaaagaacctctctcaaatagaaaa

SEQ ID NO: 127348 - DNA, 2891 bp, Homo sapiens
  Payload ID: 4918
  Gene Symbol: DLG2
  Gene Name: discs, large homolog 2 (Drosophila)
  ENST ID: ENST00000532653
  CDS Start-End: 304-2862
aatccagtgatttaaaatgctagaaggaaaagcaactgaggtcttaactttcagacgctgaattctcatctaattgaaattactgggcataatgctatatatagccaatgaagagattttgagctctcactcagtgccttcaagacatgtcgttttgtagtcagagaaaacagagatcaatgcattttcaaactgacagagggaacggatgctctttagtagcacatgcccaggatcgtgtgtgtggggcttgcgctgtgctgagaagctgaataccggtccatatgctccttatttactgcaatgttctttgcatgttactgtgcactccggactaacgtgaagaagtatcgatatcaagatgaggacgctccacatgatcattccttacctcgactaacccacgaagtaagaggcccagaactcgtgcatgtatcagaaaagaacctctctcaaatagaaaatgtccatggatatgtcttgcagtctcatatttctcctctgaaggccagtcctgctcctataattgtcaacacagatactttggacacaattccttatgtcaatgggacagaaattgaatatgaatttgaagaaattacactggagagggggaattctggcctgggattcagtattgctggggggacagataatccccacattggagatgaccctggcatatttattacgaagattataccaggaggtgctgcagcagaggatggcagactcagggtcaatgattgtatcttgcgggtgaatgaggttgatgtgtcagaggtttcccacagtaaagcggtggaagccctgaaggaagcagggtctatcgttcggctgtatgtgcgtagaagacgacctattttggagaccgttgtggaaatcaaactgttcaaaggccctaaaggtttaggcttcagtattgcaggaggtgtggggaaccaacacattcctggagacaacagcatttatgtaactaaaattatagatggaggagctgcacaaaaagatggaaggttgcaagtaggagatagactactaatggtaaacaactacagtttagaagaagtaacacacgaagaggcagtagcaatattaaagaacacatcagaggtagtttatttaaaagttggcaaacccactaccatttatatgactgatccttatggtccacctgatattactcactcttattctccaccaatggaaaaccatctactctctggcaacaatggcactttagaatataaaacctccctgccacccatctctccaggaaggtactcaccaattccaaagcacatgcttgttgacgacgactacaccaggcctccggaacctgtttacagcactgtgaacaaactatgtgataagcctgcttctcccaggcactattcccctgttgagtgtgacaaaagcttcctcctctcagctccctattcccactaccacctaggcctgctacctgactctgagatgaccagtcattcccaacatagcaccgcaactcgtcagccttcaatgactctccaacgggccgtctccctggaaggagagcctcgcaaggtagtcctgcacaaaggctccactggcctgggcttcaacattgtcggtggggaagatggagaaggtatttttgtgtccttcattctggctggtggaccagcagacctaagtggggagctccagagaggagaccagatcctatcggtgaatggcattgacctccgtggtgcatcccacgagcaggcagctgctgcactaaagggggctggacagacagtgacgattatagcacaatatcaacctgaagattacgctcgatttgaggccaaaatccatgacctacgagagcagatgatgaaccacagcatgagctccgggtccggatccctgcgaaccaatcagaaacgctccctctacgtcagagccatgttcgactacgacaagagcaaggacagtgggctgccaagtcaaggacttagttttaaatatggagatattctccacgttatcaatgcctctgatgatgagtggtggcaagccaggagagtcatgctggagggagacagtgaggagatgggggtcatccccagcaaaaggagggtggaaagaaaggaacgtgcccgattgaagacagtgaagtttaatgccaaacctggagtgattgattcgaaaggggacatccccggattaggtgacgacggttatggaacaaagactctgagaggacaagaagacctcattctttcctatgagcctgttacaaggcaggaaataaactacacccggccggtgattatcctggggcccatgaaggatcggatcaatgacgacttgatatctgaattccctgataaatttggctcctgtgtgcctcatactacgaggccaaagcgagactacgaggtggatggcagagactatcactttgtcatttccagagaacaaatggagaaagatatccaagagcacaagtttatagaagccggccagtacaatgacaatttatatggaaccagtgtgcagtctgtgagatttgtagcagaaagaggcaaacactgtatacttgatgtatcaggaaatgctatcaagcggttacaagttgcccagctctatcccattgccatcttcataaaacccaggtctctggaacctcttatggagatgaataagcgtctaacagaggaacaagccaagaaaacctatgatcgagcaattaagctagaacaagaatttggagaatattttacagctattgtccaaggagatactttagaagatatatataaccaatgcaagcttgttattgaagagcaatctgggcctttcatctggattccctcaaaggaaaagttataaattagctactgcgcctctgacaacgacag

SEQ ID NO: 127349 - DNA, 547 bp, Homo sapiens
  Payload ID: 4918
  Gene Symbol: DLG2
  Gene Name: discs, large homolog 2 (Drosophila)
  ENST ID: ENST00000524601
  CDS Start-End: 220-547
taaaagatgaaagaaaagccgatgaatcaattattcaccttgatccttggaaggctgctttctttggttgctaaagtttctcaggtttcattctatcagtttcatttgttgggtgagctttgaaaaaaacaagtctctttgtcacgaaattgtttttcttagctgccaaaaggagattacgctcgatttgaggccaaaatccatgacctacgagagcagatgatgaaccacagcatgagctccgggtccggatccctgcgaaccaatcagaaacgctccctctacgtcagagccatgttcgactacgacaagagcaaggacagtgggctgccaagtcaaggacttagttttaaatatggagatattctccacgttatcaatgcctctgatgatgagtggtggcaagccaggagagtcatgctggagggagacagtgaggagatgggggtcatccccagcaaaaggagggtggaaagaaaggaacgtgcccgattgaagacagtgaagtttaatgccaaacctggagtgattgattcgaaaggggaca

SEQ ID NO: 127350 - DNA, 566 bp, Homo sapiens
  Payload ID: 4918
  Gene Symbol: DLG2
  Gene Name: discs, large homolog 2 (Drosophila)
  ENST ID: ENST00000530800
  CDS Start-End: 65-493
tatacaccaagcagctcaaccaggaggagggaacagagctgaatttgggaagcagctgcctgctatgctgaaaacccctggaaacttgctaaagagctgtgattacgctcgatttgaggccaaaatccatgacctacgagagcagatgatgaaccacagcatgagctccgggtccggatccctgcgaaccaatcagaaacgctccctctacgtcagagccatgttcgactacgacaagagcaaggacagtgggctgccaagtcaaggacttagttttaaatatggagatattctccacgttatcaatgcctctgatgatgagtggtggcaagccaggagagtcatgctggagggagacagtgaggagatgggggtcatccccagcaaaaggagggtggaaagaaaggaacgtgcccgattgaagacagtgaagtttaatgccaaacctggagtgattgattcgaaagggttactggagtttaaatatgcttgaaatgtaaaagtggcatgaaactggagtgatgcaagaatatttagtattcttttaaggactatcatttttaact

SEQ ID NO: 127351 - DNA, 6112 bp, Homo sapiens
  Payload ID: 4919
  Gene Symbol: DLG3
  Gene Name: discs, large homolog 3 (Drosophila)
  ENST ID: ENST00000194900
  CDS Start-End: 342-2891
cagagcagaagcggtcctcacagcacccattctctgcttgagctcccgcttcttctttgccgctgggcctcggcccagaagccacgacgggcgacacggagccgccagtgctggagggggagccgtgggtgcggggcagcgtgggggccgaggccccgggacgcccgcccggccccaggccccgctcagcccgggcgcccccacgggtgccccccccttcttggtccgagcagtgtgagtgtgccagggagcccggcggcggcggcggcggtggtggcggcggtggcggcggcgtggaatccggcgtgggctggggggtccgagccgcggggggcagtgccatgcacaagcaccagcactgctgtaagtgccctgagtgctatgaggtgacccgcctggccgccctgcggcgcctcgagcctccgggctacggcgactggcaagtccccgacccttacgggccaggtgggggcaacggcgccagcgcgggttatgggggctacagctcgcagaccttgccctcgcaggcgggggccacccccacccctcgcaccaaggccaagctcatccccaccggccgggatgtggggccggtgcctcctaagccagtcccgggcaagagcacccccaaactcaacggcagcggccccagctggtggccagagtgcacctgtaccaaccgggactggtatgagcaggccaggcctgcacccctcctagtgaaccctgagacactgaagcacagcctctcggtgaatggcagtgatggcatgttcaaatatgaggaaatcgtacttgagaggggcaactctggcctgggcttcagtatcgcaggtggcatcgacaatccccatgtccctgatgaccctggcatctttattaccaagattatccctggtggagcagctgccatggatgggaggctgggggtgaatgactgtgtgctgcgggtgaatgaggtggacgtgtcggaggtggtacacagccgggcggtggaggcgctgaaggaggcaggccctgtggtgcgattggtggtgcggaggcgacagcctccacccgagaccatcatggaggtcaacctgctcaaagggcccaaaggcctgggtttcagcattgctgggggtattggcaaccagcacatcccaggagacaacagcatctacatcaccaagatcattgaggggggtgctgctcagaaggatggacgcctacagattggggaccggctgctggcggtgaacaacaccaatctgcaggatgtgaggcacgaggaagctgtggcctcactgaagaacacatctgatatggtgtatttgaaggtggccaagccaggcagcctccacctcaacgacatgtacgctccccctgactacgccagcacttttactgccttggctgacaaccacataagccataattccagcctgggttatctcggggctgtggagagcaaggtcagctaccctgctcctcctcaggttccccccacccgctactctcctattcccaggcacatgctggctgaggaggacttcaccagagagcctcgcaagatcatcctgcacaaaggctccacaggcctgggcttcaacatcgtaggaggagaggatggagaaggcatttttgtctccttcatcctggcaggaggcccagctgacctgagtggggagctgcgcaggggagaccggatcttatcggtgaatggagtgaatctgaggaatgcaactcatgagcaggctgcagctgctctgaaacgggccggccagtcagtcaccattgtggcccagtacagacctgaagaatacagtcgctttgaatcgaagatacatgacttacgagaacaaatgatgaacagcagcatgagctctgggtctgggtccctccgaacaagtgaaaagaggtccttgtatgtcagggccctgtttgattatgatcggactcgggacagctgcctgccaagccaggggctcagcttctcttatggtgacattctgcatgtcattaatgcctctgatgatgagtggtggcaggcaaggctggtgaccccacacggagaaagtgagcagatcggtgtgatccccagtaagaagagggtggaaaagaaagaaagagctcgattgaaaactgtgaagttccatgccaggacggggatgattgagtctaacagggacttcccggggttaagtgacgattattatggagcaaagaacctgaagggagtgacatccaacaccagtgacagcgaaagcagttccaaaggacaagaggatgctattttgtcatatgagccagtgacacggcaagaaattcactatgcaaggcctgtgatcatcctgggcccaatgaaggaccgagtcaatgatgacctgatctccgaatttccacataaatttggatcctgtgtgccacatactacccggcctcgacgtgataatgaggtggatggacaagactaccactttgtggtgtcccgagaacaaatggagaaagatattcaggacaacaagttcatcgaggcgggccaatttaatgataacctctatgggaccagcatccagtcagtgcgggcagttgcagagaggggcaagcactgcatcttagatgtttccggcaatgctatcaagagactgcagcaagcacaactttaccccattgccattttcatcaagcccaagtccattgaagcccttatggaaatgaaccgaaggcagacatatgaacaagcaaataagatctatgacaaagccatgaaactggagcaggaatttggagagtactttacagccattgtacagggtgactcactggaagagatttataacaaaatcaaacaaatcattgaggaccagtctgggcactacatttgggtcccatcccctgaaaaactctgaagaatcccctccaaccattctcttgtgaacagaagaaatcaagtccctcttccctcctccctcttcattcctgtccccatggggagaacaaatgctactgttcttgtccccttttttagatatgtcaaaaaaaattaagttttctagtcctgttctttttttttttttaagtttttgtttgtttcagtttattttttgggatgatgccatctcattcatcatgtgactgtgcccattcctgcatggacctttcccaagcgctagcacaggtgcaaaatccatcagagccattgttttcataaaaaccaagcagaagtgaagagaaaagaggaggactgatggaaagacagactctggacagctgcacggcttgtgaagtgagctaaatgcaccacatgatgagatgctcctgggcatttctccctatctgtactgctgtcttgcagctctgaacggtgcaacgtaatggcgacagaaagtatcttatttatatatagatatatatatgtaatttatataaaatatatagaaattattatatatatatattatacactctcatataatatatatatattcacacacatttgggttagaaaatctatggagacttcatcaatggtactatgttattagagaaatgctttaattttcatattccaatcagatggcatcttctatcccagctggttgggaagggattgaagatggtagcaagtgctgcactaagggcactcgcatttggtcattctcttgagagctaggaggggtcagcctgaggccggagaggaagggcttttgcctggggtgagagggtgagagacttgacctgaaagcagctgctgcccctgaggtgcagccagagtcctgtgtgcggacagagagaatggctaatgatgctccgcgtggaattgcctattgttttatgccacctgatgtgtctgcatgagaggtttcctttttgttcctttttaagctgctgttaaaccaaaaccatgttgtgctactgtgtcagccttttcattattgcaaattttacttttactatttaagtgaatgcatagaatccaatttgccaaggttctaaaggcttatgaggtcctgaaggagccaggccttgtgatggagtaggtgacacaggcctggttgtcctgtcagcagaagggaaagcaggggctgggctgagaggaggacacggagggctctgctgaggttccttcctgggttccaccaacagggacagggagtcacttgccttccagttctgtgctgggatggcgggacagcacttggcttgcttggccagctgcgtcatgagtttgatttggtttttttttttttgcagctgcttcatatgctctgctccagcccctccccaacagctggtagcttatggtttcttcaagaggaaagtagactttatgctgtacatttgagctgtagagctaagattcgcttactggtgagctgtgaaaccttgttgctttttcccagagtctgatggcagtgactgtgatcaagggaatcttcaccgccacaagtgcaggcagcaggtgtggttcaggtccccccccaccccactgtgctcctttgaagccaacgtgcctccctcgcctccatactggagggacgacgcaggggagaacagagaagtgcttggccctaggattgaggcacttgtttcctagcccgctgggttagggctggtgcaagcgaggcaatgttgaggatgctttaagcactaccagccgaatccgggaactctgttaacagttgtccaaccagcagaatgaggctaactgtataaagcatgggacccaggatgaggataaggaaaggacagcggctttccctgggcagtacaatggcttgaaggcaaaaagggataaagtgacagccgactgtgactctggtgaggaggggtgagcagggaggttgattctctgatgttaactaagtggcaaagtctcaaccgtgctcagccctccccctcccagggaagagaaacaaagattcaaagtaagcatgatactagtgggtttaccagtgtttcttccaaggagacatatattttttaataaacgatagttgcaatgaactgtggctcagagaccttcttaaagtagttgagaagggagggcgtgggcaaagcagtgggaagaacatcccaaacttttgggggccagagggctctctccttagtgatgatcagctagccgagctgggccgtcctggggatcggtacagctccctggggtggtgacaggccctttgtgaaagttgtgtgcttggtcttccaccccagccccagacactgcttcaaatagcaccaaccagatgggagtccacatctgtggtggcaaaatgctgacattttcccaagaggtacacaaggtgggagaggcctgctgtagcagaggtgtgtgttagagaaagcaggggcctgatttagtagcagagaactgggtgagaaaaatggccagagaaagtgacctgccagctaccagtgtttccgaaaatgagggtgggatgggcccatttgcagagcaggacagcagtcatccccatagccctctgaggaggggagggatgcttagagcaggcagttctggcagttctgacgtggcaggtgccattgcaacttgtgcggaggagtcttaggaagtgctgtcataattcataaggtcaagagcaacatctggatgaatgagccacctgaaatgtgtgtgggctgagccacaggaagggtgagtcctcttgcttgtggtgctttatggtgtgcaggttgcttgctttcccacattctctcatttgcttgaaggcagcctaacaaaagggagtccccaaagagctccatgagagcttaagaaaattcatctcctgaggacaaagagaacaaagatctgtcctgtggtcacactgttgaggctctgtcttcacagctgatgttctcctagtggaggtacagctgaagaacattcagccccagcacgagaagatacagagcaacttggaaaccccaaagggagacacacccttaacactgccgtgctgtgctgtgccgtgtcctgaaggaggagagagccctatctcctcctggttttgttgctgacattgcagctgatcatgccttgactccttcatctctaacagaggaagaactgtattatcaaaccttatggtctacccatgaataaataaaatatttgttcaagcacaaa

SEQ ID NO: 127352 - DNA, 5074 bp, Homo sapiens
  Payload ID: 4919
  Gene Symbol: DLG3
  Gene Name: discs, large homolog 3 (Drosophila)
  Uniprot ID: Q92796
  ENST ID: ENST00000374355
  CDS Start-End: 318-1856
ggggctgaggaggcgagggcagcggagtttcctgccctgagatagttgcagcccgctctgctgcaaccatttcaaattagagaagaaagcagttcagccggtggggctggcgggactctgaccggcccggtggcctcgccggcaacggccccgccccgctggcggcagcggcggcggcagcggctgcgcggggcctggaactggtcgggccggctggggttccgggggacaggtttgcagggtggggcccgagaggctggcgggcaggcagcagtggagccggaagggtaggcagccaggggagagagagaggagctatggagagggcccgcaagttctcgggctccggcttggccatgggcttgggctccgcctccgcttcggcctggaggagggcttcgcagaggtgggcctggccgctccgctccctgcggcccggaggggatgccagagagcctcgcaagatcatcctgcacaaaggctccacaggcctgggcttcaacatcgtaggaggagaggatggagaaggcatttttgtctccttcatcctggcaggaggcccagctgacctgagtggggagctgcgcaggggagaccggatcttatcggtgaatggagtgaatctgaggaatgcaactcatgagcaggctgcagctgctctgaaacgggccggccagtcagtcaccattgtggcccagtacagacctgaagaatacagtcgctttgaatcgaagatacatgacttacgagaacaaatgatgaacagcagcatgagctctgggtctgggtccctccgaacaagtgaaaagaggtccttgtatgtcagggccctgtttgattatgatcggactcgggacagctgcctgccaagccaggggctcagcttctcttatggtgacattctgcatgtcattaatgcctctgatgatgagtggtggcaggcaaggctggtgaccccacacggagaaagtgagcagatcggtgtgatccccagtaagaagagggtggaaaagaaagaaagagctcgattgaaaactgtgaagttccatgccaggacggggatgattgagtctaacaggtcgatcaaaacgaaacgtaaaaagagtttccgcctctctcgaaagtttccattttacaagagcaaagaaaacatggcccaggagagcagcatacaggaacagggagtgacatccaacaccagtgacagcgaaagcagttccaaaggacaagaggatgctattttgtcatatgagccagtgacacggcaagaaattcactatgcaaggcctgtgatcatcctgggcccaatgaaggaccgagtcaatgatgacctgatctccgaatttccacataaatttggatcctgtgtgccacatactacccggcctcgacgtgataatgaggtggatggacaagactaccactttgtggtgtcccgagaacaaatggagaaagatattcaggacaacaagttcatcgaggcgggccaatttaatgataacctctatgggaccagcatccagtcagtgcgggcagttgcagagaggggcaagcactgcatcttagatgtttccggcaatgctatcaagagactgcagcaagcacaactttaccccattgccattttcatcaagcccaagtccattgaagcccttatggaaatgaaccgaaggcagacatatgaacaagcaaataagatctatgacaaagccatgaaactggagcaggaatttggagagtactttacagccattgtacagggtgactcactggaagagatttataacaaaatcaaacaaatcattgaggaccagtctgggcactacatttgggtcccatcccctgaaaaactctgaagaatcccctccaaccattctcttgtgaacagaagaaatcaagtccctcttccctcctccctcttcattcctgtccccatggggagaacaaatgctactgttcttgtccccttttttagatatgtcaaaaaaaattaagttttctagtcctgttctttttttttttttaagtttttgtttgtttcagtttattttttgggatgatgccatctcattcatcatgtgactgtgcccattcctgcatggacctttcccaagcgctagcacaggtgcaaaatccatcagagccattgttttcataaaaaccaagcagaagtgaagagaaaagaggaggactgatggaaagacagactctggacagctgcacggcttgtgaagtgagctaaatgcaccacatgatgagatgctcctgggcatttctccctatctgtactgctgtcttgcagctctgaacggtgcaacgtaatggcgacagaaagtatcttatttatatatagatatatatatgtaatttatataaaatatatagaaattattatatatatatattatacactctcatataatatatatatattcacacacatttgggttagaaaatctatggagacttcatcaatggtactatgttattagagaaatgctttaattttcatattccaatcagatggcatcttctatcccagctggttgggaagggattgaagatggtagcaagtgctgcactaagggcactcgcatttggtcattctcttgagagctaggaggggtcagcctgaggccggagaggaagggcttttgcctggggtgagagggtgagagacttgacctgaaagcagctgctgcccctgaggtgcagccagagtcctgtgtgcggacagagagaatggctaatgatgctccgcgtggaattgcctattgttttatgccacctgatgtgtctgcatgagaggtttcctttttgttcctttttaagctgctgttaaaccaaaaccatgttgtgctactgtgtcagccttttcattattgcaaattttacttttactatttaagtgaatgcatagaatccaatttgccaaggttctaaaggcttatgaggtcctgaaggagccaggccttgtgatggagtaggtgacacaggcctggttgtcctgtcagcagaagggaaagcaggggctgggctgagaggaggacacggagggctctgctgaggttccttcctgggttccaccaacagggacagggagtcacttgccttccagttctgtgctgggatggcgggacagcacttggcttgcttggccagctgcgtcatgagtttgatttggtttttttttttttgcagctgcttcatatgctctgctccagcccctccccaacagctggtagcttatggtttcttcaagaggaaagtagactttatgctgtacatttgagctgtagagctaagattcgcttactggtgagctgtgaaaccttgttgctttttcccagagtctgatggcagtgactgtgatcaagggaatcttcaccgccacaagtgcaggcagcaggtgtggttcaggtccccccccaccccactgtgctcctttgaagccaacgtgcctccctcgcctccatactggagggacgacgcaggggagaacagagaagtgcttggccctaggattgaggcacttgtttcctagcccgctgggttagggctggtgcaagcgaggcaatgttgaggatgctttaagcactaccagccgaatccgggaactctgttaacagttgtccaaccagcagaatgaggctaactgtataaagcatgggacccaggatgaggataaggaaaggacagcggctttccctgggcagtacaatggcttgaaggcaaaaagggataaagtgacagccgactgtgactctggtgaggaggggtgagcagggaggttgattctctgatgttaactaagtggcaaagtctcaaccgtgctcagccctccccctcccagggaagagaaacaaagattcaaagtaagcatgatactagtgggtttaccagtgtttcttccaaggagacatatattttttaataaacgatagttgcaatgaactgtggctcagagaccttcttaaagtagttgagaagggagggcgtgggcaaagcagtgggaagaacatcccaaacttttgggggccagagggctctctccttagtgatgatcagctagccgagctgggccgtcctggggatcggtacagctccctggggtggtgacaggccctttgtgaaagttgtgtgcttggtcttccaccccagccccagacactgcttcaaatagcaccaaccagatgggagtccacatctgtggtggcaaaatgctgacattttcccaagaggtacacaaggtgggagaggcctgctgtagcagaggtgtgtgttagagaaagcaggggcctgatttagtagcagagaactgggtgagaaaaatggccagagaaagtgacctgccagctaccagtgtttccgaaaatgagggtgggatgggcccatttgcagagcaggacagcagtcatccccatagccctctgaggaggggagggatgcttagagcaggcagttctggcagttctgacgtggcaggtgccattgcaacttgtgcggaggagtcttaggaagtgctgtcataattcataaggtcaagagcaacatctggatgaatgagccacctgaaatgtgtgtgggctgagccacaggaagggtgagtcctcttgcttgtggtgctttatggtgtgcaggttgcttgctttcccacattctctcatttgcttgaaggcagcctaacaaaagggagtccccaaagagctccatgagagcttaagaaaattcatctcctgaggacaaagagaacaaagatctgtcctgtggtcacactgttgaggctctgtcttcacagctgatgttctcctagtggaggtacagctgaagaacattcagccccagcacgagaagatacagagcaacttggaaaccccaaagggagacacacccttaacactgccgtgctgtgctgtgccgtgtcctgaaggaggagagagccctatctcctcctggttttgttgctgacattgcagctgatcatgccttgactccttcatctctaacagaggaagaactgtattatcaaaccttatggtctacccatgaataaataaaatatttgttcaagcac

SEQ ID NO: 127353 - DNA, 5905 bp, Homo sapiens
  Payload ID: 4919
  Gene Symbol: DLG3
  Gene Name: discs, large homolog 3 (Drosophila)
  Uniprot ID: Q92796
  ENST ID: ENST00000374360
  CDS Start-End: 234-2687
tgctggagggggagccgtgggtgcggggcagcgtgggggccgaggccccgggacgcccgcccggccccaggccccgctcagcccgggcgcccccacgggtgccccccccttcttggtccgagcagtgtgagtgtgccagggagcccggcggcggcggcggcggtggtggcggcggtggcggcggcgtggaatccggcgtgggctggggggtccgagccgcggggggcagtgccatgcacaagcaccagcactgctgtaagtgccctgagtgctatgaggtgacccgcctggccgccctgcggcgcctcgagcctccgggctacggcgactggcaagtccccgacccttacgggccaggtgggggcaacggcgccagcgcgggttatgggggctacagctcgcagaccttgccctcgcaggcgggggccacccccacccctcgcaccaaggccaagctcatccccaccggccgggatgtggggccggtgcctcctaagccagtcccgggcaagagcacccccaaactcaacggcagcggccccagctggtggccagagtgcacctgtaccaaccgggactggtatgagcaggtgaatggcagtgatggcatgttcaaatatgaggaaatcgtacttgagaggggcaactctggcctgggcttcagtatcgcaggtggcatcgacaatccccatgtccctgatgaccctggcatctttattaccaagattatccctggtggagcagctgccatggatgggaggctgggggtgaatgactgtgtgctgcgggtgaatgaggtggacgtgtcggaggtggtacacagccgggcggtggaggcgctgaaggaggcaggccctgtggtgcgattggtggtgcggaggcgacagcctccacccgagaccatcatggaggtcaacctgctcaaagggcccaaaggcctgggtttcagcattgctgggggtattggcaaccagcacatcccaggagacaacagcatctacatcaccaagatcattgaggggggtgctgctcagaaggatggacgcctacagattggggaccggctgctggcggtgaacaacaccaatctgcaggatgtgaggcacgaggaagctgtggcctcactgaagaacacatctgatatggtgtatttgaaggtggccaagccaggcagcctccacctcaacgacatgtacgctccccctgactacgccagcacttttactgccttggctgacaaccacataagccataattccagcctgggttatctcggggctgtggagagcaaggtcagctaccctgctcctcctcaggttccccccacccgctactctcctattcccaggcacatgctggctgaggaggacttcaccagagagcctcgcaagatcatcctgcacaaaggctccacaggcctgggcttcaacatcgtaggaggagaggatggagaaggcatttttgtctccttcatcctggcaggaggcccagctgacctgagtggggagctgcgcaggggagaccggatcttatcggtgaatggagtgaatctgaggaatgcaactcatgagcaggctgcagctgctctgaaacgggccggccagtcagtcaccattgtggcccagtacagacctgaagaatacagtcgctttgaatcgaagatacatgacttacgagaacaaatgatgaacagcagcatgagctctgggtctgggtccctccgaacaagtgaaaagaggtccttgtatgtcagggccctgtttgattatgatcggactcgggacagctgcctgccaagccaggggctcagcttctcttatggtgacattctgcatgtcattaatgcctctgatgatgagtggtggcaggcaaggctggtgaccccacacggagaaagtgagcagatcggtgtgatccccagtaagaagagggtggaaaagaaagaaagagctcgattgaaaactgtgaagttccatgccaggacggggatgattgagtctaacagggacttcccggggttaagtgacgattattatggagcaaagaacctgaaaggacaagaggatgctattttgtcatatgagccagtgacacggcaagaaattcactatgcaaggcctgtgatcatcctgggcccaatgaaggaccgagtcaatgatgacctgatctccgaatttccacataaatttggatcctgtgtgccacatactacccggcctcgacgtgataatgaggtggatggacaagactaccactttgtggtgtcccgagaacaaatggagaaagatattcaggacaacaagttcatcgaggcgggccaatttaatgataacctctatgggaccagcatccagtcagtgcgggcagttgcagagaggggcaagcactgcatcttagatgtttccggcaatgctatcaagagactgcagcaagcacaactttaccccattgccattttcatcaagcccaagtccattgaagcccttatggaaatgaaccgaaggcagacatatgaacaagcaaataagatctatgacaaagccatgaaactggagcaggaatttggagagtactttacagccattgtacagggtgactcactggaagagatttataacaaaatcaaacaaatcattgaggaccagtctgggcactacatttgggtcccatcccctgaaaaactctgaagaatcccctccaaccattctcttgtgaacagaagaaatcaagtccctcttccctcctccctcttcattcctgtccccatggggagaacaaatgctactgttcttgtccccttttttagatatgtcaaaaaaaattaagttttctagtcctgttctttttttttttttaagtttttgtttgtttcagtttattttttgggatgatgccatctcattcatcatgtgactgtgcccattcctgcatggacctttcccaagcgctagcacaggtgcaaaatccatcagagccattgttttcataaaaaccaagcagaagtgaagagaaaagaggaggactgatggaaagacagactctggacagctgcacggcttgtgaagtgagctaaatgcaccacatgatgagatgctcctgggcatttctccctatctgtactgctgtcttgcagctctgaacggtgcaacgtaatggcgacagaaagtatcttatttatatatagatatatatatgtaatttatataaaatatatagaaattattatatatatatattatacactctcatataatatatatatattcacacacatttgggttagaaaatctatggagacttcatcaatggtactatgttattagagaaatgctttaattttcatattccaatcagatggcatcttctatcccagctggttgggaagggattgaagatggtagcaagtgctgcactaagggcactcgcatttggtcattctcttgagagctaggaggggtcagcctgaggccggagaggaagggcttttgcctggggtgagagggtgagagacttgacctgaaagcagctgctgcccctgaggtgcagccagagtcctgtgtgcggacagagagaatggctaatgatgctccgcgtggaattgcctattgttttatgccacctgatgtgtctgcatgagaggtttcctttttgttcctttttaagctgctgttaaaccaaaaccatgttgtgctactgtgtcagccttttcattattgcaaattttacttttactatttaagtgaatgcatagaatccaatttgccaaggttctaaaggcttatgaggtcctgaaggagccaggccttgtgatggagtaggtgacacaggcctggttgtcctgtcagcagaagggaaagcaggggctgggctgagaggaggacacggagggctctgctgaggttccttcctgggttccaccaacagggacagggagtcacttgccttccagttctgtgctgggatggcgggacagcacttggcttgcttggccagctgcgtcatgagtttgatttggtttttttttttttgcagctgcttcatatgctctgctccagcccctccccaacagctggtagcttatggtttcttcaagaggaaagtagactttatgctgtacatttgagctgtagagctaagattcgcttactggtgagctgtgaaaccttgttgctttttcccagagtctgatggcagtgactgtgatcaagggaatcttcaccgccacaagtgcaggcagcaggtgtggttcaggtccccccccaccccactgtgctcctttgaagccaacgtgcctccctcgcctccatactggagggacgacgcaggggagaacagagaagtgcttggccctaggattgaggcacttgtttcctagcccgctgggttagggctggtgcaagcgaggcaatgttgaggatgctttaagcactaccagccgaatccgggaactctgttaacagttgtccaaccagcagaatgaggctaactgtataaagcatgggacccaggatgaggataaggaaaggacagcggctttccctgggcagtacaatggcttgaaggcaaaaagggataaagtgacagccgactgtgactctggtgaggaggggtgagcagggaggttgattctctgatgttaactaagtggcaaagtctcaaccgtgctcagccctccccctcccagggaagagaaacaaagattcaaagtaagcatgatactagtgggtttaccagtgtttcttccaaggagacatatattttttaataaacgatagttgcaatgaactgtggctcagagaccttcttaaagtagttgagaagggagggcgtgggcaaagcagtgggaagaacatcccaaacttttgggggccagagggctctctccttagtgatgatcagctagccgagctgggccgtcctggggatcggtacagctccctggggtggtgacaggccctttgtgaaagttgtgtgcttggtcttccaccccagccccagacactgcttcaaatagcaccaaccagatgggagtccacatctgtggtggcaaaatgctgacattttcccaagaggtacacaaggtgggagaggcctgctgtagcagaggtgtgtgttagagaaagcaggggcctgatttagtagcagagaactgggtgagaaaaatggccagagaaagtgacctgccagctaccagtgtttccgaaaatgagggtgggatgggcccatttgcagagcaggacagcagtcatccccatagccctctgaggaggggagggatgcttagagcaggcagttctggcagttctgacgtggcaggtgccattgcaacttgtgcggaggagtcttaggaagtgctgtcataattcataaggtcaagagcaacatctggatgaatgagccacctgaaatgtgtgtgggctgagccacaggaagggtgagtcctcttgcttgtggtgctttatggtgtgcaggttgcttgctttcccacattctctcatttgcttgaaggcagcctaacaaaagggagtccccaaagagctccatgagagcttaagaaaattcatctcctgaggacaaagagaacaaagatctgtcctgtggtcacactgttgaggctctgtcttcacagctgatgttctcctagtggaggtacagctgaagaacattcagccccagcacgagaagatacagagcaacttggaaaccccaaagggagacacacccttaacactgccgtgctgtgctgtgccgtgtcctgaaggaggagagagccctatctcctcctggttttgttgctgacattgcagctgatcatgccttgactccttcatctctaacagaggaagaactgtattatcaaaccttatggtctacccatgaataaataaaatatttgttcaagcac

SEQ ID NO: 127354 - DNA, 4529 bp, Homo sapiens
  Payload ID: 4919
  Gene Symbol: DLG3
  Gene Name: discs, large homolog 3 (Drosophila)
  Uniprot ID: Q92796
  ENST ID: ENST00000542398
  CDS Start-End: 213-1313
cccatcgcgcgcctcaggcgtctcctcctcctccctccttccccctcctctctcctcccctcctcccgcgcgccccgctttgtgtccgtggtctcccgcgcgggacggagggactggccggagctggcgctttctcagcactagatctggactccgacccggcgccagaatacagtcgctttgaatcgaagatacatgacttacgagaacaaatgatgaacagcagcatgagctctgggtctgggtccctccgaacaagtgaaaagaggtccttgtatgtcagggccctgtttgattatgatcggactcgggacagctgcctgccaagccaggggctcagcttctcttatggtgacattctgcatgtcattaatgcctctgatgatgagtggtggcaggcaaggctggtgaccccacacggagaaagtgagcagatcggtgtgatccccagtaagaagagggtggaaaagaaagaaagagctcgattgaaaactgtgaagttccatgccaggacggggatgattgagtctaacaggtcgatcaaaacgaaacgtaaaaagagtttccgcctctctcgaaagtttccattttacaagagcaaagaaaacatggcccaggagagcagcatacaggaacagggagtgacatccaacaccagtgacagcgaaagcagttccaaaggacaagaggatgctattttgtcatatgagccagtgacacggcaagaaattcactatgcaaggcctgtgatcatcctgggcccaatgaaggaccgagtcaatgatgacctgatctccgaatttccacataaatttggatcctgtgtgccacatactacccggcctcgacgtgataatgaggtggatggacaagactaccactttgtggtgtcccgagaacaaatggagaaagatattcaggacaacaagttcatcgaggcgggccaatttaatgataacctctatgggaccagcatccagtcagtgcgggcagttgcagagaggggcaagcactgcatcttagatgtttccggcaatgctatcaagagactgcagcaagcacaactttaccccattgccattttcatcaagcccaagtccattgaagcccttatggaaatgaaccgaaggcagacatatgaacaagcaaataagatctatgacaaagccatgaaactggagcaggaatttggagagtactttacagccattgtacagggtgactcactggaagagatttataacaaaatcaaacaaatcattgaggaccagtctgggcactacatttgggtcccatcccctgaaaaactctgaagaatcccctccaaccattctcttgtgaacagaagaaatcaagtccctcttccctcctccctcttcattcctgtccccatggggagaacaaatgctactgttcttgtccccttttttagatatgtcaaaaaaaattaagttttctagtcctgttctttttttttttttaagtttttgtttgtttcagtttattttttgggatgatgccatctcattcatcatgtgactgtgcccattcctgcatggacctttcccaagcgctagcacaggtgcaaaatccatcagagccattgttttcataaaaaccaagcagaagtgaagagaaaagaggaggactgatggaaagacagactctggacagctgcacggcttgtgaagtgagctaaatgcaccacatgatgagatgctcctgggcatttctccctatctgtactgctgtcttgcagctctgaacggtgcaacgtaatggcgacagaaagtatcttatttatatatagatatatatatgtaatttatataaaatatatagaaattattatatatatatattatacactctcatataatatatatatattcacacacatttgggttagaaaatctatggagacttcatcaatggtactatgttattagagaaatgctttaattttcatattccaatcagatggcatcttctatcccagctggttgggaagggattgaagatggtagcaagtgctgcactaagggcactcgcatttggtcattctcttgagagctaggaggggtcagcctgaggccggagaggaagggcttttgcctggggtgagagggtgagagacttgacctgaaagcagctgctgcccctgaggtgcagccagagtcctgtgtgcggacagagagaatggctaatgatgctccgcgtggaattgcctattgttttatgccacctgatgtgtctgcatgagaggtttcctttttgttcctttttaagctgctgttaaaccaaaaccatgttgtgctactgtgtcagccttttcattattgcaaattttacttttactatttaagtgaatgcatagaatccaatttgccaaggttctaaaggcttatgaggtcctgaaggagccaggccttgtgatggagtaggtgacacaggcctggttgtcctgtcagcagaagggaaagcaggggctgggctgagaggaggacacggagggctctgctgaggttccttcctgggttccaccaacagggacagggagtcacttgccttccagttctgtgctgggatggcgggacagcacttggcttgcttggccagctgcgtcatgagtttgatttggtttttttttttttgcagctgcttcatatgctctgctccagcccctccccaacagctggtagcttatggtttcttcaagaggaaagtagactttatgctgtacatttgagctgtagagctaagattcgcttactggtgagctgtgaaaccttgttgctttttcccagagtctgatggcagtgactgtgatcaagggaatcttcaccgccacaagtgcaggcagcaggtgtggttcaggtccccccccaccccactgtgctcctttgaagccaacgtgcctccctcgcctccatactggagggacgacgcaggggagaacagagaagtgcttggccctaggattgaggcacttgtttcctagcccgctgggttagggctggtgcaagcgaggcaatgttgaggatgctttaagcactaccagccgaatccgggaactctgttaacagttgtccaaccagcagaatgaggctaactgtataaagcatgggacccaggatgaggataaggaaaggacagcggctttccctgggcagtacaatggcttgaaggcaaaaagggataaagtgacagccgactgtgactctggtgaggaggggtgagcagggaggttgattctctgatgttaactaagtggcaaagtctcaaccgtgctcagccctccccctcccagggaagagaaacaaagattcaaagtaagcatgatactagtgggtttaccagtgtttcttccaaggagacatatattttttaataaacgatagttgcaatgaactgtggctcagagaccttcttaaagtagttgagaagggagggcgtgggcaaagcagtgggaagaacatcccaaacttttgggggccagagggctctctccttagtgatgatcagctagccgagctgggccgtcctggggatcggtacagctccctggggtggtgacaggccctttgtgaaagttgtgtgcttggtcttccaccccagccccagacactgcttcaaatagcaccaaccagatgggagtccacatctgtggtggcaaaatgctgacattttcccaagaggtacacaaggtgggagaggcctgctgtagcagaggtgtgtgttagagaaagcaggggcctgatttagtagcagagaactgggtgagaaaaatggccagagaaagtgacctgccagctaccagtgtttccgaaaatgagggtgggatgggcccatttgcagagcaggacagcagtcatccccatagccctctgaggaggggagggatgcttagagcaggcagttctggcagttctgacgtggcaggtgccattgcaacttgtgcggaggagtcttaggaagtgctgtcataattcataaggtcaagagcaacatctggatgaatgagccacctgaaatgtgtgtgggctgagccacaggaagggtgagtcctcttgcttgtggtgctttatggtgtgcaggttgcttgctttcccacattctctcatttgcttgaaggcagcctaacaaaagggagtccccaaagagctccatgagagcttaagaaaattcatctcctgaggacaaagagaacaaagatctgtcctgtggtcacactgttgaggctctgtcttcacagctgatgttctcctagtggaggtacagctgaagaacattcagccccagcacgagaagatacagagcaacttggaaaccccaaagggagacacacccttaacactgccgtgctgtgctgtgccgtgtcctgaaggaggagagagccctatctcctcctggttttgttgctgacattgcagctgatcatgccttgactccttcatctctaacagaggaagaactgtattatcaaaccttatggtctacccatgaataaataaaatatttgttcaagc

SEQ ID NO: 127355 - DNA, 3184 bp, Homo sapiens
  Payload ID: 4920
  Gene Symbol: DLG4
  Gene Name: discs, large homolog 4 (Drosophila)
  Uniprot ID: P78352
  ENST ID: ENST00000302955
  CDS Start-End: 201-2366
gcccccttcccctccctcccacgctcccctccccttcccttctccaaccccctccttcccctctcacccctccccccatcctggccccccctgcaaaagtggggtgcggaggggggaggggtgagaacccacggaggggaggaacgaaactccgatgaagtcagagccccttacccgccgccgcggccaggccccccaacatggactgtctctgtatagtgacaaccaagaaataccgctaccaagatgaagacacgccccctctggagcacagcccggcccacctccccaaccaggccaattctcccccagtgattgtcaacacagataccctagaagccccaggatatgtgaacgggaccgagggggagatggaatacgaggaaatcacattggaaaggggtaactcaggtctgggcttcagcatcgcaggtggcactgacaacccacacatcggtgacgacccatccattttcatcaccaagatcattcctggtggggctgcggcccaggatggccgcctcagggtcaacgacagcatcctgtttgtaaatgaagtggacgtgcgcgaggtgacccactcagcggcggtggaagccctcaaagaggcaggctccatcgttcgcctctatgtcatgcgccggaagcccccggctgagaaggtcatggagatcaagctcatcaaggggcctaaaggtcttggcttcagcatcgcagggggcgtagggaaccagcacatcccaggagataatagcatctatgtaacaaagatcatcgaagggggtgctgcccacaaggatgggaggttgcagattggagacaagatcctggcggtcaacagtgtggggctagaggacgtcatgcatgaagatgctgtggcagccctgaagaacacgtatgatgttgtctacctaaaggtggccaagcccagcaatgcctacctgagtgacagctatgctcccccagacatcacaacctcttattcccagcacctggacaatgagatcagtcacagcagctacctgggcaccgactaccccacagccatgacccccacttcccctcggcgctactctccagtggccaaggacctgctcggggaggaagacattccccgagaaccgaggcgaattgtgatccaccggggctccacgggcctgggcttcaacatcgtgggtggcgaggacggtgaaggcatcttcatctcctttatcctggccgggggccctgcagacctcagtggggagctgcggaagggggaccagatcctgtcggtcaacggtgtggacctccgaaatgccagccatgagcaggctgccattgccctgaagaatgcgggtcagacggtcacgatcatcgctcagtataaaccagaagagtacagccgattcgaggccaagatccacgaccttcgggaacagctcatgaacagcagcctgggctcagggactgcgtccctgcggagcaaccccaaaaggggtttctacatcagggccctgtttgattacgacaagaccaaggactgcggcttcctgagccaggccctgagcttccgctttggggatgtgctgcatgtcatcgatgctagtgatgaggagtggtggcaggcacggcgggtccactctgacagtgagaccgacgacattgggttcatccccagcaaacggcgggttgagcgacgagagtggtcaaggttaaaggccaaggactggggctccagctctggatcgcagggtcgagaagactcggttctgagctacgagacagtgacgcagatggaagtgcactatgctcgccccatcatcatccttgggcccaccaaggaccgcgccaacgatgatcttctctccgagttccccgacaagtttggatcctgtgttccccatacgacacggcccaagcgggagtatgagatagatggccgggattaccactttgtgtcgtcccgggagaaaatggagaaggacattcaggcgcacaagttcattgaggccggccagtacaacagccacctctatgggaccagcgtccagtccgtgcgagaggtggcagagcaggggaagcactgcatcctcgatgtctcggccaatgccgtgcggcggctgcaggcggcccacctgcaccccatcgccatcttcatccgcccccgctccctggagaatgtgctagagattaacaagcggatcacagaggagcaagcccgcaaagccttcgacagagccaccaagctggagcaggagttcacagagtgcttctcagccatcgtggagggtgacagctttgaggagatctaccacaaggtgaagcgtgtcatcgaggacctctcaggcccctacatctgggttccagcccgagagagactctgattcctgccctggcttggcctggactcgccctgcctccatcacctgggcccttggtctggactgaattgcccaagcccttggctccccccggcctccctcccaccccttcttatttatttcctttctaactggatccagcctgttggaggggggacactcctctgcatgtatccccgcaccccagaactgggctcctgaacgccaggaacctggggtctgggggggagctgggctccttgttccgagcccttgctccttaggatccccgcccccacctgcccccaatgcacacacagacccaccgggggccacctgccctcccccatcctctcccacacacattccagaagtcagggccccctcgaggagcacccgctgcagggatgcagggccacaggcctccgctctctcctaaggcagggtctggggtcacccctgccctcatcgtaattccccatgttccttgatttctcatttattttttccactttttttcttctcaaaggtggttttttggggggagaagcaggggactccgcagcgggcccctgccttccacatgcccccaccatttttctttgccggtttgcatgagtggaaggtctaaatgtggcttttttttttttttttcctgggaatttttttggggaaaagggagggatgggtctagggagtgggaaatgcgggagggagggtggggggcaggggtcgggggtcgggtgtccgggagccagggaagactggaaatgctgccgccttctgcaatttatttatttttttcttttgagagagtgaaaggaagagacagatacttgaaa

SEQ ID NO: 127356 - DNA, 3185 bp, Homo sapiens
  Payload ID: 4920
  Gene Symbol: DLG4
  Gene Name: discs, large homolog 4 (Drosophila)
  Uniprot ID: P78352
  ENST ID: ENST00000399506
  CDS Start-End: 193-2367
cccctccctcccacgctcccctccccttcccttctccaaccccctccttcccctctcacccctccccccatcctggccccccctgcaaaagtggggtgcggaggggggaggggtgagaacccacggaggggaggaacgaaactccgatgaagtcagagccccttacccgccgccgcggccaggccccccaacatggactgtctctgtatagtgacaaccaagaaataccgctaccaagatgaagacacgccccctctggagcacagcccggcccacctccccaaccaggccaattctcccccagtgattgtcaacacagataccctagaagccccaggatatgagttgcaggtgaacgggaccgagggggagatggaatacgaggaaatcacattggaaaggggtaactcaggtctgggcttcagcatcgcaggtggcactgacaacccacacatcggtgacgacccatccattttcatcaccaagatcattcctggtggggctgcggcccaggatggccgcctcagggtcaacgacagcatcctgtttgtaaatgaagtggacgtgcgcgaggtgacccactcagcggcggtggaagccctcaaagaggcaggctccatcgttcgcctctatgtcatgcgccggaagcccccggctgagaaggtcatggagatcaagctcatcaaggggcctaaaggtcttggcttcagcatcgcagggggcgtagggaaccagcacatcccaggagataatagcatctatgtaacaaagatcatcgaagggggtgctgcccacaaggatgggaggttgcagattggagacaagatcctggcggtcaacagtgtggggctagaggacgtcatgcatgaagatgctgtggcagccctgaagaacacgtatgatgttgtctacctaaaggtggccaagcccagcaatgcctacctgagtgacagctatgctcccccagacatcacaacctcttattcccagcacctggacaatgagatcagtcacagcagctacctgggcaccgactaccccacagccatgacccccacttcccctcggcgctactctccagtggccaaggacctgctcggggaggaagacattccccgagaaccgaggcgaattgtgatccaccggggctccacgggcctgggcttcaacatcgtgggtggcgaggacggtgaaggcatcttcatctcctttatcctggccgggggccctgcagacctcagtggggagctgcggaagggggaccagatcctgtcggtcaacggtgtggacctccgaaatgccagccatgagcaggctgccattgccctgaagaatgcgggtcagacggtcacgatcatcgctcagtataaaccagaagagtacagccgattcgaggccaagatccacgaccttcgggaacagctcatgaacagcagcctgggctcagggactgcgtccctgcggagcaaccccaaaaggggtttctacatcagggccctgtttgattacgacaagaccaaggactgcggcttcctgagccaggccctgagcttccgctttggggatgtgctgcatgtcatcgatgctagtgatgaggagtggtggcaggcacggcgggtccactctgacagtgagaccgacgacattgggttcatccccagcaaacggcgggttgagcgacgagagtggtcaaggttaaaggccaaggactggggctccagctctggatcgcagggtcgagaagactcggttctgagctacgagacagtgacgcagatggaagtgcactatgctcgccccatcatcatccttgggcccaccaaggaccgcgccaacgatgatcttctctccgagttccccgacaagtttggatcctgtgttccccatacgacacggcccaagcgggagtatgagatagatggccgggattaccactttgtgtcgtcccgggagaaaatggagaaggacattcaggcgcacaagttcattgaggccggccagtacaacagccacctctatgggaccagcgtccagtccgtgcgagaggtggcagagcaggggaagcactgcatcctcgatgtctcggccaatgccgtgcggcggctgcaggcggcccacctgcaccccatcgccatcttcatccgcccccgctccctggagaatgtgctagagattaacaagcggatcacagaggagcaagcccgcaaagccttcgacagagccaccaagctggagcaggagttcacagagtgcttctcagccatcgtggagggtgacagctttgaggagatctaccacaaggtgaagcgtgtcatcgaggacctctcaggcccctacatctgggttccagcccgagagagactctgattcctgccctggcttggcctggactcgccctgcctccatcacctgggcccttggtctggactgaattgcccaagcccttggctccccccggcctccctcccaccccttcttatttatttcctttctaactggatccagcctgttggaggggggacactcctctgcatgtatccccgcaccccagaactgggctcctgaacgccaggaacctggggtctgggggggagctgggctccttgttccgagcccttgctccttaggatccccgcccccacctgcccccaatgcacacacagacccaccgggggccacctgccctcccccatcctctcccacacacattccagaagtcagggccccctcgaggagcacccgctgcagggatgcagggccacaggcctccgctctctcctaaggcagggtctggggtcacccctgccctcatcgtaattccccatgttccttgatttctcatttattttttccactttttttcttctcaaaggtggttttttggggggagaagcaggggactccgcagcgggcccctgccttccacatgcccccaccatttttctttgccggtttgcatgagtggaaggtctaaatgtggcttttttttttttttttcctgggaatttttttggggaaaagggagggatgggtctagggagtgggaaatgcgggagggagggtggggggcaggggtcgggggtcgggtgtccgggagccagggaagactggaaatgctgccgccttctgcaatttatttatttttttcttttgagagagtgaaaggaagagacagatacttgaaa

SEQ ID NO: 127357 - DNA, 3975 bp, Homo sapiens
  Payload ID: 4920
  Gene Symbol: DLG4
  Gene Name: discs, large homolog 4 (Drosophila)
  Uniprot ID: P78352
  ENST ID: ENST00000399510
  CDS Start-End: 854-3157
gggacagaagaggaaggggcttaagtcactgcagccagagggatggaggtggactgaagggagggcttctccggtggggttagaagggaaaagtagggaaagagaagtgtaaggtagatggcagaggcagagacatggaaagacagactctagggttcctgatgaaatctatctcggccaacacaaaagggagggtacagtggtggggggcacccaagctagggtgtgagtaccctaagtgtattcttctgagatgtaggccattcactaactcttggaacagctacagtttcacagtaggaagacccccccagattcactgcccctcccttagtaaagcctctgagaccttcctgaacattcccttctgtctttgccctctgttccttccagagaccatgtgcccaggcagatggattcctcccgggcctgagaggaactgcaggaattctcctgcctcttacccgtaaaaccccaacttctctagccctagggcaggaagtcccaaacaatttctacccctttttctgcaattctcattggggtgagaggaggcccaggaggagagagagctgggctcagcttctttttgagctgctggagccctctgtgaggaggccctctttgctggcttctcaggagagcgtggctaggttctgcctgcctatgggaagagggggccagggtgtgtggagcaagatggtggcggtgctggtgccttgggacctgggggaatgggacagctggtcggctcagagacggcctactttactcacagctggaatttagtggggagaagcagctcaactccaatcctggaggattagggagattaaagtgagagaagagagagatgtcccagagaccaagagctcccaggtcagccctctggctcctggcacccccactgctgcggtgggcacccccactcctcacagtgctgcatagcgacctcttccaggccttgctggacatcctggactattatgaggcttccctctcagagagtcagaaataccgctaccaagatgaagacacgccccctctggagcacagcccggcccacctccccaaccaggccaattctcccccagtgattgtcaacacagataccctagaagccccaggatatgagttgcaggtgaacgggaccgagggggagatggaatacgaggaaatcacattggaaaggggtaactcaggtctgggcttcagcatcgcaggtggcactgacaacccacacatcggtgacgacccatccattttcatcaccaagatcattcctggtggggctgcggcccaggatggccgcctcagggtcaacgacagcatcctgtttgtaaatgaagtggacgtgcgcgaggtgacccactcagcggcggtggaagccctcaaagaggcaggctccatcgttcgcctctatgtcatgcgccggaagcccccggctgagaaggtcatggagatcaagctcatcaaggggcctaaaggtcttggcttcagcatcgcagggggcgtagggaaccagcacatcccaggagataatagcatctatgtaacaaagatcatcgaagggggtgctgcccacaaggatgggaggttgcagattggagacaagatcctggcggtcaacagtgtggggctagaggacgtcatgcatgaagatgctgtggcagccctgaagaacacgtatgatgttgtctacctaaaggtggccaagcccagcaatgcctacctgagtgacagctatgctcccccagacatcacaacctcttattcccagcacctggacaatgagatcagtcacagcagctacctgggcaccgactaccccacagccatgacccccacttcccctcggcgctactctccagtggccaaggacctgctcggggaggaagacattccccgagaaccgaggcgaattgtgatccaccggggctccacgggcctgggcttcaacatcgtgggtggcgaggacggtgaaggcatcttcatctcctttatcctggccgggggccctgcagacctcagtggggagctgcggaagggggaccagatcctgtcggtcaacggtgtggacctccgaaatgccagccatgagcaggctgccattgccctgaagaatgcgggtcagacggtcacgatcatcgctcagtataaaccagaagagtacagccgattcgaggccaagatccacgaccttcgggaacagctcatgaacagcagcctgggctcagggactgcgtccctgcggagcaaccccaaaaggggtttctacatcagggccctgtttgattacgacaagaccaaggactgcggcttcctgagccaggccctgagcttccgctttggggatgtgctgcatgtcatcgatgctagtgatgaggagtggtggcaggcacggcgggtccactctgacagtgagaccgacgacattgggttcatccccagcaaacggcgggttgagcgacgagagtggtcaaggttaaaggccaaggactggggctccagctctggatcgcagggtcgagaagactcggttctgagctacgagacagtgacgcagatggaagtgcactatgctcgccccatcatcatccttgggcccaccaaggaccgcgccaacgatgatcttctctccgagttccccgacaagtttggatcctgtgttccccatacgacacggcccaagcgggagtatgagatagatggccgggattaccactttgtgtcgtcccgggagaaaatggagaaggacattcaggcgcacaagttcattgaggccggccagtacaacagccacctctatgggaccagcgtccagtccgtgcgagaggtggcagagcaggggaagcactgcatcctcgatgtctcggccaatgccgtgcggcggctgcaggcggcccacctgcaccccatcgccatcttcatccgcccccgctccctggagaatgtgctagagattaacaagcggatcacagaggagcaagcccgcaaagccttcgacagagccaccaagctggagcaggagttcacagagtgcttctcagccatcgtggagggtgacagctttgaggagatctaccacaaggtgaagcgtgtcatcgaggacctctcaggcccctacatctgggttccagcccgagagagactctgattcctgccctggcttggcctggactcgccctgcctccatcacctgggcccttggtctggactgaattgcccaagcccttggctccccccggcctccctcccaccccttcttatttatttcctttctaactggatccagcctgttggaggggggacactcctctgcatgtatccccgcaccccagaactgggctcctgaacgccaggaacctggggtctgggggggagctgggctccttgttccgagcccttgctccttaggatccccgcccccacctgcccccaatgcacacacagacccaccgggggccacctgccctcccccatcctctcccacacacattccagaagtcagggccccctcgaggagcacccgctgcagggatgcagggccacaggcctccgctctctcctaaggcagggtctggggtcacccctgccctcatcgtaattccccatgttccttgatttctcatttattttttccactttttttcttctcaaaggtggttttttggggggagaagcaggggactccgcagcgggcccctgccttccacatgcccccaccatttttctttgccggtttgcatgagtggaaggtctaaatgtggcttttttttttttttttcctgggaatttttttggggaaaagggagggatgggtctagggagtgggaaatgcgggagggagggtggggggcaggggtcgggggtcgggtgtccgggagccagggaagactggaaatgctgccgccttctgcaatttatttatttttttcttttgagagagtgaaaggaagagacagatacttgaaa

SEQ ID NO: 127358 - DNA, 763 bp, Homo sapiens
  Payload ID: 4920
  Gene Symbol: DLG4
  Gene Name: discs, large homolog 4 (Drosophila)
  ENST ID: ENST00000447163
  CDS Start-End: 60-763
gaacgaaactccgatgaagtcagagccccttacccgccgccgcggccaggccccccaacatggactgtctctgtatagtgacaaccaagaaataccgctaccaagatgaagacacgccccctctggagcacagcccggcccacctccccaaccaggtaaacgcccccgagctggtgcacgtggcggagaggaacttgtcccacctcgaggctggccacggggtcgtgggccacgcccacctctcccccttcaaggccaattctcccccagtgattgtcaacacagataccctagaagccccaggatatgtgaacgggaccgagggggagatggaatacgaggaaatcacattggaaaggggtaactcaggtctgggcttcagcatcgcaggtggcactgacaacccacacatcggtgacgacccatccattttcatcaccaagatcattcctggtggggctgcggcccaggatggccgcctcagggtcaacgacagcatcctgtttgtaaatgaagtggacgtgcgcgaggtgacccactcagcggcggtggaagccctcaaagaggcaggctccatcgttcgcctctatgtcatgcgccggaagcccccggctgagaaggtcatggagatcaagctcatcaaggggcctaaaggtcttggcttcagcatcgcagggggcgtagggaaccagcacatcccaggagataatagcatctatgtaacaaagatcatcgaagggggtgctgcccacaaggatgggag

SEQ ID NO: 127359 - DNA, 926 bp, Homo sapiens
  Payload ID: 4920
  Gene Symbol: DLG4
  Gene Name: discs, large homolog 4 (Drosophila)
  ENST ID: ENST00000451807
  CDS Start-End: 83-926
cttggatcctctggtgatccaagccttcctaccagatatgaaactaggacattgggggtcatcttgggggcgcatgtaacagatgccgatcaacggggtcaatctcgcttggaaataccgctaccaagatgaagacacgccccctctggagcacagcccggcccacctccccaaccaggtaaacgcccccgagctggtgcacgtggcggagaggaacttgtcccacctcgaggctggccacggggtcgtgggccacgcccacctctcccccttcaaggccaattctcccccagtgattgtcaacacagataccctagaagccccaggatatgagttgcaggtgaacgggaccgagggggagatggaatacgaggaaatcacattggaaaggggtaactcaggtctgggcttcagcatcgcaggtggcactgacaacccacacatcggtgacgacccatccattttcatcaccaagatcattcctggtggggctgcggcccaggatggccgcctcagggtcaacgacagcatcctgtttgtaaatgaagtggacgtgcgcgaggtgacccactcagcggcggtggaagccctcaaagaggcaggctccatcgttcgcctctatgtcatgcgccggaagcccccggctgagaaggtcatggagatcaagctcatcaaggggcctaaaggtcttggcttcagcatcgcagggggcgtagggaaccagcacatcccaggagataatagcatctatgtaacaaagatcatcgaagggggtgctgcccacaaggatgggaggttgcagattggagacaagatcctggcggtcaacagtgtggggctagaggacgtcatgcatgaagatgctgtggcagccctgaagaacacgtatgatgttgtctacctaaaggtggccaagcccagcaatg

SEQ ID NO: 127360 - DNA, 1004 bp, Homo sapiens
  Payload ID: 4920
  Gene Symbol: DLG4
  Gene Name: discs, large homolog 4 (Drosophila)
  ENST ID: ENST00000485100
  CDS Start-End: 42-932
gtcagagccccttacccgccgccgcggccaggccccccaacatggactgtctctgtatagtgacaaccaagaaataccgctaccaagatgaagacacgccccctctggagcacagcccggcccacctccccaaccaggccaattctcccccagtgattgtcaacacagataccctagaagccccaggatatgtgaacgggaccgagggggagatggaatacgaggaaatcacattggaaaggggtaactcaggtctgggcttcagcatcgcaggtggcactgacaacccacacatcggtgacgacccatccattttcatcaccaagatcattcctggtggggctgcggcccaggatggccgcctcagggtcaacgacagcatcctgtttgtaaatgaagtggacgtgcgcgaggtgacccactcagcggcggtggaagccctcaaagaggcaggctccatcgttcgcctctatgtcatgcgccggaagcccccggctgagaaggtcatggagatcaagctcatcaaggggcctaaaggtcttggcttcagcatcgcagggggcgtagggaaccagcacatcccaggagataatagcatctatgtaacaaagatcatcgaagggggtgctgcccacaaggatgggaggttgcagattggagacaagatcctggcggtcaacagtgtggggctagaggacgtcatgcatgaagatgctgtggcagccctgaagaacacgtatgatgttgtctacctaaaggtggccaagcccagcaatgcctacctgagtgacagctatgctcccccagacatcacaacctgtgagagcccttcaaacaccaaagttccccatgacccatcccgtttaacccatgacatgcagtcccacgacatccctgtagctgtccctcttcagatattccctatgaaatagccacaacctctgatccttgctgttgttggagaagagatggaaaatcaattaccataaaagaactagaaaaga

SEQ ID NO: 127361 - DNA, 586 bp, Homo sapiens
  Payload ID: 4920
  Gene Symbol: DLG4
  Gene Name: discs, large homolog 4 (Drosophila)
  ENST ID: ENST00000486626
  CDS Start-End: 240-586
gtggattgaggctgggcccttgagcagctctcagggtggcggagtgggcttggctaagaggctgaaagggtagccacgctgatgggaccctccgttatgggctccctctcgagtcaaggctcaggctgctttttgtctcttgttttcccaaacaggccaattctcccccagtgattgtcaacacagataccctagaagccccaggatatgagttgcaggtgaacgggaccgagggggagatggaatacgaggaaatcacattggaaaggggtaactcaggtctgggcttcagcatcgcaggtggcactgacaacccacacatcggtgacgacccatccattttcatcaccaagatcattcctggtggggctgcggcccaggatggccgcctcagggtcaacgacagcatcctgtttgtaaatgaagtggacgtgcgcgaggtgacccactcagcggcggtggaagccctcaaagaggcaggctccatcgttcgcctctatgtcatgcgccggaagcccccggctgagaaggtcatggagatcaagctcatcaaggggcctaaaggtcttggcttcagcatcgcagg

SEQ ID NO: 127362 - DNA, 573 bp, Homo sapiens
  Payload ID: 4920
  Gene Symbol: DLG4
  Gene Name: discs, large homolog 4 (Drosophila)
  ENST ID: ENST00000493294
  CDS Start-End: 299-573
actgcgtagggtgaggggcgtaggggagcgaggaaggcaggttattcaggatgcgctgcgcccacaaacctcttcagcccggcctcctctcggcctggctaacgtggggcggggcccagggcaggagaggcggggctagcggatcccttctgcgctcaggagtttggtcggccccaggccacgccccacccccctgttgtcctgacgacagggcctcctggaggccaattctcccccagtgattgtcaacacagataccctagaagccccaggatatgtgaacgggaccgagggggagatggaatacgaggaaatcacattggaaaggggtaactcaggtctgggcttcagcatcgcaggtggcactgacaacccacacatcggtgacgacccatccattttcatcaccaagatcattcctggtggggctgcggcccaggatggccgcctcagggtcaacgacagcatcctgtttgtaaatgaagtggacgtgcgcgaggtgacccactcagcggcggtggaagccctcaaagaggcaggctccatcgttcgcctctatgtcatgcgccggaa

SEQ ID NO: 127363 - DNA, 869 bp, Homo sapiens
  Payload ID: 4920
  Gene Symbol: DLG4
  Gene Name: discs, large homolog 4 (Drosophila)
  ENST ID: ENST00000491753
  CDS Start-End: 1-257
ttgggcccaccaaggaccgcgccaacgatgatcttctctccgagttccccgacaagtttggatcctgtgttccccatacgacacggcccaagcgggagtatgagatagatggccgggattaccactttgtgtcgtcccgggagaaaatggagaaggacattcaggcgcacaagttcattgaggccggccagtacaacagccacctctatgggaccagcgtccagtccgtgcgagaggtggcagagcagagagattaacaagcggatcacagaggagcaagcccgcaaagccttcgacagagccaccaagctggagcaggagttcacagagtgcttctcagccatcgtggagggtgacagctttgaggagatctaccacaaggtgaagcgtgtcatcgaggacctctcaggcccctacatctgggttccagcccgagagagactctgattcctgccctggcttggcctggactcgccctgcctccatcacctgggcccttggtctggactgaattgcccaagcccttggctccccccggcctccctcccaccccttcttatttatttcctttctaactggatccagcctgttggaggggggacactcctctgcatgtatccccgcaccccagaactgggctcctgaacgccaggaacctggggtctgggggggagctgggctccttgttccgagcccttgctccttaggatccccgcccccacctgcccccaatgcacacacagacccaccgggggccacctgccctcccccatcctctcccacacacattccagaagtcagggccccctcgaggagcacccgctgcagggatgcagggccacaggcctccgctctctcctaaggcaggg

SEQ ID NO: 127364 - DNA, 7415 bp, Homo sapiens
  Payload ID: 4921
  Gene Symbol: DLG5
  Gene Name: discs, large homolog 5 (Drosophila)
  Uniprot ID: Q8TDM6
  ENST ID: ENST00000372391
  CDS Start-End: 7-5766
gccaccatggagccccagcgccgggagctgctcgcccagtgtcagcagagcctggcccaggccatgacggaggtggaagccgtgctcgggctgctcgaggccgcgggagcgctcagtcccggcgagcggcggcagctggacgaggaggcgggaggcgccaaggcggagctgctgctcaagctgctcttggccaaggagcgggaccacttccaggacctgcgggcggcgctggagaagacgcagcctcacctgctgcccattctctacctgaacggcgtcgtcgggccgccgcagcccgccgaaggcgcgggttctacctacagcgtcctgtccaccatgccctcagactcagaaagcagcagctccctcagcagtgtgggcactaccgggaaggcgccgtccccaccacccctcctcactgaccagcaagtgaatgagaaggtggagaacctctccattcagctgcggctgatgacccgggagagaaacgagctccgcaagcgcctggcctttgctacgcatggcacggcctttgacaagaggccctaccacaggctgaatcctgactatgagaggctgaagatccagtgcgtgcgagccatgtcggacctgcagagcctgcagaaccagcacaccaacgccttgaagaggtgtgaggaggtggccaaggagactgacttctaccacacactccacagccggctcctgagtgaccagactcggctgaaggatgacgtggacatgctgaggcgggagaatgggcagctgctgcgggagcgaaacctgctgcagcagtcatgggaggacatgaagcggctccacgaggaggaccagaaggagatcggtgacctccgtgcccagcagcagcaggtgttgaagcacaacgggtcatccgagattctcaacaaactgtatgacacggccatggacaagttggaggtggtcaagaaggactatgacgcccttcggaagaggtacagtgagaaagtcgccatccacaatgcagacctgagccgcctggagcagctgggggaggagaaccagcggttgctgaagcagacagagatgctgacccagcagagggacacggccatccagctgcagcaccagtgcgccctctccctgaggaggtttgaggcgatccaccatgagctgaacaaggccacggcgcagaacaaggacctgcagtgggagatggagctgctgcagtcagagctgaccgagctgagaaccacgcaggtgaagacagcaaaggagtcggagaaatacagggaggagcgggacgctgtgtacagcgagtacaagctcatcatgagtgagcgtgaccaggtcatctctgagctggacaagctgcagaccgaagtggagctggccgagtccaagctcaagagcagcacatctgagaagaaggcggccaatgaggagatggaggcgctgcggcagatcaaagacacggtgacaatggatgctgggagagccaacaaggaggttgaaatccttcgaaagcagtgcaaggctctgtgccaggagctgaaggaagccctccaggaggcggatgtggccaagtgccggcgggactgggccttccaggagcgagacaagattgtagcagagcgtgacagcatccggacactgtgtgacaacctgaggcgggagcgggaccgtgcggtgagcgagctggctgaggccctgcgcagcctggatgacacccgcaagcagaagaatgatgtcagccgcgagctgaaggagctcaaggaacagatggaatcccagttggaaaaggaggcccggttccgacagctgatggcccacagctcccacgactcggccattgacacggattccatggagtgggaaacggaagttgtagagttcgagagggagacggaggatattgacttgaaggcactggggtttgatatggcagaaggtgtgaatgagccttgtttcccgggggactgtggcatatttgtcactaaagtggacaaaggaagcattgctgatggccgcttaagggtcaatgactggctgctgagaatcaacgatgtggacctcatcaacaaggacaagaagcaggccatcaaggcgctcctcaatggggagggggccatcaacatggtcgtgcggcggaggaagtccctgggtgggaaggtggtcacgccgctgcacatcaacctcagtggacagaaagacagtggcatcagtctggagaatggagtgtatgctgccgctgtgctgcctggaagccctgccgctaaagaagggtcccttgctgtgggagacaggatcgttgcgatcaatggcattgcactggacaacaagtctctgaatgaatgtgaatctctgctgcgcagctgccaggactccctgaccctgtccctcctgaaggtattccctcagagctcctcgtggagtggccagaacatttttgaaaatatcaaagactctgataagatgctgagttttcgagcccatggcccggaggtccaggctcataacaaacggaacttgatacagcacaataactccacgcagacagacatcttctacacggacaggctggaagacaggaaggagccaggccccccaggaggcagcagctcctttctgcataagccattccctgggggacccttgcaggtctgcccccaggcctgtcccagtgcctctgagcgtagcctgagctccttccgctcagatgcctctggggaccgtggctttgggctggtggacgtgcgtggccggcggccactgctgccctttgagaccgaggtgggcccctgtggggttggggaggcctccctggacaaggcagactctgaaggctccaacagcggcgggacctggcccaaggccatgctcagctccacggcagtgcctgagaagctctctgtttataaaaagccaaagcaaagaaagtccatctttgaccctaacactttcaaacgcccccagacaccccccaaaatagactacctgcttccaggtcctgggcctgctcactctccccagccctccaagagggcggggcctctgacacccccaaaacctcccagaaggagcgactccattaagttccagcacaggctggagactagctccgagtcagaagccactctggtgggcagctccccatccactagtcccccgagcgccctgccccctgacgtggaccccggggagcccatgcacgcatcaccccctcgcaaggccagggtccgcattgcttccagctactaccctgaaggagatggggactcctcccacctgccggccaagaaatcctgtgatgaggacctcacctcccagaaggtggatgagctggggcagaagcgtcgccggccaaaatctgctcccagttttcggccgaagcttgctccagtagtgattcctgctcagttcctggaggaacagaagtgtgtcccggccagtggagaactctccccggagctccaggagtgggcaccttactcgcctgggcattccagccggcacagcaaccccccgctataccctagcaggccgtctgtgggcactgttccccggagtttgacccccagcaccactgtgagctccatcctgcggaaccccatctacactgtgcgcagtcacagggtcggcccctgcagctctccacctgcggcccgagatgctggcccccagggtttgcatcccagtgtccagcaccagggacgcctgagcctggacctgagccacaggacctgcagcgactactccgagatgagagccacccatgggtccaactcactgccctccagcgcccgcctgggttcttcgagtaacttgcagttcaaggcggaacgcattaaaatcccatcaacaccaagatatccgcggagtgtcgtgggctccgagagaggttcagtgtcacattctgaatgcagcactcctccacagtcacccctgaacatcgacaccctgtcctcttgtagccagtcccagacctcagcctccacattgcccagaatcgctgtcaaccccgcgtccctcggggagcggagaaaggacaggccttatgtggaggagccacgccacgtgaaggtgcagaagggctcagagccgctgggcatctccatcgtgagtggagagaagggcggcatctacgtctccaaggtgaccgtggggagcatcgctcaccaggctggcctcgagtatggggatcagttactggagttcaacggcataaacctgcggagcgccacggagcagcaggcgcggctcatcatcgggcagcagtgtgataccatcaccatcctggcccagtacaacccccacgtgcaccagctcagcagccactcccggtccagctcacacctggaccctgccggtacccactccactctccagggcagtggcaccaccaccccggagcatccatctgtcatcgacccactgatggagcaggacgaggggcctagcacccccccagccaagcagagcagctccaggattgcgggagatgccaacaagaagaccctggagccacgcgttgtcttcatcaaaaagtcccagctggagcttggggtgcacttgtgtggtgggaacctgcatggggtgtttgtggccgaggtggaggatgacagtcctgccaagggtcctgacggcctcgtgccaggggacctcatcctggagtatggcagcctggacgtgcggaacaagacagtggaggaagtctatgtggagatgctgaagcccagggatggcgtccgcctgaaggtgcagtaccgccctgaggagttcacgaaggccaagggcctgcctggtgacagcttctacatcagggccctgtacgaccggctggcagatgtggagcaagagttgagctttaagaaggacgacatcctctacgtggatgacaccttaccccagggcacgttcgggtcctggatggcttggcagctggacgagaatgcccagaagatccagcgcgggcagattcccagcaaatatgtgatggaccaagaattctccaggaggctcagcatgtctgaagtcaaagatgacaatagcgccacaaagacgctgtcagcggctgcacgccggtccttttttcggaggaaacacaagcacaaacgcagcgggtccaaggacgggaaagacctgctcgccttggatgccttttccagtgactccattccactctttgaagattcggtgagcctggcctatcagcgggtccagaaggtggactgcaccgctctgaggcctgtcctgattctggggcctttgctggacgtggtgaaggagatgctggtgaatgaggctcctggcaagttctgcagatgtccccttgaggtgatgaaggcctcccagcaggccattgagcggggtgtcaaagattgcctgtttgtcgactataagcggagaagcggccatttcgatgtgaccactgtggcgtcaataaaggagatcacagaaaagaaccgacactgcctcctggacattgctccgcacgctattgagcggctccaccacatgcacatctaccccattgtcatcttcatccactacaagagcgccaagcacatcaaggagcagagagaccccatctacctgagggacaaggtgactcagaggcattccaaagagcagtttgaggcggcgcagaagcttgagcaggagtacagcaggtacttcacaggggtcatccagggaggagccctgtcaagcatttgcactcagatcttggcaatggtcaatcaagaacaaaataaagtcctgtggattccagcctgcccgctctaggagaatgctgtgctgtggatgactgcagctggccgcctgaggggacaccagactcagctcttttctagcgactgaaagtagaagtctgtccgtctatgaacatgcgggggaaggatccggaaccaggacccagaagcacctcctttgtagacagagggccacggctgcgtgcgatccaggcccaggcccacacactctgcccgtgtcacacgtgtgctttaacacaaaacagataacactaaagacgggttcagcacccacctttctttagccagctgatcagagatgctgcaaagagaacctttcggatcactcgtttacaagccttttctaagtatttggtggtttatgtttacttgaacggctccatgttgccggtgcccagcccctgtcccctctgtcaaccccctgtcgctttggtgttggtttcgttcccgtcttcagcaaaacgaccttggaacctcaatgggggctgctttgctttgggaggttcttgttggtgggaccagagctttgacaaacctcctgctccttggtggcacctctcctggaaggacgtcacaactccaggtgctcagactgcctgtggcagcagaaccagtgcctttggcattttcctcccacaatggggaaggtgactttggcattcttacaaactcgtctctcggcctttctctcctgccttccacagcctctcgtttctcctccatctgtgcttattacttgaggactgtgtctgctccgtgagagctgcgtgggcagggctgcagtggggtccaggtggtgttcagctgtgctgatgcctgccattgggtcctccttaggctctgtaagtcgtgacagccttcatcagtgcaatgtttgcagggtaattcttaaactttttagagggtggcaggtacatcagttctttttgatatgaaaacattcatgtttcagacattgaattgagagcttttaggggaagcataatggttattgtcactatcaacagtctaaaaagaaaaactgaggtctttttaatcttgattacagcactcacggcatgcaccctactcagtgtgggtgtcttcgtttgggggctttttttttttttgcacttctgaggctagatatgtctggctgaagatttgatgtggttcctccttaagctatgcgtcctgttaataataggtactgtactgggctctgtgtaagtgtcgttggggtaggacctatattttaatactgttcctaacatttcattttactagcgagaaatctttgatttcattttattctttgtaattctagacactagattgtagtttagccataactgatgttttttaaaaagggatatattttcttgcacagttgttcaaaaaagagacaagtttcagtcctcaatgctgtcctttgttttacaggtacaagttttctagctcagacaaactatgaaaaactgtagactattctcaaggtattaactcgcagaccctctgggggtaggggctgttttctaagttacaggcagagtgggactgagatggtacagtgtgcacagacaggtactgagctgacagactgggattttctgtactaaaatgttactttgtatcaaaagttaaacaggctttagtacaacaaataaaggtcaatttctgtaa

SEQ ID NO: 127365 - DNA, 4292 bp, Homo sapiens
  Payload ID: 4921
  Gene Symbol: DLG5
  Gene Name: discs, large homolog 5 (Drosophila)
  ENST ID: ENST00000424842
  CDS Start-End: 1-2643
ggggccatcaacatggtcgtgcggcggaggaagtccctgggtgggaaggtggtcacgccgctgcacatcaacctcagtggacagaaagacagtggcatcagtctggagaatggagtgtatgctgccgctgtgctgcctggaagccctgccgctaaagaagggtcccttgctgtgggagacaggatcgttgcgatcaatggcattgcactggacaacaagtctctgaatgaatgtgaatctctgctgcgcagctgccaggactccctgaccctgtccctcctgaaggaacagaagtgtgtcccggccagtggagaactctccccggagctccaggagtgggcaccttactcgcctgggcattccagccggcacagcaaccccccgctataccctagcaggccgtctgtgggcactgttccccggagtttgacccccagcaccactgtgagctccatcctgcggaaccccatctacactgtgcgcagtcacagggtcggcccctgcagctctccacctgcggcccgagatgctggcccccagggtttgcatcccagtgtccagcaccagggacgcctgagcctggacctgagccacaggacctgcagcgactactccgagatgagagccacccatgggtccaactcactgccctccagcgcccgcctgggttcttcgagtaacttgcagttcaaggcggaacgcattaaaatcccatcaacaccaagatatccgcggagtgtcgtgggctccgagagaggttcagtgtcacattctgaatgcagcactcctccacagtcacccctgaacatcgacaccctgtcctcttgtagccagtcccagacctcagcctccacattgcccagaatcgctgtcaaccccgcgtccctcggggagcggagaaaggacaggccttatgtggaggagccacgccacgtgaaggtgcagaagggctcagagccgctgggcatctccatcgtgagtggagagaagggcggcatctacgtctccaaggtgaccgtggggagcatcgctcaccaggctggcctcgagtatggggatcagttactggagttcaacggcataaacctgcggagcgccacggagcagcaggcgcggctcatcatcgggcagcagtgtgataccatcaccatcctggcccagtacaacccccacgtgcaccagctcagcagccactcccggtccagctcacacctggaccctgccggtacccactccactctccagggcagtggcaccaccaccccggagcatccatctgtcatcgacccactgatggagcaggacgaggggcctagcacccccccagccaagcagagcagctccaggattgcgggagatgccaacaagaagaccctggagccacgcgttgtcttcatcaaaaagtcccagctggagcttggggtgcacttgtgtggtgggaacctgcatggggtgtttgtggccgaggtggaggatgacagtcctgccaagggtcctgacggcctcgtgccaggggacctcatcctggagtatggcagcctggacgtgcggaacaagacagtggaggaagtctatgtggagatgctgaagcccagggatggcgtccgcctgaaggtgcagtaccgccctgaggagttcacgaaggccaagggcctgcctggtgacagcttctacatcagggccctgtacgaccggctggcagatgtggagcaagagttgagctttaagaaggacgacatcctctacgtggatgacaccttaccccagggcacgttcgggtcctggatggcttggcagctggacgagaatgcccagaagatccagcgcgggcagattcccagcaaatatgtgatggaccaagaattctccaggaggctcagcatgtctgaagtcaaagatgacaatagcgccacaaagacgctgtcagcggctgcacgccggtccttttttcggaggaaacacaagcacaaacgcagcgggtccaaggacgggaaagacctgctcgccttggatgccttttccagtgactccattccactctttgaagattcggtgagcctggcctatcagcgggtccagaaggtggactgcaccgctctgaggcctgtcctgattctggggcctttgctggacgtggtgaaggagatgctggtgaatgaggctcctggcaagttctgcagatgtccccttgaggtgatgaaggcctcccagcaggccattgagcggggtgtcaaagattgcctgtttgtcgactataagcggagaagcggccatttcgatgtgaccactgtggcgtcaataaaggagatcacagaaaagaaccgacactgcctcctggacattgctccgcacgctattgagcggctccaccacatgcacatctaccccattgtcatcttcatccactacaagagcgccaagcacatcaaggagcagagagaccccatctacctgagggacaaggtgactcagaggcattccaaagagcagtttgaggcggcgcagaagcttgagcaggagtacagcaggtacttcacaggggtcatccagggaggagccctgtcaagcatttgcactcagatcttggcaatggtcaatcaagaacaaaataaagtcctgtggattccagcctgcccgctctaggagaatgctgtgctgtggatgactgcagctggccgcctgaggggacaccagactcagctcttttctagcgactgaaagtagaagtctgtccgtctatgaacatgcgggggaaggatccggaaccaggacccagaagcacctcctttgtagacagagggccacggctgcgtgcgatccaggcccaggcccacacactctgcccgtgtcacacgtgtgctttaacacaaaacagataacactaaagacgggttcagcacccacctttctttagccagctgatcagagatgctgcaaagagaacctttcggatcactcgtttacaagccttttctaagtatttggtggtttatgtttacttgaacggctccatgttgccggtgcccagcccctgtcccctctgtcaaccccctgtcgctttggtgttggtttcgttcccgtcttcagcaaaacgaccttggaacctcaatgggggctgctttgctttgggaggttcttgttggtgggaccagagctttgacaaacctcctgctccttggtggcacctctcctggaaggacgtcacaactccaggtgctcagactgcctgtggcagcagaaccagtgcctttggcattttcctcccacaatggggaaggtgactttggcattcttacaaactcgtctctcggcctttctctcctgccttccacagcctctcgtttctcctccatctgtgcttattacttgaggactgtgtctgctccgtgagagctgcgtgggcagggctgcagtggggtccaggtggtgttcagctgtgctgatgcctgccattgggtcctccttaggctctgtaagtcgtgacagccttcatcagtgcaatgtttgcagggtaattcttaaactttttagagggtggcaggtacatcagttctttttgatatgaaaacattcatgtttcagacattgaattgagagcttttaggggaagcataatggttattgtcactatcaacagtctaaaaagaaaaactgaggtctttttaatcttgattacagcactcacggcatgcaccctactcagtgtgggtgtcttcgtttgggggctttttttttttttgcacttctgaggctagatatgtctggctgaagatttgatgtggttcctccttaagctatgcgtcctgttaataataggtactgtactgggctctgtgtaagtgtcgttggggtaggacctatattttaatactgttcctaacatttcattttactagcgagaaatctttgatttcattttattctttgtaattctagacactagattgtagtttagccataactgatgttttttaaaaagggatatattttcttgcacagttgttcaaaaaagagacaagtttcagtcctcaatgctgtcctttgttttacaggtacaagttttctagctcagacaaactatgaaaaactgtagactattctcaaggtattaactcgcagaccctctgggggtaggggctgttttctaagttacaggcagagtgggactgagatggtacagtgtgcacagacaggtactgagctgacagactgggattttctgtactaaaatgttactttgtatcaaaagttaaacaggctttagtacaacaaataaaggtcaatttctgtaa

SEQ ID NO: 127366 - DNA, 5505 bp, Homo sapiens
  Payload ID: 4921
  Gene Symbol: DLG5
  Gene Name: discs, large homolog 5 (Drosophila)
  ENST ID: ENST00000468332
  CDS Start-End: 1-645
tcagccactgttctggacactcatgggaaacaagtggcctttgtcatgagctggtggacagagtgcgctgtcagcacgggttctacctacagcgtcctgtccaccatgccctcagactcagaaagcagcagctccctcagcagtgtgggcactaccgggaaggcgccgtccccaccacccctcctcactgaccagcaagtgaatgagaaggtggagaacctctccattcagctgcggctgatgacccgggagagaaacgagctccgcaagcgcctggcctttgctacgcatggcacggcctttgacaagaggccctaccacaggctgaatcctgactatgagaggctgaagatccagtgcgtgcgagccatgtcggacctgcagagcctgcagaaccagcacaccaacgccttgaagaggtgtgaggaggtggccaaggagactgacttctaccacacactccacagccggctcctgagtgaccagactcggctgaaggatgacgtggacatgctgaggcgggagaatgggcagctgctgcgggagcgaaacctgctgcagcagtcatgggaggacatgaagcggctccacgaggaggaccagaaggagatcggtgacctccgtgcccagcagcagcagagctgaccctaattccaaagggagtgttccatcgtcccagcttctggttctctaggctgcaaacgcttgataaaccaggctgccactgaatgagccaggtgattcctcggctgttggagctggaagggccagacaagctttcctggtctagcctgggcatttgaggaatccggaagctgaaacccagagaggtggagtgactcaccccagggctcagatcccatgaggtgttgaagcacaacgggtcatccgagattctcaacaaactgtatgacacggccatggacaagttggaggtggtcaagaaggactatgacgcccttcggaagaggtacagtgagaaagtcgccatccacaatgcagacctgagccgcctggagcagctgggggaggagaaccagcggttgctgaagcagacagagatgctgacccagcagagggacacggccatccagctgcagcaccagtgcgccctctccctgaggaggtttgaggcgatccaccatgagctgaacaaggccacggcgcagaacaaggacctgcagtgggagatggagctgctgcagtcagagctgaccgagctgagaaccacgcaggtgaagacagcaaaggagtcggagaaatacagggaggagcgggacgctgtgtacagcgagtacaagctcatcatgagtgagcgtgaccaggtcatctctgagctggacaagctgcagaccgaagtggagctggccgagtccaagctcaagagcagcacatctgagaagaaggcggccaatgaggagatggaggcgctgcggcagatcaaagacacggtgacaatggatgctgggagagccaacaaggaggttgaaatccttcgaaagcagtgcaaggctctgtgccaggagctgaaggaagccctccaggaggcggatgtggccaagtgccggcgggactgggccttccaggagcgagacaagattgtagcagagcgtgacagcatccggacactgtgtgacaacctgaggcgggagcgggaccgtgcggtgagcgagctggctgaggccctgcgcagcctggatgacacccgcaagcagaagaatgatgtcagccgcgagctgaaggagctcaaggaacagatggaatcccagttggaaaaggaggcccggttccgacagctgatggcccacagctcccacgactcggccattgacacggattccatggagtgggaaacggaagttgtagagttcgagagggagacggaggatattgacttgaaggcactggggtttgatatggcagaaggtgtgaatgagccttgtttcccgggggactgtggcatatttgtcactaaagtggacaaaggaagcattgctgatggccgcttaagggtcaatgactggctgctgagaatcaacgatgtggacctcatcaacaaggacaagaagcaggccatcaaggcgctcctcaatggggagggggccatcaacatggtcgtgcggcggaggaagtccctgggtgggaaggtggtcacgccgctgcacatcaacctcagtggacagaaagacagtggcatcagtctggagaatggagtgtatgctgccgctgtgctgcctggaagccctgccgctaaagaagggtcccttgctgtgggagacaggatcgttgcgatcaatggcattgcactggacaacaagtctctgaatgaatgtgaatctctgctgcgcagctgccaggactccctgaccctgtccctcctgaaggtattccctcagagctcctcgtggagtggccagaacatttttgaaaatatcaaagactctgataagatgctgagttttcgagcccatggcccggaggtccaggctcataacaaacggaacttgatacagcacaataactccacgcagacagacatcttctacacggacaggctggaagacaggaaggagccaggccccccaggaggcagcagctcctttctgcataagccattccctgggggacccttgcaggtctgcccccaggcctgtcccagtgcctctgagcgtagcctgagctccttccgctcagatgcctctggggaccgtggctttgggctggtggacgtgcgtggccggcggccactgctgccctttgagaccgaggtgggcccctgtggggttggggaggcctccctggacaaggcagactctgaaggctccaacagcggcgggacctggcccaaggccatgctcagctccacggcagtgcctgagaagctctctgtttataaaaagccaaagcaaagaaagtccatctttgaccctaacactttcaaacgcccccagacaccccccaaaatagactacctgcttccaggtcctgggcctgctcactctccccagccctccaagagggcggggcctctgacacccccaaaacctcccagaaggagcgactccattaagttccagcacaggctggagactagctccgagtcagaagccactctggtgggcagctccccatccactagtcccccgagcgccctgccccctgacgtggaccccggggagcccatgcacgcatcaccccctcgcaaggccagggtccgcattgcttccagctactaccctgaaggagatggggactcctcccacctgccggccaagaaatcctgtgatgaggacctcacctcccagaaggtggatgagctggggcagaagcgtcgccggccaaaatctgctcccagttttcggccgaagcttgctccagtagtgattcctgctcagttcctggaggaacagaagtgtgtcccggccagtggagaactctccccggagctccaggagtgggcaccttactcgcctgggcattccagccggcacagcaaccccccgctataccctagcaggccgtctgtgggcactgttccccggagtttgacccccagcaccactgtgagctccatcctgcggaaccccatctacactgtgcgcagtcacagggtcggcccctgcagctctccacctgcggcccgagatgctggcccccagggtttgcatcccagtgtccagcaccagggacgcctgagcctggacctgagccacaggacctgcagcgactactccgagatgagagccacccatgggtccaactcactgccctccagcgcccgcctgggttcttcgagtaacttgcagttcaaggcggaacgcattaaaatcccatcaacaccaagatatccgcggagtgtcgtgggctccgagagaggttcagtgtcacattctgaatgcagcactcctccacagtcacccctgaacatcgacaccctgtcctcttgtagccagtcccagacctcagcctccacattgcccagaatcgctgtcaaccccgcgtccctcggggagcggagaaaggacaggccttatgtggaggagccacgccacgtgaaggtgcagaagggctcagagccgctgggcatctccatcgtgagtggagagaagggcggcatctacgtctccaaggtgaccgtggggagcatcgctcaccaggctggcctcgagtatggggatcagttactggagttcaacggcataaacctgcggagcgccacggagcagcaggcgcggctcatcatcgggcagcagtgtgataccatcaccatcctggcccagtacaacccccacgtgcaccagctcagcagccactcccggtccagctcacacctggaccctgccggtacccactccactctccagggcagtggcaccaccaccccggagcatccatctgtcatcgacccactgatggagcaggacgaggggcctagcacccccccagccaagcagagcagctccaggattgcgggagatgccaacaagaagaccctggagccacgcgttgtcttcatcaaaaagtcccagctggagcttggggtgcacttgtgtggtgggaacctgcatggggtgtttgtggccgaggtggaggatgacagtcctgccaagggtcctgacggcctcgtgccaggggacctcatcctggagtatggcagcctggacgtgcggaacaagacagtggaggaagtctatgtggagatgctgaagcccagggatggcgtccgcctgaaggtgcagtaccgccctgaggagttcacgaaggccaagggcctgcctggtgacagcttctacatcagggccctgtacgaccggctggcagatgtggagcaagagttgagctttaagaaggacgacatcctctacgtggatgacaccttaccccagggcacgttcgggtcctggatggcttggcagctggacgagaatgcccagaagatccagcgcgggcagattcccagcaaatatgtgaagggcaggaagggcagggcagcagggtctcgatggccctgcccagcattgtcccctgtgccacaggatggaccaagaattctccaggaggctcagcatgtctgaagtcaaagatgacaatagcgccacaaagacgctgtcagcggctgcacgccggtccttttttcggaggaaacacaagcacaaacgcagcgggtccaaggacgggaaagacctgctcgccttggatgccttttccagtgactccattccactctttgaagattcggtgagcctggcctatcagcgggtccagaaggtggactgcaccgctctgaggcctgtcctgattctggggcctttgctggacgtggtgaaggagatgctggtgaatgaggctcctggcaagttctgcagatgtccccttgaggtgatgaaggcctcccagcaggccattgagcggggtgtcaaagattgcctgtttgtcgactataagcggagaagcggccatttcgatgtgaccactgtggcgtcaataaaggagatcacagaaaag

SEQ ID NO: 127367 - DNA, 7415 bp, Homo sapiens; identical to SEQ ID NO: 127364
  Payload ID: 4921
  Gene Symbol: DLG5
  Gene Name: discs, large homolog 5 (Drosophila)
  Uniprot ID: Q8TDM6
  ENST ID: ENST00000614211
  CDS Start-End: 7-5766

SEQ ID NO: 127368 - DNA, 4292 bp, Homo sapiens; identical to SEQ ID NO: 127365
  Payload ID: 4921
  Gene Symbol: DLG5
  Gene Name: discs, large homolog 5 (Drosophila)
  ENST ID: ENST00000632221
  CDS Start-End: 1-2643

SEQ ID NO: 127369 - DNA, 5505 bp, Homo sapiens; identical to SEQ ID NO: 127366
  Payload ID: 4921
  Gene Symbol: DLG5
  Gene Name: discs, large homolog 5 (Drosophila)
  ENST ID: ENST00000633108
  CDS Start-End: 1-645

SEQ ID NO: 127370 - DNA, 3167 bp, Homo sapiens
  Payload ID: 4921
  Gene Symbol: DLG5
  Gene Name: discs, large homolog 5 (Drosophila)
  ENST ID: ENST00000632417
  CDS Start-End: 1-1795
ccagacaccccccaaaatagactacctgcttccaggtcctgggcctgctcactctccccagccctccaagagggcggggcctctgacacccccaaaacctcccagaaggagcgactccattaagttccagcacaggctggagactagctccgagtcagaagccactctggtgggcagctccccatccactagtcccccgagcgccctgccccctgacgtggaccccggggagcccatgcacgcatcaccccctcgcaaggccagggtccgcattgcttccagctactaccctgaaggagatggggactcctcccacctgccggccaagaaatcctgtgatgaggacctcacctcccagaaggtggatgagctggggcagaagcgtcgccggccaaaatctgctcccagttttcggccgaagcttgctccagtagtgattcctgctcagttcctggaggaacagaagtgtgtcccggccagtggagaactctccccggagctccaggagtgggcaccttactcgcctgggcattccagccggcacagcaaccccccgctataccctagcaggccgtctgtgggcactgttccccggagtttgacccccagcaccactgtgagctccatcctgcggaaccccatctacactgtgcgcagtcacagggtcggcccctgcagctctccacctgcggcccgagatgctggcccccagggtttgcatcccagtgtccagcaccagggacgcctgagcctggacctgagccacaggacctgcagcgactactccgagatgagagccacccatgggtccaactcactgccctccagcgcccgcctgggttcttcgagtaacttgcagttcaaggcggaacgcattaaaatcccatcaacaccaagatatccgcggagtgtcgtgggctccgagagaggttcagtgtcacattctgaatgcagcactcctccacagtcacccctgaacatcgacaccctgtcctcttgtagccagtcccagacctcagcctccacattgcccagaatcgctgtcaaccccgcgtccctcggggagcggagaaaggacaggccttatgtggaggagccacgccacgtgaaggtgcagaagggctcagagccgctgggcatctccatcgtgagtggagagaagggcggcatctacgtctccaaggtgaccgtggggagcatcgctcaccaggctggcctcgagtatggggatcagttactggagttcaacggcataaacctgcggagcgccacggagcagcaggcgcggctcatcatcgggcagcagtgtgataccatcaccatcctggcccagtacaacccccacgtgcaccagctcagcagccactcccggtccagctcacacctggaccctgccggtacccactccactctccagggcagtggcaccaccaccccggagcatccatctgtcatcgacccactgatggagcaggacgaggggcctagcacccccccagccaagcagagcagctccaggattgcgggagatgccaacaagaagaccctggagccacgcgttgtcttcatcaaaaagtcccagctggagcttggggtgcacttgtgtggtgggaacctgcatggggtgtttgtggccgaggtggaggatgacagtcctgccaagggtcctgacggcctcgtgccaggggacctcatcctggagcctggacgtgcggaacaagacagtggaggaagtctatgtggagatgctgaagcccagggatggcgtccgcctgaaggtgcagtaccgccctgaggagttcacgaaggccaagggcctgcctggtgacagcttctacatcagggccctgtacgaccggctggcagatgtggagcaagagttgagctttaagaaggacgacatcctctacgtggatgacaccttaccccagggcacgttcgggtcctggatggcttggcagctggacgagaatgcccagaagatccagcgcgggcagattcccagcaaatatgtgatggaccaagaattctccaggaggctcagcatgtctgaagtcaaagatgacaatagcgccacaaagacgctgtcagcggctgcacgccggtccttttttcggaggaaacacaagcacaaacgcagcgggtccaaggacgggaaagacctgctcgccttggatgccttttccagtgactccattccactctttgaagattcggtgagcctggcctatcagcgggtccagaaggtggactgcaccgctctgaggcctgtcctgattctggggcctttgctggacgtggtgaaggagatgctggtgaatgaggctcctggcaagttctgcagatgtccccttgaggtgatgaaggcctcccagcaggccattgagcggggtgtcaaagattgcctgtttgtcgactataagcggagaagcggccatttcgatgtgaccactgtggcgtcaataaaggagatcacagaaaagaaccgacactgcctcctggacattgctccgcacgctattgagcggctccaccacatgcacatctaccccattgtcatcttcatccactacaagagcgccaagcacatcaaggagcagagagaccccatctacctgagggacaaggtgactcagaggcattccaaagagcagtttgaggcggcgcagaagcttgagcaggagtacagcaggtacttcacaggtaggtgtgcgtgggcctggagtggggagcaggcagcagggaaggaagcagaggcttcctaaggctgttttcttagccgtggagaagcccgcactttctacatgctcccaagtgctgtcatgagcacgttcctgacaagtcaggtgttcagattgcagtccctggccaacgtcaggattcttacaggttgaatgttaagctcaccgatcttggcctcaggtcctgcctggcttgcctgctcattttcacacgtgcagtggtgggtctgtctcatagcacaggtgcagtttagtgcagccacagtgtccccaggcagggcggggactggagcagcccccagtgtgccagcagtgtgggcagcggaggctaggggcccatctgtccctagcaccctccagggcagtcccgttttgcagcgggatttggcaaacccccctccaaaaaaaaaaaaacaaaaaacaaaa

SEQ ID NO: 127371 - DNA, 4227 bp, Homo sapiens
  Payload ID: 4922
  Gene Symbol: DAAM1
  Gene Name: dishevelled associated activator of morphogenesis 1
  Uniprot ID: Q9Y4D1
  ENST ID: ENST00000360909
  CDS Start-End: 127-3333
ctacgagcggctgtgaaggaaactgtttaaccggatcccattgtacccagagtgcagagccgcctttccagcatgcaggggctgctcagcgtttagtcacatcaagaaatagaacagaattcagccatggccccaagaaagagaggtggacgaggtatttcattcatcttttgctgtttccgaaataatgatcacccagaaatcacgtatcggctgcgaaatgatagcaactttgcgcttcagaccatggaaccagcattgcccatgccccctgtggaggagctggatgtcatgttcagtgaactggtggatgaactggacctcacagacaaacacagagaagccatgtttgcacttccagctgagaaaaaatggcaaatatactgtagcaagaaaaaggaccaggaagaaaacaagggagctacaagttggcctgaattctacattgatcagctcaattccatggctgctagaaaatctctgctggctttagagaaggaagaagaagaagaaagaagtaaaactatagagagtttaaagacagcactgaggacaaaaccaatgaggtttgtaaccagattcatcgacttggatggcctatcatgtatcctcaactttctaaagaccatggactacgagacctcagagtctcgaatacatacttctctcattggctgtataaaggcgttaatgaacaactctcaaggccgggctcacgtcctggctcattctgagagtattaatgtaattgctcagagtctgagcacagagaacattaaaacgaaggtggccgtgctggaaatcttgggcgccgtgtgcctggttcccgggggccacaagaaggttctgcaggccatgctgcactaccagaagtatgccagcgaaaggacccgctttcagacattaattaacgacttggataaaagcactgggcggtatcgagatgaagtgagtctcaagactgccatcatgtccttcattaatgcagtgctcagccaaggtgcaggagtggagagtttggactttagacttcatcttcgctatgaatttctgatgttaggaattcaacctgtaatagataaattaagggaacacgaaaattcaacattagataggcatttagacttttttgaaatgctccgaaatgaagatgaactagaatttgccaaaagatttgaactggttcacatagacacaaaaagtgcaactcagatgtttgagctgaccaggaagaggctgacacatagtgaagcttacccgcatttcatgtccatcctgcaccactgcctccaaatgccttacaagaggagtggcaacactgttcagtactggctactactagatagaattatacagcagatagttatccagaatgacaaaggacaggaccctgactccacacctttggaaaactttaatattaagaatgtcgtacgaatgttggttaatgaaaatgaagttaagcagtggaaagaacaagcggaaaaaatgagaaaagagcacaatgagctacaacagaaactggaaaagaaagaacgagaatgtgatgctaagactcaagagaaggaagagatgatgcagaccttaaataaaatgaaagagaaacttgaaaaggagactactgagcataagcaagtcaagcagcaggtggcggacctcacagcacagctccatgagctcagcaggagggccgtctgtgcttcaatcccaggtggaccctcgcctggagcaccaggagggccctttccttcctctgtgcctggatctctccttcctcccccaccacccccacctctaccaggtgggatgcttccccctccaccgcctcccctccctccaggtggccctcctcctcccccagggcctcctcccttaggggcaatcatgccacctcctggtgctccaatgggcctagcactgaagaagaaaagcattcctcagcccacaaatgccctgaaatccttcaactggtctaaactgcccgagaacaaactggaaggaacagtatggaccgaaattgatgatacaaaagtcttcaaaattctagatcttgaagacctggaaagaaccttctctgcctatcaaagacagcagaaagaagcagatgccattgatgacactctgagttccaaacttaaagttaaagagctttcggtgattgatggtcggagagctcagaattgcaacatccttctatcgaggttgaaattatccaatgacgaaatcaaacgggcaattctaacaatggacgaacaggaagatctgcccaaggacatgttggaacagctcttgaaatttgttcctgaaaaaagtgacattgacctattggaggaacataaacacgaactggatcggatggccaaggctgataggttcctttttgagatgagccgaattaatcactatcagcaaaggttgcaatcgctgtacttcaaaaagaagtttgcagagcgtgtggcagaagtgaaacctaaagtggaagcaattcgttctggctcagaagaggtgtttaggagtggtgccctcaagcagttgctggaggtggttttggcatttggaaattatatgaataaaggtcaaagagggaatgcatatggattcaagatatctagcctaaacaaaattgctgacacaaaatccagcatcgacaaaaacattacccttttgcactatctcatcactattgtggaaaataagtaccccagtgttctcaatctaaatgaagaattgcgagatattcctcaagctgcgaaagtaaacatgactgagctggacaaagaaataagtaccttgagaagtggcttgaaagcagtagagacagagctggaatatcagaagtctcagcccccacagcccggagataagtttgtgtctgttgtcagccagttcatcacagtagccagcttcagcttctctgatgttgaagaccttctagcagaagctaaagacctgtttactaaagcagtgaagcactttggggaagaggctggcaaaatacaaccagatgagttctttggcatttttgatcaatttcttcaagctgtgtcagaagccaaacaagaaaacgaaaatatgagaaagaaaaaggaggaagaagaacgtcgagctcgcatggaagctcagctcaaagaacaacgtgaaagggaacgtaaaatgagaaaagctaaagagaatagtgaagaaagcggagagtttgatgaccttgtttcagctttacgctcaggagaagtgtttgacaaagacctttctaaattgaaacggaatcgcaaacgtattaccaaccagatgactgacagcagcagagagagaccaatcacaaaacttaatttctaattttccatgaatacttttttttagaaagctcattagcagccctctaaagtgactagaacgtttcattacactgccttgcaatccaaacagtggcaattttttccttcatctgtgagtgaatgtgtgaacgtgtgtatgtaaatgtatgtgtgtatatattaaaaaatgtatatagatgtctgagtgttgtctggagacctatacgtatggttaaaaagatttatgttaatgtatgtgctccaaaacctttcgtgtatgcattcacattgagtgtggctcattttctttccccgaacgccatgactgttcagaagcacaatactatctcctgaaagagataagagacattccctagattcaaaggcaaaacagaagaaacaaacaaacaaacaaaaaaagcttgcaaaatattttatggtttccaagcttgatatcctttaaaattattttcattgatggaactggagttgttggaaaaacatagatttaaaatgatttttgatagctgacattgtgatgttgatgtatcacatcagtaataggaccagctttgaatttctgacattggtgtggggatacagtctgtaaatgtttattgagaacatcttgcacacaatttgaattatgtagaatgtcaatcaagtttttgtatatttaaaagttggacatcaattttttcccctgatttcatcaagttatctctgccaagtgctcttgataatttcttcagatttttggaaaaaaacactatataaatgcaatccatgctttttttaaagaacaacattgccagagtatgcttgttctaacaatatagatatataaaccttaaaaataataaaatatctcacccaagacttaaaggaagaattctctgaagggataaagattact

SEQ ID NO: 127372 - DNA, 5806 bp, Homo sapiens
  Payload ID: 4922
  Gene Symbol: DAAM1
  Gene Name: dishevelled associated activator of morphogenesis 1
  Uniprot ID: Q9Y4D1
  ENST ID: ENST00000395125
  CDS Start-End: 24-3260
aagaaatagaacagaattcagccatggccccaagaaagagaggtggacgaggtatttcattcatcttttgctgtttccgaaataatgatcacccagaaatcacgtatcggctgcgaaatgatagcaactttgcgcttcagaccatggaaccagcattgcccatgccccctgtggaggagctggatgtcatgttcagtgaactggtggatgaactggacctcacagacaaacacagagaagccatgtttgcacttccagctgagaaaaaatggcaaatatactgtagcaagaaaaaggaccaggaagaaaacaagggagctacaagttggcctgaattctacattgatcagctcaattccatggctgctagaaaatctctgctggctttagagaaggaagaagaagaagaaagaagtaaaactatagagagtttaaagacagcactgaggacaaaaccaatgaggtttgtaaccagattcatcgacttggatggcctatcatgtatcctcaactttctaaagaccatggactacgagacctcagagtctcgaatacatacttctctcattggctgtataaaggcgttaatgaacaactctcaaggccgggctcacgtcctggctcattctgagagtattaatgtaattgctcagagtctgagcacagagaacattaaaacgaaggtggccgtgctggaaatcttgggcgccgtgtgcctggttcccgggggccacaagaaggttctgcaggccatgctgcactaccagaagtatgccagcgaaaggacccgctttcagacattaattaacgacttggataaaagcactgggcggtatcgagatgaagtgagtctcaagactgccatcatgtccttcattaatgcagtgctcagccaaggtgcaggagtggagagtttggactttagacttcatcttcgctatgaatttctgatgttaggaattcaacctgtaatagataaattaagggaacacgaaaattcaacattagataggcatttagacttttttgaaatgctccgaaatgaagatgaactagaatttgccaaaagatttgaactggttcacatagacacaaaaagtgcaactcagatgtttgagctgaccaggaagaggctgacacatagtgaagcttacccgcatttcatgtccatcctgcaccactgcctccaaatgccttacaagaggagtggcaacactgttcagtactggctactactagatagaattatacagcagatagttatccagaatgacaaaggacaggaccctgactccacacctttggaaaactttaatattaagaatgtcgtacgaatgttggttaatgaaaatgaagttaagcagtggaaagaacaagcggaaaaaatgagaaaagagcacaatgagctacaacagaaactggaaaagaaagaacgagaatgtgatgctaagactcaagagaaggaagagatgatgcagaccttaaataaaatgaaagagaaacttgaaaaggagactactgagcataagcaagtcaagcagcaggtggcggacctcacagcacagctccatgagctcagcaggagggccgtctgtgcttcaatcccaggtggaccctcgcctggagcaccaggagggccctttccttcctctgtgcctggatctctccttcctcccccaccacccccacctctaccaggtgggatgcttccccctccaccgcctcccctccctccaggtggccctcctcctcccccagggcctcctcccttaggggcaatcatgccacctcctggtgctccaatgggcctagcactgaagaagaaaagcattcctcagcccacaaatgccctgaaatccttcaactggtctaaactgcccgagaacaaactggaaggaacagtatggaccgaaattgatgatacaaaagtcttcaaaattctagatcttgaagacctggaaagaaccttctctgcctatcaaagacagcaggatttctttgtgaacagtaactccaagcagaaagaagcagatgccattgatgacactctgagttccaaacttaaagttaaagagctttcggtgattgatggtcggagagctcagaattgcaacatccttctatcgaggttgaaattatccaatgacgaaatcaaacgggcaattctaacaatggacgaacaggaagatctgcccaaggacatgttggaacagctcttgaaatttgttcctgaaaaaagtgacattgacctattggaggaacataaacacgaactggatcggatggccaaggctgataggttcctttttgagatgagccgaattaatcactatcagcaaaggttgcaatcgctgtacttcaaaaagaagtttgcagagcgtgtggcagaagtgaaacctaaagtggaagcaattcgttctggctcagaagaggtgtttaggagtggtgccctcaagcagttgctggaggtggttttggcatttggaaattatatgaataaaggtcaaagagggaatgcatatggattcaagatatctagcctaaacaaaattgctgacacaaaatccagcatcgacaaaaacattacccttttgcactatctcatcactattgtggaaaataagtaccccagtgttctcaatctaaatgaagaattgcgagatattcctcaagctgcgaaagtaaacatgactgagctggacaaagaaataagtaccttgagaagtggcttgaaagcagtagagacagagctggaatatcagaagtctcagcccccacagcccggagataagtttgtgtctgttgtcagccagttcatcacagtagccagcttcagcttctctgatgttgaagaccttctagcagaagctaaagacctgtttactaaagcagtgaagcactttggggaagaggctggcaaaatacaaccagatgagttctttggcatttttgatcaatttcttcaagctgtgtcagaagccaaacaagaaaacgaaaatatgagaaagaaaaaggaggaagaagaacgtcgagctcgcatggaagctcagctcaaagaacaacgtgaaagggaacgtaaaatgagaaaagctaaagagaatagtgaagaaagcggagagtttgatgaccttgtttcagctttacgctcaggagaagtgtttgacaaagacctttctaaattgaaacggaatcgcaaacgtattaccaaccagatgactgacagcagcagagagagaccaatcacaaaacttaatttctaattttccatgaatacttttttttagaaagctcattagcagccctctaaagtgactagaacgtttcattacactgccttgcaatccaaacagtggcaattttttccttcatctgtgagtgaatgtgtgaacgtgtgtatgtaaatgtatgtgtgtatatattaaaaaatgtatatagatgtctgagtgttgtctggagacctatacgtatggttaaaaagatttatgttaatgtatgtgctccaaaacctttcgtgtatgcattcacattgagtgtggctcattttctttccccgaacgccatgactgttcagaagcacaatactatctcctgaaagagataagagacattccctagattcaaaggcaaaacagaagaaacaaacaaacaaacaaaaaaagcttgcaaaatattttatggtttccaagcttgatatcctttaaaattattttcattgatggaactggagttgttggaaaaacatagatttaaaatgatttttgatagctgacattgtgatgttgatgtatcacatcagtaataggaccagctttgaatttctgacattggtgtggggatacagtctgtaaatgtttattgagaacatcttgcacacaatttgaattatgtagaatgtcaatcaagtttttgtatatttaaaagttggacatcaattttttcccctgatttcatcaagttatctctgccaagtgctcttgataatttcttcagatttttggaaaaaaacactatataaatgcaatccatgctttttttaaagaacaacattgccagagtatgcttgttctaacaatatagatatataaaccttaaaaataataaaatatctcacccaagacttaaaggaagaattctctgaagggataaagattactaaaaaaaaaaaaaaaaaaaaaaaattaatggggtgcctttttgttatagtttctattttctgttttgtaggacaagctgcattttctgtaaatataggtctggactaaaggatacataaagaatgcacaaaatgtcaacatcagcagagatgcccagatctatttatctctaagtatatttgaagtgattgctgtttatatgttgtcattttaaaattgtgtgtcagtaaagctacctgtaaaatttcagtccaaaaaaataaagctctcagggagacatgaataaaatcaatgaacattagaaaataaaatatagatgcttaccattaacctaccaactcttaatatccttaaattatgtgatatataaagaggactgttacttttttacttttttttttttttttttttttttttggctttgctttatttatttgtagttgggggctaacgttttctcttttctttctattgatcctgttgtggttgggtttcctgtggagagagtagtttgtcctgttgcactagaacattatttactcactaaattgagtttttcagtcaattaacaaatatttattaagttcctactatgtaccaggcatagtagggctacaatggtaagcaagacagagtccctgcccccaaagagcttatattctaatggggatattaagggatgaatagaataccaatgtgtgcactgtacaggaatcatactatttaaaaataatttgtataaactataatgcttagcacagatggcgagttatctgtgctatgtgaaagctgtgaaatagtgctctaagagttgtcaagagctgtggttttacatcttttcctcattgcaaatttagtgactttctacacactatatggaaataaatgactagcaaataaaacagtcataaatacaaagcagaggttgcactcccccaatcccgagttaacccaggtctgcaataacaccatgttaaaggtgcagatagagacttggctcaaaaaggcttggagatgaggaagattggaatataatgatggttttgtctgttccttaactaaagtgcctctatgtatattcttttctatttgtagcaggataaatttggtctggctcagttttggaactgtattttgaaaatggctttgtcttacagtttaaggaatagacaggtggagggaaagtcacataaaggagcaagtttgtgtagctgtccctcttgccccttttaatcatcctcctttgatatggccatcctggtgggcctcctttgccatttccatttttggtttctttccctgaaaactgtgtgcaggtaattccatgtgccattgttgaaaagaaaaaaaaaaaacaaaaaaaaaacctactttttagattggtgctggtgtaagtagccacttttctctcttgggtgtgtattttaaactttttttgtttttttaaattaatgccaaaaagaaaatgcataatttgtaaacttaattatatgtcttatatcttattagcttagtagttggaaccacttagtctttaggtgcaagactgttgttagatagtactgagaaaaaaaaagtatgtgttatgagactgtacatgtttttttaaaaatagcaatatgcaataaagagatgaattcattgggtgtaca

SEQ ID NO: 127373 - DNA, 582 bp, Homo sapiens
  Payload ID: 4922
  Gene Symbol: DAAM1
  Gene Name: dishevelled associated activator of morphogenesis 1
  ENST ID: ENST00000556135
  CDS Start-End: 108-398
aaactgtttaaccggatcccattgtacccagagtgcagagccgcctttccagcatgcaggggctgctcagcgtttagtcacatcaagaaatagaacagaattcagccatggccccaagaaagagaggtggacgaggtatttcattcatcttttgctgtttccgaaataatgatcacccagaaatcacgtatcggctgcgaaatgatagcaactttgcgcttcagaccatggaaccagcattgcccatgccccctgtggaggagctggatgtcatgttcagtgaactggtggatgaactggacctcacagacaaacacagagaagccatgtttgcacttccagctgagaaaaaatggcaaatatactgtagcaagaaaaaggtaagattttcattgtgattatggttaactggaaaataatcattgattccatttgctcttccatttcaccactagaattggacagctctttgtaatatgaaaaccagattgaatgtgttatgttgtggctgtggtgctacatgtagccagtgtcaattccctggatgttgtttttgtcagtacttcattgggctcttttcca

SEQ ID NO: 127374 - DNA, 6194 bp, Homo sapiens
  Payload ID: 4923
  Gene Symbol: DAAM2
  Gene Name: dishevelled associated activator of morphogenesis 2
  Uniprot ID: Q86T65
  ENST ID: ENST00000274867
  CDS Start-End: 157-3363
gcttcccggggatagcgcggagcacgcagcagcgagcggagcgcgggcggcggcgccgtacctcgggctgcgggagcgcgggcgccctggggtcctcggaatcacaatgaggacctagggcatctgtctgctgacgccccctggcctgcagtgaccatggccccccgcaagaggagccaccatggcctgggcttcctgtgctgcttcgggggcagtgacatccccgaaatcaacctccgggacaaccaccctctgcagttcatggagttctccagccccatcccgaacgcagaggagctcaacatccgctttgcagagctggtggatgaattggatctcactgacaaaaaccgagaggctatgtttgcactgccccctgagaagaaatggcagatctactgcagcaagaagaaggagcaggaggaccccaacaagctggcaaccagctggcctgactattacatcgaccgcatcaattccatggctgcgatgcagagtctgtacgcgtttgatgaggaggagacggagatgaggaaccaagtcgtggaagacctgaagacagccctccggacacagcctatgaggtttgtgacccgcttcattgagctggagggcttgacctgtctgctaaatttcctccggagcatggaccacgccacctgtgagagccgcatccacacctcactcattggctgcatcaaagcattgatgaacaactcccaggggcgggcacatgtgctggcacagcctgaggccattagtaccatagcccagagcctacgcacagagaacagcaagaccaaggtggctgtgctggagatcctgggtgctgtgtgcctcgtgcctggtggccacaagaaggtgctgcaggccatgctgcactaccaggtgtatgcagcagagcgaacccgcttccagaccctgctgaacgagctagaccgaagtctgggccggtaccgggatgaagtgaatctgaaaacagccatcatgtccttcatcaatgctgtcctcaatgctggagctggagaggataatctggagttccgcctacatctacggtatgaattcctgatgctgggtatacagcctgtgattgacaagctccggcaacatgaaaatgccatcctggacaaacatttagacttcttcgagatggtgcggaatgaggatgacctggagctagccaggaggtttgacatggtccacatcgacaccaagagtgcttcccagatgtttgagttgatccacaagaagctgaagtacacggaggcctacccctgcctgctctctgtgctgcaccactgcctgcagatgccctacaaacggaacggtggctacttccagcagtggcagctcctggaccgcatcctccagcagattgtcctccaggatgagcggggtgtggaccctgacctggctcccttggagaacttcaatgtcaagaacatcgtcaacatgctcatcaacgagaatgaagtgaaacagtggcgagaccaggcagagaagttccggaaagaacacatggagcttgtgagccgtctggagaggaaggagcgggaatgcgagacaaagacattggagaaggaagagatgatgcggacgctgaacaaaatgaaggacaagctggcccgggagtcccaggagctgcgccaggctcggggacaagtggcagagctggtagcccagctcagtgaactctcaacaggccctgtatcttccccaccaccccctgggggcccactcaccttgtcttcctcaatgacaaccaatgacctgcctccaccccctcctcctctgccctttgcctgttgtccccctcccccaccaccaccccttcctcccgggggacccccgactcccccaggtgccccaccttgcctcggcatgggcctgcccctccctcaggacccctaccccagcagtgacgtcccactcaggaaaaagcgtgtcccccagccttctcacccactgaagtccttcaactgggtgaagctgaatgaggagcgtgtccctggcaccgtatggaatgagattgatgacatgcaggtatttcggatcctggacctagaggattttgaaaagatgttttcagcctaccagaggcaccagaaagagctgggctccactgaagacatctacctggcttcccgcaaggtcaaagagctgtcggtcattgatggccggagggcccaaaactgcatcatccttctttccaagttgaagctttctaacgaggagatccggcaggccatcttgaagatggatgagcaggaggaccttgctaaggacatgctggagcagctcctcaagttcatcccagagaagagtgacattgacctcctggaggagcacaagcatgaaattgagcggatggcccgtgctgaccgcttcctctatgaaatgagcaggattgaccactaccagcagcgactgcaagccctcttcttcaagaagaaattccaggagcggctggctgaggcaaagcccaaagtggaagccatcctgttggcctcccgggagctggtccgcagcaagcgtcttagacagatgctagaggtcatcctagccataggcaacttcatgaacaaagggcagcgtgggggcgcctacgggttccgggtggccagcctcaacaagatcgctgacaccaagtccagcatcgacagaaacatctctctgctccattacctgatcatgatcctggagaagcattttcctgatattctaaacatgccttcagagctgcaacatcttccagaagctgccaaagtcaacctagcagaactggagaaggaggtgggcaacctcaggaggggcctgagagcggtggaggtggagctggagtatcagaggcgccaggtacgggagcccagtgacaagtttgtccctgtcatgagcgacttcatcacggtgtccagcttcagcttctccgagctggaggaccagctaaatgaggccagggacaagttcgccaaggccttgatgcacttcggggagcatgacagcaagatgcagccagacgaattctttggcatctttgataccttcttgcaggccttctcagaggcccggcaggatctagaggccatgaggaggaggaaggaggaggaggagcggcgggcgcgcatggaagccatgctgaaggagcagagggaacgtgagcggtggcagcggcagcggaaggtcctggctgcaggcagctcgctggaggagggaggagagttcgatgacctggtgtcggccctgcgctctggggaggtcttcgacaaggacttatgcaagctcaagcgcagccgcaagcgatcagggagccaggccctggaagttacccgggagcgggcaataaaccggctaaattattgacctggggaactagccacacaggaggccgggagacagggactggtgagaatggggctgagtggaggaggtggtgatatttaaaccatttggtgcttggtttagagccttgggctgggtcctgggatggggggctgtgtgtggctggaccaggtgtctccccacgcttaccttaaggggctcctcttatctccccttcacatgattccttctgtgccctggccccaggtattattctgaggctgccttggatggcctcaggccaggtaaccccaggctgaaggggccctgctccccatcccctaccatgggcacccatgtgctggcacagaacagttccagatctagactggagaggtccacagccttgtccagagttcctgtgtagcacggggagcaatgatggagggagcccctgagagggaatctggtgagggaatccagactcccttctctcaaggggaggctcaacagaacattgacctgggggcaaactttcctcttgaatgggaacagaggaggcattatatattctagttagatcagctctggtaggttccagagaacagtcaatgttggaaggatgatgcagggaccaaagccatcaggacagagtagcagtgtctgtttcccatgtcacaagtcctctggcctctccctgcatgtcttaagtatctttcccttccttctctaccctcacctccatcctgtctactaatccacagtcctagaagactcaccttgggtttccacagctatggctcactaccaggtgcttgatgaatctggcgaggggctcaagacagacctcatgcatcaccacacctcatgccttttgggcatctcccatgtccccatctcctggacacctggccattgttgtgaagccagacagtgacctcaaatgttgccttggagtcccctacagcccctcagcagagggcagcacttgaatgcttagctccatcccatagttctctacttcatataaattgctcaggccctcccaccccttctctaacactagcttcaaggcagaagccacagcagcctctgtccagcctgcaggtggccacttggaaccatgtgtccactggcgttggggagttggttcctgagaggtctgagggccagagctgccctctacattaacatgctgtctctaagggtggcccctcctctcaggcgttcagatggtgcgaacagcagagcaggcaagggaaactggggagatggggatggaggaggaaggctgatatcctctggggagcacatcacctgaaggtgccaaggaggaaggctgagaggggggccaccccatttctggtacccaatttggttcttcagcccaacttgcaaggggttccttctggtcctcccatccactgccaccttccattttgtccatctcatgctggccttggtggatgggatggctgtatctagacaaaatttttctaaaactccatcaaggctcttattcaataccacgttccgagttggcctttcatcttctttgagactggccctgcctaacctctaccatcaatgagctcttggcccttctgcccttccctgtgtttctcactttccaacctaatccctggctcagggttattgccagtggagactggtgagctgggcctactctcagctgcctatcttctgcctttcacttgcatccaactcctggggctgggaccgtagtagctgcgggggggaagaaacacagggtcggtgagcccagcatgtgcgttggtttgagggggcgggcggtgtgtgtgtgttctggtgggagggatctgagcaagtgcaagcctggctgacacaggtgtgaagaggccatcctggaacccaggtgagggcaagatgaaggcttccaggcagaacagctgcagagagtttggctatatgcatctgcagccccaagagctcccactgcaagacaagtgttggggaagatgggaggttgtgggtgaggcctctaaaggtcctctcccaaactgaccaggctgatgtcaacctaaccccctcaggggcagggaacaggggagggctccacaagcgtgtctggcattcccacccaccatggaagactggatacgcacctggaaacaaaaggactatggaagctgttcaagatacatttgatcttcagaaaagcagaatttggttcaactgttgacagaggacacaaatacgttgttccagagctcagccttctcactctaaaagaaagatatttttctatttattttctacatctggccagtggctctggtgctagatgccactgtagccagatctccaacagtgccttggaccatggactcatactcaactgagtaagaaggggctggtgcccagtcggggtggctgagctggtccttaataggttgtttcttggtcttgctttcttcatgccctccccactgctcctgccacctttagataagtttctctagctaattttgtggccaatgtaaaattcgtcatcaacctaacaaacacaaccttctcagcagcatttctcccctgtgatggaaataaagtgtttagggcagtgggaggagaaaattctccaggtgaatggggaagggtctgttccagcctctccctactcccatcccatttccaccaactggggaactgtgactatctatctcccccgacttctaccagggatgccttcacgccaaggctgttctcaccagctgcctcagatgacaaatgaggctaatggacataatctacagtgtcctttttcacttgcaccttttttataagaatatattgtaatactaaaaaatattaaattcataccatccctaccc

SEQ ID NO: 127375 - DNA, 6224 bp, Homo sapiens
  Payload ID: 4923
  Gene Symbol: DAAM2
  Gene Name: dishevelled associated activator of morphogenesis 2
  Uniprot ID: Q86T65
  ENST ID: ENST00000398904
  CDS Start-End: 183-3389
aggaaaggggtccccggactctggggctctcagcacctgcggtcgcaaaccaacctcatgccctgactttaccaggcgtcgggactctgacttaaccggggaatgagggacttggtctggcggcagatcacaatgaggacctagggcatctgtctgctgacgccccctggcctgcagtgaccatggccccccgcaagaggagccaccatggcctgggcttcctgtgctgcttcgggggcagtgacatccccgaaatcaacctccgggacaaccaccctctgcagttcatggagttctccagccccatcccgaacgcagaggagctcaacatccgctttgcagagctggtggatgaattggatctcactgacaaaaaccgagaggctatgtttgcactgccccctgagaagaaatggcagatctactgcagcaagaagaaggagcaggaggaccccaacaagctggcaaccagctggcctgactattacatcgaccgcatcaattccatggctgcgatgcagagtctgtacgcgtttgatgaggaggagacggagatgaggaaccaagtcgtggaagacctgaagacagccctccggacacagcctatgaggtttgtgacccgcttcattgagctggagggcttgacctgtctgctaaatttcctccggagcatggaccacgccacctgtgagagccgcatccacacctcactcattggctgcatcaaagcattgatgaacaactcccaggggcgggcacatgtgctggcacagcctgaggccattagtaccatagcccagagcctacgcacagagaacagcaagaccaaggtggctgtgctggagatcctgggtgctgtgtgcctcgtgcctggtggccacaagaaggtgctgcaggccatgctgcactaccaggtgtatgcagcagagcgaacccgcttccagaccctgctgaacgagctagaccgaagtctgggccggtaccgggatgaagtgaatctgaaaacagccatcatgtccttcatcaatgctgtcctcaatgctggagctggagaggataatctggagttccgcctacatctacggtatgaattcctgatgctgggtatacagcctgtgattgacaagctccggcaacatgaaaatgccatcctggacaaacatttagacttcttcgagatggtgcggaatgaggatgacctggagctagccaggaggtttgacatggtccacatcgacaccaagagtgcttcccagatgtttgagttgatccacaagaagctgaagtacacggaggcctacccctgcctgctctctgtgctgcaccactgcctgcagatgccctacaaacggaacggtggctacttccagcagtggcagctcctggaccgcatcctccagcagattgtcctccaggatgagcggggtgtggaccctgacctggctcccttggagaacttcaatgtcaagaacatcgtcaacatgctcatcaacgagaatgaagtgaaacagtggcgagaccaggcagagaagttccggaaagaacacatggagcttgtgagccgtctggagaggaaggagcgggaatgcgagacaaagacattggagaaggaagagatgatgcggacgctgaacaaaatgaaggacaagctggcccgggagtcccaggagctgcgccaggctcggggacaagtggcagagctggtagcccagctcagtgaactctcaacaggccctgtatcttccccaccaccccctgggggcccactcaccttgtcttcctcaatgacaaccaatgacctgcctccaccccctcctcctctgccctttgcctgttgtccccctcccccaccaccaccccttcctcccgggggacccccgactcccccaggtgccccaccttgcctcggcatgggcctgcccctccctcaggacccctaccccagcagtgacgtcccactcaggaaaaagcgtgtcccccagccttctcacccactgaagtccttcaactgggtgaagctgaatgaggagcgtgtccctggcaccgtatggaatgagattgatgacatgcaggtatttcggatcctggacctagaggattttgaaaagatgttttcagcctaccagaggcaccagaaagagctgggctccactgaagacatctacctggcttcccgcaaggtcaaagagctgtcggtcattgatggccggagggcccaaaactgcatcatccttctttccaagttgaagctttctaacgaggagatccggcaggccatcttgaagatggatgagcaggaggaccttgctaaggacatgctggagcagctcctcaagttcatcccagagaagagtgacattgacctcctggaggagcacaagcatgaaattgagcggatggcccgtgctgaccgcttcctctatgaaatgagcaggattgaccactaccagcagcgactgcaagccctcttcttcaagaagaaattccaggagcggctggctgaggcaaagcccaaagtggaagccatcctgttggcctcccgggagctggtccgcagcaagcgtcttagacagatgctagaggtcatcctagccataggcaacttcatgaacaaagggcagcgtgggggcgcctacgggttccgggtggccagcctcaacaagatcgctgacaccaagtccagcatcgacagaaacatctctctgctccattacctgatcatgatcctggagaagcattttcctgatattctaaacatgccttcagagctgcaacatcttccagaagctgccaaagtcaacctagcagaactggagaaggaggtgggcaacctcaggaggggcctgagagcggtggaggtggagctggagtatcagaggcgccaggtacgggagcccagtgacaagtttgtccctgtcatgagcgacttcatcacggtgtccagcttcagcttctccgagctggaggaccagctaaatgaggccagggacaagttcgccaaggccttgatgcacttcggggagcatgacagcaagatgcagccagacgaattctttggcatctttgataccttcttgcaggccttctcagaggcccggcaggatctagaggccatgaggaggaggaaggaggaggaggagcggcgggcgcgcatggaagccatgctgaaggagcagagggaacgtgagcggtggcagcggcagcggaaggtcctggctgcaggcagctcgctggaggagggaggagagttcgatgacctggtgtcggccctgcgctctggggaggtcttcgacaaggacttatgcaagctcaagcgcagccgcaagcgatcagggagccaggccctggaagttacccgggagcgggcaataaaccggctaaattattgacctggggaactagccacacaggaggccgggagacagggactggtgagaatggggctgagtggaggaggtggtgatatttaaaccatttggtgcttggtttagagccttgggctgggtcctgggatggggggctgtgtgtggctggaccaggtgtctccccacgcttaccttaaggggctcctcttatctccccttcacatgattccttctgtgccctggccccaggtattattctgaggctgccttggatggcctcaggccaggtaaccccaggctgaaggggccctgctccccatcccctaccatgggcacccatgtgctggcacagaacagttccagatctagactggagaggtccacagccttgtccagagttcctgtgtagcacggggagcaatgatggagggagcccctgagagggaatctggtgagggaatccagactcccttctctcaaggggaggctcaacagaacattgacctgggggcaaactttcctcttgaatgggaacagaggaggcattatatattctagttagatcagctctggtaggttccagagaacagtcaatgttggaaggatgatgcagggaccaaagccatcaggacagagtagcagtgtctgtttcccatgtcacaagtcctctggcctctccctgcatgtcttaagtatctttcccttccttctctaccctcacctccatcctgtctactaatccacagtcctagaagactcaccttgggtttccacagctatggctcactaccaggtgcttgatgaatctggcgaggggctcaagacagacctcatgcatcaccacacctcatgccttttgggcatctcccatgtccccatctcctggacacctggccattgttgtgaagccagacagtgacctcaaatgttgccttggagtcccctacagcccctcagcagagggcagcacttgaatgcttagctccatcccatagttctctacttcatataaattgctcaggccctcccaccccttctctaacactagcttcaaggcagaagccacagcagcctctgtccagcctgcaggtggccacttggaaccatgtgtccactggcgttggggagttggttcctgagaggtctgagggccagagctgccctctacattaacatgctgtctctaagggtggcccctcctctcaggcgttcagatggtgcgaacagcagagcaggcaagggaaactggggagatggggatggaggaggaaggctgatatcctctggggagcacatcacctgaaggtgccaaggaggaaggctgagaggggggccaccccatttctggtacccaatttggttcttcagcccaacttgcaaggggttccttctggtcctcccatccactgccaccttccattttgtccatctcatgctggccttggtggatgggatggctgtatctagacaaaatttttctaaaactccatcaaggctcttattcaataccacgttccgagttggcctttcatcttctttgagactggccctgcctaacctctaccatcaatgagctcttggcccttctgcccttccctgtgtttctcactttccaacctaatccctggctcagggttattgccagtggagactggtgagctgggcctactctcagctgcctatcttctgcctttcacttgcatccaactcctggggctgggaccgtagtagctgcgggggggaagaaacacagggtcggtgagcccagcatgtgcgttggtttgagggggcgggcggtgtgtgtgtgttctggtgggagggatctgagcaagtgcaagcctggctgacacaggtgtgaagaggccatcctggaacccaggtgagggcaagatgaaggcttccaggcagaacagctgcagagagtttggctatatgcatctgcagccccaagagctcccactgcaagacaagtgttggggaagatgggaggttgtgggtgaggcctctaaaggtcctctcccaaactgaccaggctgatgtcaacctaaccccctcaggggcagggaacaggggagggctccacaagcgtgtctggcattcccacccaccatggaagactggatacgcacctggaaacaaaaggactatggaagctgttcaagatacatttgatcttcagaaaagcagaatttggttcaactgttgacagaggacacaaatacgttgttccagagctcagccttctcactctaaaagaaagatatttttctatttattttctacatctggccagtggctctggtgctagatgccactgtagccagatctccaacagtgccttggaccatggactcatactcaactgagtaagaaggggctggtgcccagtcggggtggctgagctggtccttaataggttgtttcttggtcttgctttcttcatgccctccccactgctcctgccacctttagataagtttctctagctaattttgtggccaatgtaaaattcgtcatcaacctaacaaacacaaccttctcagcagcatttctcccctgtgatggaaataaagtgtttagggcagtgggaggagaaaattctccaggtgaatggggaagggtctgttccagcctctccctactcccatcccatttccaccaactggggaactgtgactatctatctcccccgacttctaccagggatgccttcacgccaaggctgttctcaccagctgcctcagatgacaaatgaggctaatggacataatctacagtgtcctttttcacttgcaccttttttataagaatatattgtaatactaaaaaatattaaattcataccatccctacccagtc

SEQ ID NO: 127376 - DNA, 829 bp, Homo sapiens
  Payload ID: 4923
  Gene Symbol: DAAM2
  Gene Name: dishevelled associated activator of morphogenesis 2
  ENST ID: ENST00000405961
  CDS Start-End: 428-826
ctcgggtctcagcgatgccccctgtgtctcccacccctaggcctgcacagaggggactcagaggccgagataatttacttttgctttctttgccttttccagagcatagggggaaaccgtaatttaggcggctgctaagaatagctcccccaatcctggaaagagcgtgtgcttatttttgaaagtgctccttgtctctcccccagccctgcctgaggctcacagtacaagtcagtcaaattgttcagggcagcagtggtgtctggagacctggtttgagttcctaggttcatacctagcgtccttctgagcctcaagtttcttcgtctgtaaaaagagaagatgaaagtttgagataaacctcgaacatgatcacaatgaggacctagggcatctgtctgctgacgccccctggcctgcagtgaccatggccccccgcaagaggagccaccatggcctgggcttcctgtgctgcttcgggggcagtgacatccccgaaatcaacctccgggacaaccaccctctgcagttcatggagttctccagccccatcccgaacgcagaggagctcaacatccgctttgcagagctggtggatgaattggatctcactgacaaaaaccgagaggctatgtttgcactgccccctgagaagaaatggcagatctactgcagcaagaagaaggtgccctctctgacccctctggccacatctcagggttcatggcatggggtggctcttgctgccttggcatgctcatgcattcacctgatgtttattacatgccagccctgttctaggtgttggaggaacaacagtgaataaaat

SEQ ID NO: 127377 - DNA, 6247 bp, Homo sapiens
  Payload ID: 4923
  Gene Symbol: DAAM2
  Gene Name: dishevelled associated activator of morphogenesis 2
  Uniprot ID: Q86T65
  ENST ID: ENST00000538976
  CDS Start-End: 204-3407
gggcgggggaaggagcatctcaggaaaggggtccccggactctggggctctcagcacctgcggtcgcaaaccaacctcatgccctgactttaccaggcgtcgggactctgacttaaccggggaatgagggacttggtctggcggcagatcacaatgaggacctagggcatctgtctgctgacgccccctggcctgcagtgaccatggccccccgcaagaggagccaccatggcctgggcttcctgtgctgcttcgggggcagtgacatccccgaaatcaacctccgggacaaccaccctctgcagttcatggagttctccagccccatcccgaacgcagaggagctcaacatccgctttgcagagctggtggatgaattggatctcactgacaaaaaccgagaggctatgtttgcactgccccctgagaagaaatggcagatctactgcagcaagaagaaggagcaggaggaccccaacaagctggcaaccagctggcctgactattacatcgaccgcatcaattccatggctgcgatgcagagtctgtacgcgtttgatgaggaggagacggagatgaggaaccaagtcgtggaagacctgaagacagccctccggacacagcctatgaggtttgtgacccgcttcattgagctggagggcttgacctgtctgctaaatttcctccggagcatggaccacgccacctgtgagagccgcatccacacctcactcattggctgcatcaaagcattgatgaacaactcccaggggcgggcacatgtgctggcacagcctgaggccattagtaccatagcccagagcctacgcacagagaacagcaagaccaaggtggctgtgctggagatcctgggtgctgtgtgcctcgtgcctggtggccacaagaaggtgctgcaggccatgctgcactaccaggtgtatgcagcagagcgaacccgcttccagaccctgctgaacgagctagaccgaagtctgggccggtaccgggatgaagtgaatctgaaaacagccatcatgtccttcatcaatgctgtcctcaatgctggagctggagaggataatctggagttccgcctacatctacggtatgaattcctgatgctgggtatacagcctgtgattgacaagctccggcaacatgaaaatgccatcctggacaaacatttagacttcttcgagatggtgcggaatgaggatgacctggagctagccaggaggtttgacatggtccacatcgacaccaagagtgcttcccagatgtttgagttgatccacaagaagctgaagtacacggaggcctacccctgcctgctctctgtgctgcaccactgcctgcagatgccctacaaacggaacggtggctacttccagcagtggcagctcctggaccgcatcctccagcagattgtcctccaggatgagcggggtgtggaccctgacctggctcccttggagaacttcaatgtcaagaacatcgtcaacatgctcatcaacgagaatgaagtgaaacagtggcgagaccaggcagagaagttccggaaagaacacatggagcttgtgagccgtctggagaggaaggagcgggaatgcgagacaaagacattggagaaggaagagatgatgcggacgctgaacaaaatgaaggacaagctggcccgggagtcccaggagctgcgccaggctcggggacaagtggcagagctggtagcccagctcagtgaactctcaacaggccctgtatcttccccaccaccccctgggggcccactcaccttgtcttcctcaatgacaaccaatgacctgcctccaccccctcctcctctgccctttgcctgttgtccccctcccccaccaccaccccttcctcccgggggacccccgactcccccaggtgccccaccttgcctcggcatgggcctgcccctccctcaggacccctaccccagcagtgacgtcccactcaggaaaaagcgtgtcccccagccttctcacccactgaagtccttcaactgggtgaagctgaatgaggagcgtgtccctggcaccgtatggaatgagattgatgacatgcaggtatttcggatcctggacctagaggattttgaaaagatgttttcagcctaccagaggcaccagaaagagctgggctccactgaagacatctacctggcttcccgcaaggtcaaagagctgtcggtcattgatggccggagggcccaaaactgcatcatccttctttccaagttgaagctttctaacgaggagatccggcaggccatcttgaagatggatgagcaggaggaccttgctaaggacatgctggagcagctcctcaagttcatcccagagaagagtgacattgacctcctggaggagcacaagcatgaaattgagcggatggcccgtgctgaccgcttcctctatgaaatgagcaggattgaccactaccagcagcgactgcaagccctcttcttcaagaagaaattccaggagcggctggctgaggcaaagcccaaagtggaagccatcctgttggcctcccgggagctggtccgcagcaagcgtcttagacagatgctagaggtcatcctagccataggcaacttcatgaacaaagggcagcgtgggggcgcctacgggttccgggtggccagcctcaacaagatcgctgacaccaagtccagcatcgacagaaacatctctctgctccattacctgatcatgatcctggagaagcattttcctgatattctaaacatgccttcagagctgcaacatcttccagaagctgccaaagtcaacctagcagaactggagaaggaggtgggcaacctcaggaggggcctgagagcggtggaggtgctggagtatcagaggcgccaggtacgggagcccagtgacaagtttgtccctgtcatgagcgacttcatcacggtgtccagcttcagcttctccgagctggaggaccagctaaatgaggccagggacaagttcgccaaggccttgatgcacttcggggagcatgacagcaagatgcagccagacgaattctttggcatctttgataccttcttgcaggccttctcagaggcccggcaggatctagaggccatgaggaggaggaaggaggaggaggagcggcgggcgcgcatggaagccatgctgaaggagcagagggaacgtgagcggtggcagcggcagcggaaggtcctggctgcaggcagctcgctggaggagggaggagagttcgatgacctggtgtcggccctgcgctctggggaggtcttcgacaaggacttatgcaagctcaagcgcagccgcaagcgatcagggagccaggccctggaagttacccgggagcgggcaataaaccggctaaattattgacctggggaactagccacacaggaggccgggagacagggactggtgagaatggggctgagtggaggaggtggtgatatttaaaccatttggtgcttggtttagagccttgggctgggtcctgggatggggggctgtgtgtggctggaccaggtgtctccccacgcttaccttaaggggctcctcttatctccccttcacatgattccttctgtgccctggccccaggtattattctgaggctgccttggatggcctcaggccaggtaaccccaggctgaaggggccctgctccccatcccctaccatgggcacccatgtgctggcacagaacagttccagatctagactggagaggtccacagccttgtccagagttcctgtgtagcacggggagcaatgatggagggagcccctgagagggaatctggtgagggaatccagactcccttctctcaaggggaggctcaacagaacattgacctgggggcaaactttcctcttgaatgggaacagaggaggcattatatattctagttagatcagctctggtaggttccagagaacagtcaatgttggaaggatgatgcagggaccaaagccatcaggacagagtagcagtgtctgtttcccatgtcacaagtcctctggcctctccctgcatgtcttaagtatctttcccttccttctctaccctcacctccatcctgtctactaatccacagtcctagaagactcaccttgggtttccacagctatggctcactaccaggtgcttgatgaatctggcgaggggctcaagacagacctcatgcatcaccacacctcatgccttttgggcatctcccatgtccccatctcctggacacctggccattgttgtgaagccagacagtgacctcaaatgttgccttggagtcccctacagcccctcagcagagggcagcacttgaatgcttagctccatcccatagttctctacttcatataaattgctcaggccctcccaccccttctctaacactagcttcaaggcagaagccacagcagcctctgtccagcctgcaggtggccacttggaaccatgtgtccactggcgttggggagttggttcctgagaggtctgagggccagagctgccctctacattaacatgctgtctctaagggtggcccctcctctcaggcgttcagatggtgcgaacagcagagcaggcaagggaaactggggagatggggatggaggaggaaggctgatatcctctggggagcacatcacctgaaggtgccaaggaggaaggctgagaggggggccaccccatttctggtacccaatttggttcttcagcccaacttgcaaggggttccttctggtcctcccatccactgccaccttccattttgtccatctcatgctggccttggtggatgggatggctgtatctagacaaaatttttctaaaactccatcaaggctcttattcaataccacgttccgagttggcctttcatcttctttgagactggccctgcctaacctctaccatcaatgagctcttggcccttctgcccttccctgtgtttctcactttccaacctaatccctggctcagggttattgccagtggagactggtgagctgggcctactctcagctgcctatcttctgcctttcacttgcatccaactcctggggctgggaccgtagtagctgcgggggggaagaaacacagggtcggtgagcccagcatgtgcgttggtttgagggggcgggcggtgtgtgtgtgttctggtgggagggatctgagcaagtgcaagcctggctgacacaggtgtgaagaggccatcctggaacccaggtgagggcaagatgaaggcttccaggcagaacagctgcagagagtttggctatatgcatctgcagccccaagagctcccactgcaagacaagtgttggggaagatgggaggttgtgggtgaggcctctaaaggtcctctcccaaactgaccaggctgatgtcaacctaaccccctcaggggcagggaacaggggagggctccacaagcgtgtctggcattcccacccaccatggaagactggatacgcacctggaaacaaaaggactatggaagctgttcaagatacatttgatcttcagaaaagcagaatttggttcaactgttgacagaggacacaaatacgttgttccagagctcagccttctcactctaaaagaaagatatttttctatttattttctacatctggccagtggctctggtgctagatgccactgtagccagatctccaacagtgccttggaccatggactcatactcaactgagtaagaaggggctggtgcccagtcggggtggctgagctggtccttaataggttgtttcttggtcttgctttcttcatgccctccccactgctcctgccacctttagataagtttctctagctaattttgtggccaatgtaaaattcgtcatcaacctaacaaacacaaccttctcagcagcatttctcccctgtgatggaaataaagtgtttagggcagtgggaggagaaaattctccaggtgaatggggaagggtctgttccagcctctccctactcccatcccatttccaccaactggggaactgtgactatctatctcccccgacttctaccagggatgccttcacgccaaggctgttctcaccagctgcctcagatgacaaatgaggctaatggacataatctacagtgtcctttttcacttgcaccttttttataagaatatattgtaatactaaaaaatattaaattcataccatccctacccagtctgcct

SEQ ID NO: 127378 - DNA, 794 bp, Homo sapiens
  Payload ID: 4923
  Gene Symbol: DAAM2
  Gene Name: dishevelled associated activator of morphogenesis 2
  ENST ID: ENST00000494405
  CDS Start-End: 149-442
gggatagcgcggagcacgcagcagcgagcggagcgcgggcggcggcgccgtacctcgggctgcgggagcgcgggcgccctggggtcctcggaatcacaatgaggacctagggcatctgtctgctgacgccccctggcctgcagtgaccatggccccccgcaagaggagccaccatggcctgggcttcctgtgctgcttcgggggcagtgacatccccgaaatcaacctccgggacaaccaccctctgcagttcatggagttctccagccccatcccgaacgcagaggagctcaacatccgctttgcagagctggtggatgaattggatctcactgacaaaaaccgagaggctatgtttgcactgccccctgagaagaaatggcagatctactgcagcaagaagaagccctgttctaggtgttggaggaacaacagtgaataaaatagaaaaaggaaattctgctgtcctggagcttacactcaaagaaataggattctctttttcaaaaacgcttaaagcaggacctgctgcatcccaggactggggcttgctgggagacagacaaagaagcagagtctggactctctcgtgcctgctcccaggcatggagggagcaggaggaccccaacaagctggcaaccagctggcctgactattacatcgaccgcatcaattccatggctgcgatgcagagtctgtacgcgtttgatgaggaggagacggagatgaggaaccaagtcgtggaagacctgaagacagccctccggacacagcctatgaggtttgtgacccg

SEQ ID NO: 127379 - DNA, 3871 bp, Homo sapiens
  Payload ID: 4923
  Gene Symbol: DAAM2
  Gene Name: dishevelled associated activator of morphogenesis 2
  ENST ID: ENST00000633794
  CDS Start-End: 225-3458
agacgcctgacgtcagagcggggcgggcggacgggcgcgaggccgggcctggaggggcggcagccgcggcttcccggggatagcgcggagcacgcagcagcgagcggagcgcgggcggcggcgccgtacctcgggctgcgggagcgcgggcgccctggggtcctcggaatcacaatgaggacctagggcatctgtctgctgacgccccctggcctgcagtgaccatggccccccgcaagaggagccaccatggcctgggcttcctgtgctgcttcgggggcagtgacatccccgaaatcaacctccgggacaaccaccctctgcagttcatggagttctccagccccatcccgaacgcagaggagctcaacatccgctttgcagagctggtggatgaattggatctcactgacaaaaaccgagaggctatgtttgcactgccccctgagaagaaatggcagatctactgcagcaagaagaaggagcaggaggaccccaacaagctggcaaccagctggcctgactattacatcgaccgcatcaattccatggctgcgatgcagagtctgtacgcgtttgatgaggaggagacggagatgaggaaccaagtcgtggaagacctgaagacagccctccggacacagcctatgaggtttgtgacccgcttcattgagctggagggcttgacctgtctgctaaatttcctccggagcatggaccacgccacctgtgagagccgcatccacacctcactcattggctgcatcaaagcattgatgaacaactcccaggggcgggcacatgtgctggcacagcctgaggccattagtaccatagcccagagcctacgcacagagaacagcaagaccaaggtggctgtgctggagatcctgggtgctgtgtgcctcgtgcctggtggccacaagaaggtgctgcaggccatgctgcactaccaggtgtatgcagcagagcgaacccgcttccagaccctgctgaacgagctagaccgaagtctgggccggtaccgggatgaagtgaatctgaaaacagccatcatgtccttcatcaatgctgtcctcaatgctggagctggagaggataatctggagttccgcctacatctacggtatgaattcctgatgctgggtatacagcctgtgattgacaagctccggcaacatgaaaatgccatcctggacaaacatttagacttcttcgagatggtgcggaatgaggatgacctggagctagccaggaggtttgacatggtccacatcgacaccaagagtgcttcccagatgtttgagttgatccacaagaagctgaagtacacggaggcctacccctgcctgctctctgtgctgcaccactgcctgcagatgccctacaaacggaacggtggctacttccagcagtggcagctcctggaccgcatcctccagcagattgtcctccaggatgagcggggtgtggaccctgacctggctcccttggagaacttcaatgtcaagaacatcgtcaacatgctcatcaacgagaatgaagtgaaacagtggcgagaccaggcagagaagttccggaaagaacacatggagcttgtgagccgtctggagaggaaggagcgggaatgcgagacaaagacattggagaaggaagagatgatgcggacgctgaacaaaatgaaggacaagctggcccgggagtcccaggagctgcgccaggctcggggacaagtggcagagctggtagcccagctcagtgaactctcaacaggccctgtatcttccccaccaccccctgggggcccactcaccttgtcttcctcaatgacaaccaatgacctgcctccaccccctcctcctctgccctttgcctgttgtccccctcccccaccaccaccccttcctcccgggggacccccgactcccccaggtgccccaccttgcctcggcatgggcctgcccctccctcaggacccctaccccagcagtgacgtcccactcaggaaaaagcgtgtcccccagccttctcacccactgaagtccttcaactgggtgaagctgaatgaggagcgtgtccctggcaccgtatggaatgagattgatgacatgcaggtatttcggatcctggacctagaggattttgaaaagatgttttcagcctaccagaggcaccaggagctgataactaatccttctcagcagaaagagctgggctccactgaagacatctacctggcttcccgcaaggtcaaagagctgtcggtcattgatggccggagggcccaaaactgcatcatccttctttccaagttgaagctttctaacgaggagatccggcaggccatcttgaagatggatgagcaggaggaccttgctaaggacatgctggagcagctcctcaagttcatcccagagaagagtgacattgacctcctggaggagcacaagcatgaaattgagcggatggcccgtgctgaccgcttcctctatgaaatgagcaggattgaccactaccagcagcgactgcaagccctcttcttcaagaagaaattccaggagcggctggctgaggcaaagcccaaagtggaagccatcctgttggcctcccgggagctggtccgcagcaagcgtcttagacagatgctagaggtcatcctagccataggcaacttcatgaacaaagggcagcgtgggggcgcctacgggttccgggtggccagcctcaacaagatcgctgacaccaagtccagcatcgacagaaacatctctctgctccattacctgatcatgatcctggagaagcattttcctgatattctaaacatgccttcagagctgcaacatcttccagaagctgccaaagtcaacctagcagaactggagaaggaggtgggcaacctcaggaggggcctgagagcggtggaggtggagctggagtatcagaggcgccaggtacgggagcccagtgacaagtttgtccctgtcatgagcgacttcatcacggtgtccagcttcagcttctccgagctggaggaccagctaaatgaggccagggacaagttcgccaaggccttgatgcacttcggggagcatgacagcaagatgcagccagacgaattctttggcatctttgataccttcttgcaggccttctcagaggcccggcaggatctagaggccatgaggaggaggaaggaggaggaggagcggcgggcgcgcatggaagccatgctgaaggagcagagggaacgtgagcggtggcagcggcagcggaaggtcctggctgcaggcagctcgctggaggagggaggagagttcgatgacctggtgtcggccctgcgctctggggaggtcttcgacaaggacttatgcaagctcaagcgcagccgcaagcgatcagggagccaggccctggaagttacccgggagcgggcaataaaccggctaaattattgacctggggaactagccacacaggaggccgggagacagggactggtgagaatggggctgagtggaggaggtggtgatatttaaaccatttggtgcttggtttagagccttgggctgggtcctgggatggggggctgtgtgtggctggaccaggtgtctccccacgcttaccttaaggggctcctcttatctccccttcacatgattccttctgtgccctggccccaggtattattctgaggctgccttggatggcctcaggccaggtaaccccaggctgaaggggccctgctccccatcccctaccatgggcacccatgtgctggcacagaacagttccagatctagactggagaggtccacagccttgtccagagttcctgtgtagcacggggagcaatgatggagggagcccc

SEQ ID NO: 127380 - DNA, 3239 bp, Homo sapiens
  Payload ID: 4924
  Gene Symbol: DVL1
  Gene Name: dishevelled segment polarity protein 1
  Uniprot ID: O14640
  ENST ID: ENST00000378888
  CDS Start-End: 286-2373
gggcggcggggctgagcgcgccctccgtgctgcgtccctcgcgccgctcccgggccgggggcggatgggcggccgcgggccgcggggcagcagtcgggacgcgcgcgggagccgggggcggcggccggggcctgggcggtcgggcgggggcgcccgggggcctcggagcgtcggggccgagagcggtgcgggccgggcggggcgcaggcgggcgggcgggtagcgccccgcgtccgagccccgggccgggccctgagcgcgcgggctccgcgccgccgccgcgccatggcggagaccaagattatctaccacatggacgaggaggagacgccgtacctggtcaagctgcccgtggcccccgagcgcgtcacgctggccgacttcaagaacgtgctcagcaaccggcccgtgcacgcctacaaattcttctttaagtccatggaccaggacttcggggtggtgaaggaggagatctttgatgacaatgccaagcttccctgcttcaacggccgcgtggtctcctggctggtcctggctgagggtgctcactcggatgcggggtcccagggcacggacagccacacagacctgcccccgcctcttgagcggacaggcggcatcggggactcccggcccccctccttccacccaaatgtggccagcagccgtgacgggatggacaacgagacaggcacggagtccatggtcagtcaccggcgggagcgtgcccgacgccggaaccgcgaggaggccgcccggaccaatgggcacccaaggggagaccgacggcgggatgtggggctgcccccagacagcgcgtccaccgccctcagcagcgagcttgagtccagcagctttgtggactcggacgaggatggcagcacgagcaggctcagcagctccacggagcagagcacctcatccagactcatccggaagcacaaacgccggcggaggaagcagcgccttcggcaggcggaccgggcctcctccttcagcagcataaccgactccaccatgtccctcaacatcgtcactgtcacgctcaacatggaaagacatcactttctgggcatcagcatcgtggggcagagcaacgaccgtggagacggcggcatctacattggctccatcatgaagggcggggctgtggccgctgacggccgcatcgagcccggcgacatgttgctgcaggtgaatgacgtgaactttgagaacatgagcaatgacgatgccgtgcgggtgctgcgggagatcgtttcccagacggggcccatcagcctcactgtggccaagtgctgggacccaacgccccgaagctacttcaccgtcccacgggctgacccggtgcggcccatcgaccccgccgcctggctgtcccacacggcggcactgacaggagccctgccccgctacggtacgagtccctgctccagcgccgtcacgcgcaccagctcctcctcactaaccagctccgtgcctggtgctccacagctggaagaggcgccgctgacggtgaagagtgacatgagcgccgtcgtccgggtcatgcagctgccagactcgggactggagatccgcgaccgcatgtggctcaagatcaccatcgccaatgccgtcatcggggcggacgtggtggactggctgtacacacacgtggagggcttcaaggagcggcgggaggcccggaagtacgccagcagcttgctgaagcacggcttcctgcggcacacggtcaacaagatcaccttctccgagcagtgctactacgtcttcggggatctctgcagcaatctcgccaccctgaacctcaacagtggctccagtgggacttcggatcaggacacgctggccccgctgccccacccggctgccccctggcctctgggtcagggctacccctaccagtacccgggacccccaccctgcttcccgcctgcctaccaggacccgggctttagctatggcagcggcagcaccgggagtcagcagagtgaagggagcaaaagcagtgggtccacccggagcagccgccgggccccgggccgtgagaaggagcgtcgggcggcgggagctgggggcagtggcagtgaatcggatcacacggcaccgagtggggtggggagcagctggcgagagcgtccggccggccagctcagccgtggcagcagcccacgcagtcaggcctcggctaccgccccggggctccccccgccccaccccacgaccaaggcctatacagtggtgggggggccacccgggggaccccctgtccgggagctggctgccgtccccccggaattgacaggcagccgccagtccttccagaaggctatggggaacccctgcgagttcttcgtggacatcatgtgactcgtggcgcatgccccagccctgcctgaggtggggagctggcggtcctgccgcatgcagagctcgcgtgggcttgccttcgtgggggccaggacgggaggcagggtggggggcaggctggaccaccaccatctgccctggcagcctggctgctccagctcctgacagcacctgtgtctgagcagccgtgttgggggcgctccctctctgcccctcagcgagagcctcggacctcccaaccccttgtgtctggtggggatccctcctgggatgaggaagaccccctcgggctctcggctgacccccacctcctgcacagctgtgcccaggcccccagggtggtccatgcggggcaaccccctgcggtgcacaggccccctgtctggagtagggatctaatttatttatttattgcctggccggtgactcgggggaggaggcgaccctgtcatctgtcccacctgctgctgccccttggagcagcctgcaccttctctcctcccatccggcaacagtctgaaagtacgtggaggacgggaccggaagacgagagagggctggacatcctgcccaccgtgtcccagccagggcagggagggaccatggcccgcagggtcaaggggccccgatgtgcacagctgccacagggagggaggtcttggggagatgggcagtcaggtggcccgtccttggtgagtgcacacactgcgcgcacacatcgcggccttcctggcttctctggcccccacgtgtctgtgctgtagatactgtatcaaagtcccagcgtttagatggttaacatagagctgcttctgtgtaaatgctgcttattttaaacactaaaaagcgtttaattttatgggaca

SEQ ID NO: 127381 - DNA, 2926 bp, Homo sapiens
  Payload ID: 4924
  Gene Symbol: DVL1
  Gene Name: dishevelled segment polarity protein 1
  Uniprot ID: O14640
  ENST ID: ENST00000378891
  CDS Start-End: 48-2060
ccccgggccgggccctgagcgcgcgggctccgcgccgccgccgcgccatggcggagaccaagattatctaccacatggacgaggaggagacgccgtacctggtcaagctgcccgtggcccccgagcgcgtcacgctggccgacttcaagaacgtgctcagcaaccggcccgtgcacgcctacaaattcttctttaagtccatggaccaggacttcggggtggtgaaggaggagatctttgatgacaatgccaagcttccctgcttcaacggccgcgtggtctcctggctggtcctggctgagggtgctcactcggatgcggggtcccagggcacggacagccacacagacctgcccccgcctcttgagcggacaggcggcatcggggactcccggcccccctccttccacccaaatgtggccagcagccgtgacgggatggacaacgagacaggcacggagtccatggtcagtcaccggcgggagcgtgcccgacgccggaaccgcgaggaggccgcccggaccaatgggcacccaaggggagaccgacggcgggatgtggggctgcccccagacagcgcgtccaccgccctcagcagcgagcttgagtccagcagctttgtggactcggacgaggatggcagcacgagcaggctcagcagctccacggagcagagcacctcatccagactcatccggaagcacaaacgccggcggaggaagcagcgccttcggcaggcggaccgggcctcctccttcagcagcataaccgactccaccatgtccctcaacatcgtcactgtcacgctcaacatggaaagacatcactttctgggcatcagcatcgtggggcagagcaacgaccgtggagacggcggcatctacattggctccatcatgaagggcggggctgtggccgctgacggccgcatcgagcccggcgacatgttgctgcaggtgaatgacgtgaactttgagaacatgagcaatgacgatgccgtgcgggtgctgcgggagatcgtttcccagacggggcccatcagcctcactgtggccaagtgctgggacccaacgccccgaagctacttcaccgtcccacgggctgacccggtgcggcccatcgaccccgccgcctggctgtcccacacggcggcactgacaggagccctgccccgctacgagctggaagaggcgccgctgacggtgaagagtgacatgagcgccgtcgtccgggtcatgcagctgccagactcgggactggagatccgcgaccgcatgtggctcaagatcaccatcgccaatgccgtcatcggggcggacgtggtggactggctgtacacacacgtggagggcttcaaggagcggcgggaggcccggaagtacgccagcagcttgctgaagcacggcttcctgcggcacacggtcaacaagatcaccttctccgagcagtgctactacgtcttcggggatctctgcagcaatctcgccaccctgaacctcaacagtggctccagtgggacttcggatcaggacacgctggccccgctgccccacccggctgccccctggcctctgggtcagggctacccctaccagtacccgggacccccaccctgcttcccgcctgcctaccaggacccgggctttagctatggcagcggcagcaccgggagtcagcagagtgaagggagcaaaagcagtgggtccacccggagcagccgccgggccccgggccgtgagaaggagcgtcgggcggcgggagctgggggcagtggcagtgaatcggatcacacggcaccgagtggggtggggagcagctggcgagagcgtccggccggccagctcagccgtggcagcagcccacgcagtcaggcctcggctaccgccccggggctccccccgccccaccccacgaccaaggcctatacagtggtgggggggccacccgggggaccccctgtccgggagctggctgccgtccccccggaattgacaggcagccgccagtccttccagaaggctatggggaacccctgcgagttcttcgtggacatcatgtgactcgtggcgcatgccccagccctgcctgaggtggggagctggcggtcctgccgcatgcagagctcgcgtgggcttgccttcgtgggggccaggacgggaggcagggtggggggcaggctggaccaccaccatctgccctggcagcctggctgctccagctcctgacagcacctgtgtctgagcagccgtgttgggggcgctccctctctgcccctcagcgagagcctcggacctcccaaccccttgtgtctggtggggatccctcctgggatgaggaagaccccctcgggctctcggctgacccccacctcctgcacagctgtgcccaggcccccagggtggtccatgcggggcaaccccctgcggtgcacaggccccctgtctggagtagggatctaatttatttatttattgcctggccggtgactcgggggaggaggcgaccctgtcatctgtcccacctgctgctgccccttggagcagcctgcaccttctctcctcccatccggcaacagtctgaaagtacgtggaggacgggaccggaagacgagagagggctggacatcctgcccaccgtgtcccagccagggcagggagggaccatggcccgcagggtcaaggggccccgatgtgcacagctgccacagggagggaggtcttggggagatgggcagtcaggtggcccgtccttggtgagtgcacacactgcgcgcacacatcgcggccttcctggcttctctggcccccacgtgtctgtgctgtagatactgtatcaaagtcccagcgtttagatggttaacatagagctgcttctgtgtaaatgctgcttattttaaacactaaaaagcgtttaattttatgggaca

SEQ ID NO: 127382 - DNA, 2268 bp, Homo sapiens
  Payload ID: 4924
  Gene Symbol: DVL1
  Gene Name: dishevelled segment polarity protein 1
  ENST ID: ENST00000610709
  CDS Start-End: 71-1405
gcgggtagcgccccgcgtccgagccccgggccgggccctgagcgcgcgggctccgcgccgccgccgcgccatggcggagaccaagattatctaccacatggacgaggaggagacgccgtacctggtcaagctgcccgtggcccccgagcgcgtcacgctggccgacttcaagaacgtgctcagcaaccggcccgtgcacgcctacaaattcttctttaagtccatggaccaggacttcggggtggtgaaggaggagatctttgatgacaatgccaagcttccctgcttcaacggccgcgtggtctcctggctggtcctggctgagggtgctcactcggatgcggggtcccagggcacggacagccacacagacctgcccccgcctcttgagcggacaggcggcatcggggactcccggcccccctccttccacccaaatgtggccagcagccgtgacgggatggacaacgagacaggcacggagtccatggtcagtcaccggcgggagcgtgcccgacgccggaaccgcgaggaggccgcccggaccaatgggcacccaaggggagaccgacggcgggatgtggggctgcccccagacagcgcgtccaccgccctcagcagcgagcttgagtccagcagctttgtggactcggacgaggatggcagcacgagcaggctcagcagctccacggagcagagcacctcatccagactcatccggaagtacgccagcagcttgctgaagcacggcttcctgcggcacacggtcaacaagatcaccttctccgagcagtgctactacgtcttcggggatctctgcagcaatctcgccaccctgaacctcaacagtggctccagtgggacttcggatcaggacacgctggccccgctgccccacccggctgccccctggcctctgggtcagggctacccctaccagtacccgggacccccaccctgcttcccgcctgcctaccaggacccgggctttagctatggcagcggcagcaccgggagtcagcagagtgaagggagcaaaagcagtgggtccacccggagcagccgccgggccccgggccgtgagaaggagcgtcgggcggcgggagctgggggcagtggcagtgaatcggatcacacggcaccgagtggggtggggagcagctggcgagagcgtccggccggccagctcagccgtggcagcagcccacgcagtcaggcctcggctaccgccccggggctccccccgccccaccccacgaccaaggcctatacagtggtgggggggccacccgggggaccccctgtccgggagctggctgccgtccccccggaattgacaggcagccgccagtccttccagaaggctatggggaacccctgcgagttcttcgtggacatcatgtgactcgtggcgcatgccccagccctgcctgaggtggggagctggcggtcctgccgcatgcagagctcgcgtgggcttgccttcgtgggggccaggacgggaggcagggtggggggcaggctggaccaccaccatctgccctggcagcctggctgctccagctcctgacagcacctgtgtctgagcagccgtgttgggggcgctccctctctgcccctcagcgagagcctcggacctcccaaccccttgtgtctggtggggatccctcctgggatgaggaagaccccctcgggctctcggctgacccccacctcctgcacagctgtgcccaggcccccagggtggtccatgcggggcaaccccctgcggtgcacaggccccctgtctggagtagggatctaatttatttatttattgcctggccggtgactcgggggaggaggcgaccctgtcatctgtcccacctgctgctgccccttggagcagcctgcaccttctctcctcccatccggcaacagtctgaaagtacgtggaggacgggaccggaagacgagagagggctggacatcctgcccaccgtgtcccagccagggcagggagggaccatggcccgcagggtcaaggggccccgatgtgcacagctgccacagggagggaggtcttggggagatgggcagtcaggtggcccgtccttggtgagtgcacacactgcgcgcacacatcgcggccttcctggcttctctggcccccacgtgtctgtgctgtagatactgtatcaaagtcccagcgtttagatggttaacatagagctgcttctgtgtaaatgctgcttattttaaacactaaaaagcgtttaattttatggg

SEQ ID NO: 127383 - DNA, 778 bp, Homo sapiens
  Payload ID: 4924
  Gene Symbol: DVL1
  Gene Name: dishevelled segment polarity protein 1
  ENST ID: ENST00000631679
  CDS Start-End: 1-756
gacatgttgctgcaggtgaatgacgtgaactttgagaacatgagcaatgacgatgccgtgcgggtgctgcgggagatcgtttcccagacggggcccatcagcctcactgtggccaagtgctgggacccaacgccccgaagctacttcaccgtcccacgggctgacccggtgcggcccatcgaccccgccgcctggctgtcccacacggcggcactgacaggagccctgccccgctacgagctggaagaggcgccgctgacggtgaagagtgacatgagcgccgtcgtccgggtcatgcagctgccagactcgggactggagatccgcgaccgcatgtggctcaagatcaccatcgccaatgccgtcatcggggcggacgtggtggactggctgtacacacacgtggagggcttcaaggagcggcgggaggcccggaagtacgccagcagcttgctgaagcacggcttcctgcggcacacggtcaacaagatcaccttctccgagcagtgctactacgtcttcggggatctctgcagcaatctcgccaccctgaacctcaacagtggctccagtgggacttcggatcaggacacgctggccccgctgccccacccggctgccccctggcctctgggtcagggctacccctaccagtacccgggacccccaccctgcttcccgcctgcctaccaggacccgggctttagctatggcagcggcagcaccgggagtcagcagagtgaagccttagactgaaggactagcggagcggaccttg

SEQ ID NO: 127384 - DNA, 785 bp, Homo sapiens
  Payload ID: 4924
  Gene Symbol: DVL1
  Gene Name: dishevelled segment polarity protein 1
  ENST ID: ENST00000632445
  CDS Start-End: 1-654
atcgaccccgccgcctggctgtcccacacggcggcactgacaggagccctgccccgctacggtacgagtccctgctccagcgccgtcacgcgcaccagctcctcctcactaaccagctccgtgcctggtgctccacagctggaagaggcgccgctgacggtgaagagtgacatgagcgccgtcgtccgggtcatgcagctgccagactcgggactggagatccgcgaccgcatgtggctcaagatcaccatcgccaatgccgtcatcggggcggacgtggtggactggctgtacacacacgtggagggcttcaaggagcggcgggaggcccggaagtacgccagcagcttgctgaagcacggcttcctgcggcacacggtcaacaagatcaccttctccgagcagtgctactacgtcttcggggatctctgcagcaatctcgccaccctgaacctcaacagtggctccagtgggacttcggatcaggacacgctggccccgctgccccacccggctgccccctggcctctgggtcagggctacccctaccagtacccgggacccccaccctgcttcccgcctgcctaccaggacccgggctttagctatggcagcggcagcaccgggagtcagcagagtgaagccttagactgaaggactagcggagcggaccttgggccgggagcaaaagcagtgggtccacccggagcagccgccgggccccgggccgtgagaaggagcgtcgggcggcgggagctgggggcagtggcagtgaatcggatcac

SEQ ID NO: 127385 - DNA, 3018 bp, Homo sapiens
  Payload ID: 4925
  Gene Symbol: DVL2
  Gene Name: dishevelled segment polarity protein 2
  Uniprot ID: O14641
  ENST ID: ENST00000005340
  CDS Start-End: 284-2494
aagtcacgtgacatgaggagaggtgggcgggtacctggaggaagctcgcggcgtcggtggcggtggcgcgcggcggccgctgagaccggggctttgagtcgcaccccgcggcccgccccccgccgccaccctcgcagatccgtgctttttcccctttgcttctctcccgtactgggtcagtcctgtccgcgctcgcgcgtcggtttgcgggtgtgcgcaggcgcggcaggggccattagccctttgggtgggcggtggagcccgggagcgcgcgggcgagaccatggcgggtagcagcactgggggcggtggggttggggagacgaaggtgatttaccacctggatgaggaagagactccctacctggtgaagatccctgtccccgccgagcgcatcaccctcggcgatttcaagagcgtcctgcagcggcccgcgggcgccaagtactttttcaagtctatggatcaggatttcggggtggtgaaggaagaaatttcagatgacaacgcccgcctcccctgcttcaacggaagggtggtatcctggctggtgtcctcagataatccccaacccgagatggcccctccagtccatgagcctcgggcagaactggcgcctccagccccacctttacctcctttgccacccgagaggaccagcggcattggggactcaaggcctccatccttccaccctaatgtgtccagcagccatgagaatctggagcctgagacagaaaccgagtcagtagtgtcactgaggcgggagcggcctcgcaggagagacagcagtgagcatggcgctgggggccacaggactggtggcccctcaaggctggagcgccacctggccggatacgagagctcctctaccctcatgaccagcgagctggagagtaccagcctgggggactcggacgaggaggacaccatgagcaggttcagcagctccacggagcagagcagtgcctcccgcctccttaagcgccaccggcggcgaaggaagcagaggccaccccgcctggagaggacgtcatccttcagcagcgtcacagattccacaatgtctctcaatatcatcacagtcacgctaaacatggagaagtacaacttcctgggtatctccattgttggccagagcaatgagcggggagacggaggcatctacattggctccatcatgaagggtggggctgtggcggccgacgggcgcattgagccaggggacatgcttttgcaggtgaatgacatgaactttgagaacatgagcaacgatgacgctgtgcgggtgctgagggacattgtgcacaagcctggccccattgtgctgactgtggccaagtgctgggatccctctcctcaggcctatttcactctcccccgaaatgagcccatccagccaattgaccctgctgcctgggtgtcccattccgcggctctgactggcaccttcccagcctatccaggttcctcctccatgagcaccattacatctggatcgtctttgcctgatggctgtgaaggccggggtctctccgtccatacggacatggcatcggtgaccaaggccatggcagctccagagtctggactggaagtccgggaccgcatgtggctcaagatcaccatccctaatgcctttctgggctcggatgtggttgactggctctaccatcacgtggagggctttcctgagcggcgggaggcccgcaagtatgccagcgggctgctcaaagcaggcctgatccgacacaccgtcaacaagatcaccttctctgagcagtgctattacgtcttcggagacctcagtggtggctgtgagagctacctagtcaacctgtctctcaatgacaacgatggctccagtggggcttcagaccaggataccctggctcctctgcctggggccaccccctggcccctgctgcccactttctcctaccaataccctgccccacacccctacagcccgcagcctccaccctaccatgagctttcatcttacacctatggtgggggcagtgccagcagccagcatagtgagggcagccggagcagtgggtcgacacggagtgatgggggggcagggcgcacggggaggcccgaggagcgggcccccgagtccaagtccggcagtggcagtgagtctgagccctccagccgagggggcagccttcggcggggtggggaagcaagtgggactagcgatgggggccctcctccatccagaggctcaactgggggtgcccctaatctccgagcccacccagggctccatccctatggaccgccccctggcatggccctcccctacaaccccatgatggtggtcatgatgcccccacctccacctccagtccctccagcagtgcagcctccgggggcccctccagtcagagacctgggctctgtgcccccagaactgacagccagccgccaaagcttccacatggccatgggcaatcccagcgagttctttgtggatgttatgtagcccactgtggggccaggctgggccgggcgctcctggtgtgtgactgggtgtcctggccgtcatgtgcttgctcttacagtgcctgggctcagcctaccagctgctgccatacaggagattgtggccactgtgactctcaccagcagtgcctggttcctcccccttccctcaggggtagacaagggacctttgattatttttagctttgtttttttataagcctttttgggggttaaaatagagtttcttacatttttgggacttttttaataggcatttcctcttttatatgaagaattcccatccattgggccccttctaaccccagaatgtgacctcctcctccagttacccacagccctgccctttgcagggttgggggtggtcagcggtaccccggggttaggcatcctagacagcagcctgaggaagctgggagatttgggccatgtagctgcctttgttactctatttattttagtcacttgtataaaacaccaaataaagcaatagaggcaaactcc

SEQ ID NO: 127386 - DNA, 992 bp, Homo sapiens
  Payload ID: 4925
  Gene Symbol: DVL2
  Gene Name: dishevelled segment polarity protein 2
  ENST ID: ENST00000574143
  CDS Start-End: 119-992
caaggcctagataggaccggcgggggctttgctagagtggattgggcgacatggaggggcacacgtctactttgggccacactgggattttctggcctatggtggagcagattgtactatgctgagggtggtgaaggaagaaatttcagatgacaacgcccgcctcccctgcttcaacggaagggtggtatcctggctggtgtcctcagataatccccaacccgagatggcccctccagtccatgagcctcgggcagaactggcgcctccagccccacctttacctcctttgccacccgagaggaccagcggcattggggactcaaggcctccatccttccaccctaatgtgtccagcagccatgagaatctggagcctgagacagaaaccgagtcagtagtgtcactgaggcgggagcggcctcgcaggagagacagcactgggggccacaggactggtggcccctcaaggctggagcgccacctggccggatacgagagctcctctaccctcatgaccagcgagctggagagtaccagcctgggggactcggacgaggaggacaccatgagcaggttcagcagctccacggagcagagcagtgcctcccgcctccttaagcgccaccggcggcgaaggaagcagaggccaccccgcctggagaggacgtcatccttcagcagcgtcacagattccacaatgtctctcaatatcatcacagtcacgctaaacatggagaagtacaacttcctgggtatctccattgttggccagagcaatgagcggggagacggaggcatctacattggctccatcatgaagggtggggctgtggcggccgacgggcgcattgagccaggggacatgcttttgcaggtgaatgacatgaactttgagaacatgagcaacgatgacgctgtgcgggtgctgagggacattgtgcacaagcctggccccattgtgctgactgtggccaagtgctgggatccct

SEQ ID NO: 127387 - DNA, 900 bp, Homo sapiens
  Payload ID: 4925
  Gene Symbol: DVL2
  Gene Name: dishevelled segment polarity protein 2
  ENST ID: ENST00000575086
  CDS Start-End: 1-900
tgaactttgagaacatgagcaacgatgacgctgtgcgggtgctgagggacattgtgcacaagcctggccccattgtgctgactgtggccaagtgctgggatccctctcctcaggcctatttcactctcccccgaacctatccaggttcctcctccatgagcaccattacatctggatcgtctttgcctgatggctgtgaaggccggggtctctccgtccatacggacatggcatcggtgaccaaggccatggcagctccagagtctggactggaagtccgggaccgcatgtggctcaagatcaccatccctaatgcctttctgggctcggatgtggttgactggctctaccatcacgtggagggctttcctgagcggcgggaggcccgcaagtatgccagcgggctgctcaaagcaggcctgatccgacacaccgtcaacaagatcaccttctctgagcagtgctattacgtcttcggagacctcagtggtggctgtgagagctacctagtcaacctgtctctcaatgacaacgatggctccagtggggcttcagaccaggataccctggctcctctgcctggggccaccccctggcccctgctgcccactttctcctaccaataccctgccccacacccctacagcccgcagcctccaccctaccatgagctttcatcttacacctatggtgggggcagtgccagcagccagcatagtgagggcagccggagcagtgggtcgacacggagtgatgggggggcagggcgcacggggaggcccgaggagcgggcccccgagtccaagtccggcagtggcagtgagtctgagccctccagccgagggggcagccttcggcggggtggggaagcaagtgggactagcgatgggggccctcctc

SEQ ID NO: 127388 - DNA, 2659 bp, Homo sapiens
  Payload ID: 4925
  Gene Symbol: DVL2
  Gene Name: dishevelled segment polarity protein 2
  ENST ID: ENST00000575458
  CDS Start-End: 57-2249
aggggccattagccctttgggtgggcggtggagcccgggagcgcgcgggcgagaccatggcgggtagcagcactgggggcggtggggttggggagacgaaggtgatttaccacctggatgaggaagagactccctacctggtgaagatccctgtccccgccgagcgcatcaccctcggcgatttcaagagcgtcctgcagcggcccgcgggcgccaagtactttttcaagtctatggatcaggatttcggggtggtgaaggaagaaatttcagatgacaacgcccgcctcccctgcttcaacggaagggtggtatcctggctggtgtcctcagataatccccaacccgagatggcccctccagtccatgagcctcgggcagaactggcgcctccagccccacctttacctcctttgccacccgagaggaccagcggcattggggactcaaggcctccatccttccaccatgagaatctggagcctgagacagaaaccgagtcagtagtgtcactgaggcgggagcggcctcgcaggagagacagcagtgagcatggcgctgggggccacaggactggtggcccctcaaggctggagcgccacctggccggatacgagagctcctctaccctcatgaccagcgagctggagagtaccagcctgggggactcggacgaggaggacaccatgagcaggttcagcagctccacggagcagagcagtgcctcccgcctccttaagcgccaccggcggcgaaggaagcagaggccaccccgcctggagaggacgtcatccttcagcagcgtcacagattccacaatgtctctcaatatcatcacagtcacgctaaacatggagaagtacaacttcctgggtatctccattgttggccagagcaatgagcggggagacggaggcatctacattggctccatcatgaagggtggggctgtggcggccgacgggcgcattgagccaggggacatgcttttgcaggtgaatgacatgaactttgagaacatgagcaacgatgacgctgtgcgggtgctgagggacattgtgcacaagcctggccccattgtgctgactgtggccaagtgctgggatccctctcctcaggcctatttcactctcccccgaaatgagcccatccagccaattgaccctgctgcctgggtgtcccattccgcggctctgactggcaccttcccagcctatccaggttcctcctccatgagcaccattacatctggatcgtctttgcctgatggctgtgaaggccggggtctctccgtccatacggacatggcatcggtgaccaaggccatggcagctccagagtctggactggaagtccgggaccgcatgtggctcaagatcaccatccctaatgcctttctgggctcggatgtggttgactggctctaccatcacgtggagggctttcctgagcggcgggaggcccgcaagtatgccagcgggctgctcaaagcaggcctgatccgacacaccgtcaacaagatcaccttctctgagcagtgctattacgtcttcggagacctcagtggtggctgtgagagctacctagtcaacctgtctctcaatgacaacgatggctccagtggggcttcagaccaggataccctggctcctctgcctggggccaccccctggcccctgctgcccactttctcctaccaataccctgccccacacccctacagcccgcagcctccaccctaccatgagctttcatcttacacctatggtgggggcagtgccagcagccagcatagtgagggcagccggagcagtgggtcgacacggagtgatgggggggcagggcgcacggggaggcccgaggagcgggcccccgagtccaagtccggcagtggcagtgagtctgagccctccagccgagggggcagccttcggcggggtggggaagcaagtgggactagcgatgggggccctcctccatccagaggctcaactgggggtgcccctaatctccgagcccacccagggctccatccctatggaccgccccctggcatggccctcccctacaaccccatgatggtggtcatgatgcccccacctccacctccagtccctccagcagtgcagcctccgggggcccctccagtcagagacctgggctctgtgcccccagaactgacagccagccgccaaagcttccacatggccatgggcaatcccagcgagttctttgtggatgttatgtagcccactgtggggccaggctgggccgggcgctcctggtgtgtgactgggtgtcctggccgtcatgtgcttgctcttacagtgcctgggctcagcctaccagctgctgccatacaggagattgtggccactgtgactctcaccagcagtgcctggttcctcccccttccctcaggggtagacaagggacctttgattatttttagctttgtttttttataagcctttttgggggttaaaatagagtttcttacatttttgggacttttttaataggcatttcctcttttatatgaagaattcccatccattgggccccttctaaccccagaatgtgacctcctcctccagttacccacagccctgccctttgcagggttgggggtggtcagcggtaccccggggttaggcat

SEQ ID NO: 127389 - DNA, 1136 bp, Homo sapiens
  Payload ID: 4925
  Gene Symbol: DVL2
  Gene Name: dishevelled segment polarity protein 2
  ENST ID: ENST00000575756
  CDS Start-End: 47-1136
agccctttgggtgggcggtggagcccgggagcgcgcgggcgagaccatggcgggtagcagcactgggggcggtggggttggggagacgaaggtgatttaccacctggatgaggaagagactccctacctggtgaagatccctgtccccgccgagcgcatcaccctcggcgatttcaagagcgtcctgcagcggcccgcgggcgccaagtactttttcaagtctatggatcaggatttcggggtggtgaaggaagaaatttcagatgacaacgcccgcctcccctgcttcaacggaagggtggtatcctggctggtgtcctcagataatccccaacccgagatggcccctccagtccatgagcctcgggcagaactggcgcctccagccccacctttacctcctttgccacccgagaggaccagcggcattggggactcaaggcctccatccttccaccctaatgtgtccagcagccatgagaatctggagcctgagacagaaaccgagtcagtagtgtcactgaggcgggagcggcctcgcaggagagacagcactgggggccacaggactggtggcccctcaaggctggagcgccacctggccggatacgagagctcctctaccctcatgaccagcgagctggagagtaccagcctgggggactcggacgaggaggacaccatgagcaggttcagcagctccacggagcagagcagtgcctcccgcctccttaagcgccaccggcggcgaaggaagcagaggccaccccgcctggagaggacgtcatccttcagcagcgtcacagattccacaatgtctctcaatatcatcacagtcacgctaaacatggagaagtacaacttcctgggtatctccattgttggccagagcaatgagcggggagacggaggcatctacattggctccatcatgaagggtggggctgtggcggccgacgggcgcattgagccaggggacatgcttttgcaggtgaatgacatgaactttgagaacatgagcaacgatgacgctgtgcgggtgctgagggacattgtgcacaagcctggccccattgtgctgactgtggccaagtgctgggatccctctcctcaggcctatttcactctcccccgaa

SEQ ID NO: 127390 - DNA, 5254 bp, Homo sapiens
  Payload ID: 4926
  Gene Symbol: DVL3
  Gene Name: dishevelled segment polarity protein 3
  Uniprot ID: Q92997
  ENST ID: ENST00000313143
  CDS Start-End: 249-2399
gccgcggccaccggaagagtcgcggtcgccagtccagtcgggagagtggggagcggaagcggcggccgcggcggcggcgggcggcgctgggacccggtagcggccggagaacaagggagctggcgccgccagcagccgccgagctgggttgagccgctgggccgcgccgcgcgccgccgccgtctgggaggctcggcccggccgcccgagcaggccgcgcgcgggccgccgggcccgaggccagagccatgggcgagaccaagatcatctaccacttggatgggcaggagacgccgtaccttgtgaagctgcccctgcccgccgagcgcgtcaccttggcggactttaagggcgttttgcagcgacccagctataagttcttcttcaagtctatggacgacgatttcggagtggtgaaggaggagatctcggatgacaatgccaagctaccatgcttcaatggccgggtggtgtcctggctggtgtcagctgagggctcacacccagacccagcccccttctgtgctgataacccatcggagctgccaccacctatggagcgcacgggaggcatcggggactcccgacccccatccttccaccctcatgctggtgggggcagccaggagaacctggacaatgacacagagacggactctttggtgtctgcccagcgagagcggccacgccggagggatggcccagagcatgcaacccggctaaatggaactgcgaagggggaacggcggcgagaaccagggggttatgatagctcatccacccttatgagcagtgagctggagaccaccagcttctttgactcagatgaggatgactccaccagcaggttcagcagctccacagaacagagcagtgcctcacgcctgatgagaagacacaagcggcggcggcggaagcagaaggtttctcggattgagcggtcctcgtccttcagcagcatcacggactccaccatgtcactcaacatcatcacggtcactctcaacatggaaaaatataacttcttgggcatctccattgtgggccaaagcaacgagcgtggtgacggcggcatctacattggctctatcatgaagggtggggccgtggctgctgatggacgcatcgagccaggagatatgttgttacaggtaaacgagatcaactttgagaacatgagtaatgacgatgcagtccgggtactgcgggagattgtgcacaaaccggggcccatcaccctgactgtagccaagtgctgggacccaagtccacgtggttgcttcacattgcccaggagcgagcccatccggcccattgaccctgcggcctgggtctcccacactgcagccatgaccggcaccttccctgcatacggcatgagcccctccctgagcaccatcacctccaccagctcctccatcaccagttccatccctgacacagagcgcctagacgacttccacttgtccatccacagtgacatggctgccatcgtaaaagccatggcctcccctgaatcagggttggaggtccgtgaccgcatgtggctcaagattaccatccctaatgctttcatcggctcagatgtggtggactggctgtaccacaatgtggaaggcttcacggaccggagggaggcccgcaagtatgccagcaacctgctgaaagctggcttcatccgccataccgtcaacaagatcaccttctccgagcagtgctactacatcttcggtgacctctgcggcaacatggccaacctgtctctccacgatcacgatggctccagtggcgcctctgaccaggacacactggcccctttgccgcacccgggggccgccccttggcccatggctttcccgtaccagtacccgccacccccgcacccatacaacccgcacccgggcttcccggagctgggctacagctacggcgggggcagcgccagcagtcagcacagcgaaggcagtcggagcagtggctccaaccgtagcggcagcgatcggaggaaggagaaggacccgaaggccggggactccaagtccgggggcagcggcagcgaatcggaccacaccacacgcagcagcctgcgggggccgcgggagcgggcgcccagcgagcgctcagggccggcggccagcgagcacagccaccgcagccaccattccctggccagcagccttcgcagccaccacacacacccgagctacggtcctcccggagtgccccctctctacggcccccccatgctgatgatgcccccgccgcccgcggccatggggcccccaggagcccctccgggccgcgacctggcctcagtgcccccggaactgaccgccagcagacagtccttccgcatggccatgggaaaccccagtgagttctttgtggatgtgatgtgagcagggcccctcccccagctccattccgctcccaccccagccggctgcgttcctctctccatccgtccgtcttttttactttgtctggtacctgaaagggaaataaaaggaactaaatccaggtgcgctaactgctcgcagggtgctgcgagggtggggtgcacctaccgattggctctgcagccccctaacctgcctctggccccagttcgtttcctctgcccactaatccctgcgcaggacttcccaggaccccttttgtctctgggaccagacttgttggtgctaccccttactcccctctgcaacccccattttgggagttgaccccagcaatgaccttggtggcacgctcactccctcattctctcgtttcccctttagctccctttcaccatttattcagctacatcatccctctattaaccccaccccatcaggcacgtgtgcaaacctcttgactttaccccacattactgaaaccaaaatatatttgcttcatctgcccctactaaccatccccctgcctgctgcctcagtcctgcaacctaaagctgtagtcgcctccaatagccatccatgccatccctgcctgtgcctagatcagaggcccagagggccccctcagttgcctgagcagctggtggcttccagggagcatctctgctctacccctgccccatgcctgccctgcgtgctggttccttcagacccctaaccctactaaccagcaggctcatctcacctccaggcctgaaacatttcttttctttcttttttcctcccccaatttaccctgggcctggagcagccaagaatttcgggctgtttgactttctgtgagcccccagcgaggggaggcccagcctccgaggagaccaggaaccctgcttcagcagcccctcagggcttcccaaggatgtccagcccccacacccacacgttaacataatgagtcactaggcttctggggagggcccaacttcacccatgcatgagagactctcctcctttccagagagaatcggatcgcaccacgtgtggcagcctgcggcggggggaggggggcctctttagctctctttatctttctctctcactcatgtatgcatacatgcacagagatgcatacacaggtgcctatgcaagttcatttaagcctcagggctggtccctgcccaaagggctggaccctcctaatcctctcctaggttgtggggctggtcccctgacacccttctccccttcctggtagaccttaaacctcgcacacatgtccccagcattttctcacctggataaagcccataagctgggtctcaggctgggctcagcaaaggactcgccttgcaaccgacaggccattcccacccccacacacaacctcccctgttttcacattcaccatggcatcccagagcaaggacacaggagcccacaggccagttgaggttgggcaaggagacttccaggacttccagacagagtaccaggttttatttttcaccttattctctactttaaacaaatcataactttctctttaagcctctgctataaattctcctggctctcctgggcttccatattttgggggctggggtgtcaaaagtgagatgaagttcttagctccaggttttggggtaaaccaaggtaggaacattttggcatttatttcaattaacaatacttccttggacgggtgcggtggctcacgtctgtaatcccagcactttgggaggctgagacaggtggatcacttgaggtcgggagttcgagaccagcctggccaacatagcaaaaccctgtctctactaaaaatacaaaaattagatgggtgttttggcacctgcctgtaatctcagctactcaggaggctgaggcacaagaatcgcttgaatccaggaagcaagcggaggttgcagtgagttgagatcgcactccagcctgggtgacagagtgagattctgtctcaaaagcaaactaacaaagaaaaacaatacttcctggggttttggtgtgcagagggctttgttggaagtgtgactcaatcttgcctgccttctgggagctctagaattgttcccaacccagtccatggcttctagccaccactacagggctgtttcatgtacttctctctctgactctgtcttgtccgactctcttgagaatttctcaacgattgctcatgcctgtcagtatcagtgcttccatcgttccatctttgattcacttctctttcctttctatttactcccaaaatggagtcattcatcctgatgtcctcaattgctgctgatatgctggtgattcccaaatacatagctccaacccccaacttcccccagactttagatctgtattggtattacctactggacatctctatggacagttccgtatagactcaactcatctgcccaaccaagtatgttcctcctgaattcctctcctggttacttcatcacaatctacataggctcaccagctagaaacatttatgagcttacattccttcttcccatatcttatcagcatatcatatccatttcactccaacactctgtcttgaatttggccctccctctcccctctctactttaattcattggagcatgggatttggagttaggtggttttgggtttgaattccagctctactatttttggttgtgtgatagagttatttaacctctctgagcctcagttccctcgtatgtaaaatgatgataataatacctacctcacagggttgttgtgaggatttaaattagatattgtacgaaaagtgcctagcacagtgcctggcacacagtagagtaggtgctcaataaatggtagctattattatt

SEQ ID NO: 127391 - DNA, 1099 bp, Homo sapiens
  Payload ID: 4926
  Gene Symbol: DVL3
  Gene Name: dishevelled segment polarity protein 3
  ENST ID: ENST00000423300
  CDS Start-End: 439-1099
acttgcctgccgcctcactaactgggcgctgggcctggaggcggtggggaaggcccctccaggcctgaaggctgcctctccagccctagcctgaggcctgcactgctctttggagctgaggccccacagccaagaggagacattcttctccccagtgttcatctgtctggcttctctcccaagcccctggcccacctagcactaggaagcaagcaccttctgtctaatgcctggcatgttttgctgtcaccttctgccctggaactcagggttggatgagcccctgaaatcatagtggtgaaggaggagatctcggatgacaatgccaagctaccatgcttcaatggccgggtggtgtcctggctggtgtcagctgagggctcacacccagacccagcccccttctgtgctgataacccatcggagctgccaccacctatggagcgcacgggaggcatcggggactcccgacccccatccttccaccctcatgctggtgggggcagccaggagaacctggacaatgacacagagacggactctttggtgtctgcccagcgagagcggccacgccggagggatggcccagagcatgcaacccggctaaatggaactgcgaagggggaacggcggcgagaaccagggggttatgatagctcatccacccttatgagcagtgagctggagaccaccagcttctttgactcagatgaggatgactccaccagcaggttcagcagctccacagaacagagcagtgcctcacgcctgatgagaagacacaagcggcggcggcggaagcagaaggtttctcggattgagcggtcctcgtccttcagcagcatcacggactccaccatgtcactcaacatcatcacggtcactctcaacatggaaaaatataacttcttgggcatctccattgtgggccaaagcaacgagcgtggtgacggcggcatctacattggctctatcatgaagggtggggccgtggctgctgatggacgcatcgagccaggagatatgttgttacaggtaaacgagatcaactttgagaacatgagtaatgacgatgcagtccgggtactgcgggagattg

SEQ ID NO: 127392 - DNA, 2294 bp, Homo sapiens
  Payload ID: 4926
  Gene Symbol: DVL3
  Gene Name: dishevelled segment polarity protein 3
  Uniprot ID: Q92997
  ENST ID: ENST00000431765
  CDS Start-End: 77-2176
gccgccgccgtctgggaggctcggcccggccgcccgagcaggccgcgcgcgggccgccgggcccgaggccagagccatgggcgagaccaagatcatctaccacttggatgggcaggagacgccgtaccttgtgaagctgcccctgcccgccgagcgcgtcaccttggcggactttaagggcgttttgcagcgacccagctataagttcttcttcaagtctatggacgacgatttcggagtggtgaaggaggagatctcggatgacaatgccaagctaccatgcttcaatggccgggtggtgtcctggctggtgtcagctgagggctcacacccagacccagcccccttctgtgctgataacccatcggagctgccaccacctatggagcgcacgggaggcatcggggactcccgacccccatccttccaccctcatgctggtgggggcagccaggagaacctggacaatgacacagagacggactctttggtgtctgcccagcgagagcggccacgccggagggatggcccagagcatgcaacccggctaaatggaactgcgaagggggaacggcggcgagaaccagggggttatgatagctcatccacccttatgagcagtgagctggagaccaccagcttctttgactcagatgaggatgactccaccagcaggttcagcagctccacagaacagagcagtgcctcacgcctgatgagaagacacaagcggcggcggcggaagcagaaggtttctcggattgagcggtcctcgtccttcagcagcatcacggactccaccatgtcactcaacatcatcacggtcactctcaacatggaaaaatataacttcttgggcatctccattgtgggccaaagcaacgagcgtggtgacggcggcatctacattggctctatcatgaagggtggggccgtggctgctgatggacgcatcgagccaggagatatgttgttacaggtaaacgagatcaactttgagaacatgagtaatgacgatgcagtccgggtactgcgggagattgtgcacaaaccggggcccatcaccctgactgtagccaagtgctgggacccaagtccacgtggttgcttcacattgcccaggaccatgaccggcaccttccctgcatacggcatgagcccctccctgagcaccatcacctccaccagctcctccatcaccagttccatccctgacacagagcgcctagacgacttccacttgtccatccacagtgacatggctgccatcgtaaaagccatggcctcccctgaatcagggttggaggtccgtgaccgcatgtggctcaagattaccatccctaatgctttcatcggctcagatgtggtggactggctgtaccacaatgtggaaggcttcacggaccggagggaggcccgcaagtatgccagcaacctgctgaaagctggcttcatccgccataccgtcaacaagatcaccttctccgagcagtgctactacatcttcggtgacctctgcggcaacatggccaacctgtctctccacgatcacgatggctccagtggcgcctctgaccaggacacactggcccctttgccgcacccgggggccgccccttggcccatggctttcccgtaccagtacccgccacccccgcacccatacaacccgcacccgggcttcccggagctgggctacagctacggcgggggcagcgccagcagtcagcacagcgaaggcagtcggagcagtggctccaaccgtagcggcagcgatcggaggaaggagaaggacccgaaggccggggactccaagtccgggggcagcggcagcgaatcggaccacaccacacgcagcagcctgcgggggccgcgggagcgggcgcccagcgagcgctcagggccggcggccagcgagcacagccaccgcagccaccattccctggccagcagccttcgcagccaccacacacacccgagctacggtcctcccggagtgccccctctctacggcccccccatgctgatgatgcccccgccgcccgcggccatggggcccccaggagcccctccgggccgcgacctggcctcagtgcccccggaactgaccgccagcagacagtccttccgcatggccatgggaaaccccagtgagttctttgtggatgtgatgtgagcagggcccctcccccagctccattccgctcccaccccagccggctgcgttcctctctccatccgtccgtcttttttactttgtctggtacctgaaagggaaataaaaggaactaaat

SEQ ID NO: 127393 - DNA, 559 bp, Homo sapiens
  Payload ID: 4926
  Gene Symbol: DVL3
  Gene Name: dishevelled segment polarity protein 3
  ENST ID: ENST00000435708
  CDS Start-End: 79-312
gcgccgccgccgtctgggaggctcggcccggccgcccgagcaggccgcgcgcgggccgccgggcccgaggccagagccatgggcgagaccaagatcatctaccacttggatgggcaggagacgccgtaccttgtgaagctgcccctgcccgccgagcgcgtcaccttggcggactttaagggcgttttgcagcgacccagctataagttcttcttcaagtctatggacgacgatttcggctgcctgccctctcctttgtgggctgttgtgggtgttgtcaccggaacagagagcctgacccctgcggagtagtcctcactgacccagagtggtgaaggaggagatctcggatgacaatgccaagctaccatgcttcaatggccgggtggtgtcctggctggtgtcagctgagggctcacacccagacccagcccccttctgtgctgataacccatcggagctgccaccacctatggagcgcacgggaggcatcggggactcccgacccccatccttccatctcttccctgcagccctcatgctggtgggggcagccagg

SEQ ID NO: 127394 - DNA, 2571 bp, Homo sapiens
  Payload ID: 4927
  Gene Symbol: DACT1
  Gene Name: dishevelled-binding antagonist of beta-catenin 1
  Uniprot ID: Q9NYF0
  ENST ID: ENST00000335867
  CDS Start-End: 25-2535
gctctcgctgcccgactgggggccatgaagccgagtccggccgggacggcgaaggagctggagcctccggcgccggcccgaggcgagcagcgcacggcggagcccgaggggcgctggcgggagaagggcgaggcagacaccgagcggcagcgcacccgggagcggcaggaggccacgctggccgggctggcggagctggagtacctgcgccagcgccaagagctgctggtcaggggcgccctgcgcggcgccgggggtgcgggagccgctgcgccccgcgctggggagctactgggggaggcggcgcagcgcagtcgcctggaggagaagttcttggaggagaacatcttgctgctaagaaagcaattgaactgtttgaggcgaagagatgctggtttgttgaatcagttgcaagagcttgacaagcagataagtgacctgagactggatgtagaaaagacatctgaagagcacctggagacagacagtcggcctagctcagggttttatgagctgagtgatggggcttcaggatccctttccaattcctctaactcggtgttcagtgagtgtttatccagttgtcattccagcacctgcttttgcagccccttggaggcgaccttgagtctctcagatggttgccccaaatctgcagatctcataggattgttggaatataaagaaggccactgtgaagaccaggcctcaggggcagtttgccgttccctctccacaccacaatttaattcccttgatgtcattgcagatgtgaatcccaagtaccagtgtgatctggtgtctaaaaacgggaatgatgtatatcgctatcccagtccacttcatgctgtggctgtgcagagcccaatgtttctcctttgtctgacgggcaaccctctgagggaagaggacaggcttggaaaccatgccagtgacatttgcggtggatctgagctagatgccgtcaaaacagacagttccttaccgtccccaagcagtctgtggtctgcttcccatccttcatccagcaagaaaatggatggctacattctgagcctggtccagaaaaaaacacaccctgtaaggaccaacaaaccaagaaccagcgtgaacgctgaccccacgaaagggcttctgaggaacgggagcgtttgtgtcagagccccgggcggtgtctcacagggcaacagtgtgaaccttaagaattcgaaacaggcgtgtctgccctctggcgggataccttctctgaacaatgggacattctccccaccgaagcagtggtcgaaagaatcaaaggccgaacaagccgaaagcaagagggtgcccctgccagagggctgcccctcaggcgctgcctccgaccttcagagtaagcacctgccaaaaacggccaagccagcctcgcaagaacatgctcggtgttccgccattgggacaggggagtcccctaaggaaagcgctcagctctcaggggcctctccaaaagagagtcctagcagaggccctgccccgccgcaggagaacaaagttgtacagcccctgaaaaagatgtcacagaaaaacagcctgcagggcgtccccccggccactcctcccctgctgtctacagctttccccgtggaagagaggcctgccttggatttcaagagcgagggctcttcccaaagcctggaggaagcgcacctggtcaaggcccagtttatcccggggcagcagcccagtgtcaggctccaccggggccacaggaacatgggcgtcgtgaagaactccagcctgaagcaccgcggcccagccctccaggggctggagaacggcttgcccaccgtcagggagaaaacgcgggccgggagcaagaagtgtcgcttcccagatgacttggatacaaataagaaactcaagaaagcctcctccaaggggaggaagagtgggggcgggcccgaggctggtgttcccggcaggcccgcgggcgggggccacagggcggggagcagggcgcatggccacggacgggaggcggtggtggccaaacctaagcacaagcgaactgactaccggcggtggaagtcctcggccgagatttcctacgaagaggccctgaggagggcccggcgcggtcgccgggagaatgtggggctgtaccccgcgcctgtgcctctgccctacgccagcccctacgcctacgtggctagcgactccgagtactcggccgagtgcgagtccctgttccactccaccgtggtggacaccagtgaggacgagcagagcaattacaccaccaactgcttcggggacagcgagtcgagtgtgagcgagggcgagttcgtgggggagagcacaaccaccagcgactctgaagaaagcgggggcttaatttggtcccagtttgtccagactctgcccattcaaacggtaacggccccagaccttcacaaccaccccgcaaaaacctttgtcaaaattaaggcctcacataacctcaagaagaagatcctccgctttcggtctggctctttgaaactgatgacgacggtttgagtgacatcattggtgtagaaagtttgtgtgtttttt

SEQ ID NO: 127395 - DNA, 3734 bp, Homo sapiens
  Payload ID: 4927
  Gene Symbol: DACT1
  Gene Name: dishevelled-binding antagonist of beta-catenin 1
  Uniprot ID: Q9NYF0
  ENST ID: ENST00000395153
  CDS Start-End: 148-2547
ctcgagggcttctagccaccgtccccgccagcgccgcgccccgccacagggcggcatgagcccacccgcggccgcagccctagcgccctgctcctccgcctgggcggcccggctgcggtgacggctctcgctgcccgactgggggccatgaagccgagtccggccgggacggcgaaggagctggagcctccggcgccggcccgaggcgagcagcgcacggcggagcccgaggggcgctggcgggagaagggcgaggcagacaccgagcggcagcgcacccgggagcggcaggaggccacgctggccgggctggcggagctggagtacctgcgccagcgccaagagctgctggtcaggggcgccctgcgcggcgccgggggtgcgggagccgctgcgccccgcgctggggagctactgggggaggcggcgcagcgcagtcgcctggaggagaagttcttggaggagaacatcttgctgctaagaaagcaattgaactgtttgaggcgaagagatgctggtttgttgaatcagttgcaagagcttgacaagcagataagtgacctgagactggatgtagaaaagacatctgaagagcacctggagacagacagtcggcctagctcagggttttatgagctgagtgatggggcttcaggatccctttccaattcctctaactcggtgttcagtgagtgtttatccagttgtcattccagcacctgcttttgcagccccttggaggcgaccttgagtctctcagatggttgccccaaatctgcagatgtgaatcccaagtaccagtgtgatctggtgtctaaaaacgggaatgatgtatatcgctatcccagtccacttcatgctgtggctgtgcagagcccaatgtttctcctttgtctgacgggcaaccctctgagggaagaggacaggcttggaaaccatgccagtgacatttgcggtggatctgagctagatgccgtcaaaacagacagttccttaccgtccccaagcagtctgtggtctgcttcccatccttcatccagcaagaaaatggatggctacattctgagcctggtccagaaaaaaacacaccctgtaaggaccaacaaaccaagaaccagcgtgaacgctgaccccacgaaagggcttctgaggaacgggagcgtttgtgtcagagccccgggcggtgtctcacagggcaacagtgtgaaccttaagaattcgaaacaggcgtgtctgccctctggcgggataccttctctgaacaatgggacattctccccaccgaagcagtggtcgaaagaatcaaaggccgaacaagccgaaagcaagagggtgcccctgccagagggctgcccctcaggcgctgcctccgaccttcagagtaagcacctgccaaaaacggccaagccagcctcgcaagaacatgctcggtgttccgccattgggacaggggagtcccctaaggaaagcgctcagctctcaggggcctctccaaaagagagtcctagcagaggccctgccccgccgcaggagaacaaagttgtacagcccctgaaaaagatgtcacagaaaaacagcctgcagggcgtccccccggccactcctcccctgctgtctacagctttccccgtggaagagaggcctgccttggatttcaagagcgagggctcttcccaaagcctggaggaagcgcacctggtcaaggcccagtttatcccggggcagcagcccagtgtcaggctccaccggggccacaggaacatgggcgtcgtgaagaactccagcctgaagcaccgcggcccagccctccaggggctggagaacggcttgcccaccgtcagggagaaaacgcgggccgggagcaagaagtgtcgcttcccagatgacttggatacaaataagaaactcaagaaagcctcctccaaggggaggaagagtgggggcgggcccgaggctggtgttcccggcaggcccgcgggcgggggccacagggcggggagcagggcgcatggccacggacgggaggcggtggtggccaaacctaagcacaagcgaactgactaccggcggtggaagtcctcggccgagatttcctacgaagaggccctgaggagggcccggcgcggtcgccgggagaatgtggggctgtaccccgcgcctgtgcctctgccctacgccagcccctacgcctacgtggctagcgactccgagtactcggccgagtgcgagtccctgttccactccaccgtggtggacaccagtgaggacgagcagagcaattacaccaccaactgcttcggggacagcgagtcgagtgtgagcgagggcgagttcgtgggggagagcacaaccaccagcgactctgaagaaagcgggggcttaatttggtcccagtttgtccagactctgcccattcaaacggtaacggccccagaccttcacaaccaccccgcaaaaacctttgtcaaaattaaggcctcacataacctcaagaagaagatcctccgctttcggtctggctctttgaaactgatgacgacggtttgagtgacatcattggtgtagaaagtttgtgtgtttttttttcttctccctagttgccaaaattaaaaaggtggtgttttcatttttgtataatactttaatggaatgctttttaaaaaaatataaaaccaaggtaaattattgtttcatcttcacgtatggatgctagtgcctttaatggaaggtaaagaatgttttgctagttagaagtacatattgaggttttaatggtggtgatagtgagttttgtggcaccagctgttttttattttaaactttctgagcatccggcaaggtacaggttttgatgttcaagttttattgggataagatcttttgatcccaaggtcaggtggatggaatttttggatttatatttgttccttgagtcttcagggcagtgtctccatgagggttttcctgttgaggggcaccacatacaatagtgtgaagtaggtatgaggggcagtcattgtattctatagtttttttatgtagtctacatttctcagatgtatccccattcggttttattctcagaactgttactagactcatgacttggaggccaaaccttaaatccagagatagcagcctcgatagggaccttaaaaggattcacaaaaacttttgccacacttggtgcctaggccctgttcctaataaccccttctagggccgtttatccaacatttagatgccttcttttccctccctaatttgtagccagtccaacctttcattccttggaggatttagttttgggataaaattttggtccttgggcacagagacattcactattaatgaagtaacccttgggcatgactccaatcccagaattgctcactgagcgctatgccaccgaagcgttgacctgaacatattagtgcaatccagtccagattggacctttgatcctatgtggaagggctgttttttaagaaaaaatttttggtaaacagtattgtgtaaaattgctttttgtataccaatatatgcatgttttgtgcatgagtagtacttgtgttgatactcctgttgatgttaaattactatataatataaacagtatgtgtttttatatatcattgtgtaaatttaatataacatatgcagtaataaaccatttgttttactgctgttaagtttgttatttgggtataaaaccagatgtttacacctgtaaa

SEQ ID NO: 127396 - DNA, 993 bp, Homo sapiens
  Payload ID: 4927
  Gene Symbol: DACT1
  Gene Name: dishevelled-binding antagonist of beta-catenin 1
  ENST ID: ENST00000421793
  CDS Start-End: 604-993
ggaggaagcaggagcctcttgaaaaacttaccaccaaacttcatggaatcaccctggccttcttcaacaaaaacctctttaacagcactaaaacacagctaaaagaactgtttgaggcgaagagatgctggtttgttgaatcagttgcaagagcttgacaagcagataagtgacctgagactggatgtagaaaagacatctgaagagcacctggagacagacagtcggcctagctcagggttttatgagctgagtgatggggcttcaggatccctttccaattcctctaactcggtgttcagtgagtgtttatccagttgtcattccagcacctgcttttgcagccccttggaggcgaccttgagtctctcagatggttgccccaaatctgcagatctcataggattgttggaatataaagaaggccactgtgaagaccaggcctcaggggcagtttgccgttccctctccacaccacaatttaattcccttgatgtcattgcagatgtgaatcccaagtaccagtgtgatctggtgtctaaaaacgggaatgatgtatatcgctatcccagtccacttcatgctgtggctgtgcagagcccaatgtttctcctttgtctgacgggcaaccctctgagggaagaggacaggcttggaaaccatgccagtgacatttgcggtggatctgagctagatgccgtcaaaacagacagttccttaccgtccccaagcagtctgtggtctgcttcccatccttcatccagcaagaaaatggatggctacattctgagcctggtccagaaaaaaacacaccctgtaaggaccaacaaaccaagaaccagcgtgaacgctgaccccacgaaagggcttctgaggaacgggagcgtttgtgtcagagccccgggcggtgtctcacagggcaacagtgtgaaccttaagaattcgaaacaggcgtgtctgccctctggcgggataccttctctgaacaatggg

SEQ ID NO: 127397 - DNA, 2610 bp, Homo sapiens
  Payload ID: 4927
  Gene Symbol: DACT1
  Gene Name: dishevelled-binding antagonist of beta-catenin 1
  ENST ID: ENST00000541264
  CDS Start-End: 814-2481
gagtcgcctagttctaacgttcggtctccttagttagatgagtatatgccctctccccagcggtttgcaaactcccacttaaaataccattttatttggaggttttcttgactttatctcctcccgccgagaggggccaaaagccaaggagggggtttgtggcgtgcttaactgtccagggccgagttttacgattacactggagcgcctgtagggagccgtgcctctccgagagctctccccagcatgccagctttcacccaggctggtgcttaatttcaaatagaagccctttgtataaggcagctcaaactagatggaaatgatggaaatttggctggagactgtgtcccctcctctcatattttatacgttctgccagctgtgattggtggtggaggtgggagaaaagagaacctgctctcgaactgtttgaggcgaagagatgctggtttgttgaatcagttgcaagagcttgacaagcagataagtgacctgagactggatgtagaaaagacatctgaagagcacctggagacagacagtcggcctagctcagggttttatgagctgagtgatggggcttcaggatccctttccaattcctctaactcggtgttcagtgagtgtttatccagttgtcattccagcacctgcttttgcagccccttggaggcgaccttgagtctctcagatggttgccccaaatctgcagatgtgaatcccaagtaccagtgtgatctggtgtctaaaaacgggaatgatgtatatcgctatcccagtccacttcatgctgtggctgtgcagagcccaatgtttctcctttgtctgacgggcaaccctctgagggaagaggacaggcttggaaaccatgccagtgacatttgcggtggatctgagctagatgccgtcaaaacagacagttccttaccgtccccaagcagtctgtggtctgcttcccatccttcatccagcaagaaaatggatggctacattctgagcctggtccagaaaaaaacacaccctgtaaggaccaacaaaccaagaaccagcgtgaacgctgaccccacgaaagggcttctgaggaacgggagcgtttgtgtcagagccccgggcggtgtctcacagggcaacagtgtgaaccttaagaattcgaaacaggcgtgtctgccctctggcgggataccttctctgaacaatgggacattctccccaccgaagcagtggtcgaaagaatcaaaggccgaacaagccgaaagcaagagggtgcccctgccagagggctgcccctcaggcgctgcctccgaccttcagagtaagcacctgccaaaaacggccaagccagcctcgcaagaacatgctcggtgttccgccattgggacaggggagtcccctaaggaaagcgctcagctctcaggggcctctccaaaagagagtcctagcagaggccctgccccgccgcaggagaacaaagttgtacagcccctgaaaaagatgtcacagaaaaacagcctgcagggcgtccccccggccactcctcccctgctgtctacagctttccccgtggaagagaggcctgccttggatttcaagagcgagggctcttcccaaagcctggaggaagcgcacctggtcaaggcccagtttatcccggggcagcagcccagtgtcaggctccaccggggccacaggaacatgggcgtcgtgaagaactccagcctgaagcaccgcggcccagccctccaggggctggagaacggcttgcccaccgtcagggagaaaacgcgggccgggagcaagaagtgtcgcttcccagatgacttggatacaaataagaaactcaagaaagcctcctccaaggggaggaagagtgggggcgggcccgaggctggtgttcccggcaggcccgcgggcgggggccacagggcggggagcagggcgcatggccacggacgggaggcggtggtggccaaacctaagcacaagcgaactgactaccggcggtggaagtcctcggccgagatttcctacgaagaggccctgaggagggcccggcgcggtcgccgggagaatgtggggctgtaccccgcgcctgtgcctctgccctacgccagcccctacgcctacgtggctagcgactccgagtactcggccgagtgcgagtccctgttccactccaccgtggtggacaccagtgaggacgagcagagcaattacaccaccaactgcttcggggacagcgagtcgagtgtgagcgagggcgagttcgtgggggagagcacaaccaccagcgactctgaagaaagcgggggcttaatttggtcccagtttgtccagactctgcccattcaaacggtaacggccccagaccttcacaaccaccccgcaaaaacctttgtcaaaattaaggcctcacataacctcaagaagaagatcctccgctttcggtctggctctttgaaactgatgacgacggtttgagtgacatcattggtgtagaaagtttgtgtgtttttttttcttctccctagttgccaaaattaaaaaggtggtgttttcatttttgtataatactttaatggaatgctttttaaaaaaatataaaaccaa

SEQ ID NO: 127398 - DNA, 2239 bp, Homo sapiens
  Payload ID: 4927
  Gene Symbol: DACT1
  Gene Name: dishevelled-binding antagonist of beta-catenin 1
  ENST ID: ENST00000556859
  CDS Start-End: 506-2173
acagtgctctgcaggaggaagcaggagcctcttgaaaaacttaccaccaaacttcatggaatcaccctggccttcttcaacaaaaacctctttaacagcactaaaacacagctaaaagaactgtttgaggcgaagagatgctggtttgttgaatcagttgcaagagcttgacaagcagataagtgacctgagactggatgtagaaaagacatctgaagagcacctggagacagacagtcggcctagctcagggttttatgagctgagtgatggggcttcaggatccctttccaattcctctaactcggtgttcagtgagtgtttatccagttgtcattccagcacctgcttttgcagccccttggaggcgaccttgagtctctcagatggttgccccaaatctgcagatgtgaatcccaagtaccagtgtgatctggtgtctaaaaacgggaatgatgtatatcgctatcccagtccacttcatgctgtggctgtgcagagcccaatgtttctcctttgtctgacgggcaaccctctgagggaagaggacaggcttggaaaccatgccagtgacatttgcggtggatctgagctagatgccgtcaaaacagacagttccttaccgtccccaagcagtctgtggtctgcttcccatccttcatccagcaagaaaatggatggctacattctgagcctggtccagaaaaaaacacaccctgtaaggaccaacaaaccaagaaccagcgtgaacgctgaccccacgaaagggcttctgaggaacgggagcgtttgtgtcagagccccgggcggtgtctcacagggcaacagtgtgaaccttaagaattcgaaacaggcgtgtctgccctctggcgggataccttctctgaacaatgggacattctccccaccgaagcagtggtcgaaagaatcaaaggccgaacaagccgaaagcaagagggtgcccctgccagagggctgcccctcaggcgctgcctccgaccttcagagtaagcacctgccaaaaacggccaagccagcctcgcaagaacatgctcggtgttccgccattgggacaggggagtcccctaaggaaagcgctcagctctcaggggcctctccaaaagagagtcctagcagaggccctgccccgccgcaggagaacaaagttgtacagcccctgaaaaagatgtcacagaaaaacagcctgcagggcgtccccccggccactcctcccctgctgtctacagctttccccgtggaagagaggcctgccttggatttcaagagcgagggctcttcccaaagcctggaggaagcgcacctggtcaaggcccagtttatcccggggcagcagcccagtgtcaggctccaccggggccacaggaacatgggcgtcgtgaagaactccagcctgaagcaccgcggcccagccctccaggggctggagaacggcttgcccaccgtcagggagaaaacgcgggccgggagcaagaagtgtcgcttcccagatgacttggatacaaataagaaactcaagaaagcctcctccaaggggaggaagagtgggggcgggcccgaggctggtgttcccggcaggcccgcgggcgggggccacagggcggggagcagggcgcatggccacggacgggaggcggtggtggccaaacctaagcacaagcgaactgactaccggcggtggaagtcctcggccgagatttcctacgaagaggccctgaggagggcccggcgcggtcgccgggagaatgtggggctgtaccccgcgcctgtgcctctgccctacgccagcccctacgcctacgtggctagcgactccgagtactcggccgagtgcgagtccctgttccactccaccgtggtggacaccagtgaggacgagcagagcaattacaccaccaactgcttcggggacagcgagtcgagtgtgagcgagggcgagttcgtgggggagagcacaaccaccagcgactctgaagaaagcgggggcttaatttggtcccagtttgtccagactctgcccattcaaacggtaacggccccagaccttcacaaccaccccgcaaaaacctttgtcaaaattaaggcctcacataacctcaagaagaagatcctccgctttcggtctggctctttgaaactgatgacgacggtttgagtgacatcattggtgtagaaagtttgtgtgtttttttttcttctccctagttgccaaaattaaaaa

SEQ ID NO: 127399 - DNA, 2942 bp, Homo sapiens
  Payload ID: 4928
  Gene Symbol: DACT2
  Gene Name: dishevelled-binding antagonist of beta-catenin 2
  Uniprot ID: Q5SW24
  ENST ID: ENST00000366795
  CDS Start-End: 90-2414
ggaggacccgcgacacagctcgggatccgcgcgcgctgggcctccggcgccgctcgtggggttcgggaggccgggaccctgcccgggagatgtggacgccgggcggacccccggggtccgcgggctgggaccgccgtaggttgggcgcgaggttgcgcgcggcgttcgcggggctgcaggagctgcaggggctgcgagccacgcagcaggagcgggtacggggcgccctggccctgcagcccccgcccgcgcccgccgcgccctgcggcccccacggcctccacggccccgagcagcagctggaggcggcgctggccgcgctgcaggagcagctgtcccggctgagacaacaggacatcggcctgaagacccacctggaccagctggacctgcagattagcaagctgcagctggatgtgggcacagcctcaggggaggccctggacagcgacagcaggcccagctcaggcttttacgagatgagcgacggtggatcctgctccctgtccacgtcctgtgcctccgtctgcagtgaccacatctctccctcgctgggcagtttgttgcctgtggcccaggcccacaaggccaggcccagcatgggggactggaggccccggtcggttgatgagactactgtgccagcgtggagaccccaggctaccgaggagggcgccaggcccccagggagcgtggaggatgcaggccagccgtggggcacattctggcccaggcctgtgtctacaggtgatcttgacagagccctgccggcggacacggggctccagaaagccagcgcggacgccgagctcctcgggctcctctgccagggggtggatatcccgctgcacgtgccggaccccaagtatcggcaggacctggtgtcccagggcggcagggaggtgtacccgtaccccagccccctgcacgccgtggctctacagagccccctgtttgtcctgactaaggaaaccccacagagaggtggcccctcgttccctagggagagccccaggggccccgcaggtctgaacaccatccagactgggccggtcctcgaggctggcccggccagggccagagcttatatcgacaggttgctgcatctgtggggccgggagaccccagcaaagggtagcgagggagaacagggacctctaaggcatgcagcgtccccatctccacagaggcagggtggctggagtacagacggtggagggcgactgctggtcttcgccccagggagggaggacgagggagggccagctcagagcaggggtgccggcaggggcgggccccagcagcagggatacatgccccttgagggtccccagcagtctggcagccttccagaggagggctccaagccctcaaacagctgtgtcctcagggagaccatggtgcaggcttctcccagctcaaaggcccagcagacaccctcagctcaggactatggacgaggcaacatcatatccccatccaggatgctggacaagagcccctcaccggcctctgggcactttgcccacccatcctttgctgccagcctgaaaatgggtccccccaagagcaaggctgaaaaaatcaagagaagtcccatggacaaggtgctgaggtttgcaaggcagccgctgcttctactggacaggcctgagggagcccatgcagccccccagccatccctggagtgggaccctgcccactggcccacagggaggggcgggctccagcggaggccagccctggcctgggaggcacccgggcgctcctgttctgagtccaccctctaccccatgcctgtcctcgtccccttggcagtggccccgcaggagagccaccggacctcagcccaagccctgttcccctttgaggcgtcactgctcacctcagtggccaggaggaagcatcgccgctggcagtccaccgtggagatctcggcccgggcccgcctggccagctgtcctgagtctaacctggggccccccaggcccgtggccaggagagcaggtggcccactggcccggggccgtccctcactggtccgccaggacgcctacaccaggagcgactcagagccctccaagcactcggccgagtgtgacccgcggttcccgtcagtcatcccggagaccagcgagggagagtccagtgaccacaccaccaaccgattcggagaccgtgagtccagcagcagcgacgaggagggcggcgcccagagcagggactgtgacctggcactgggctatgtggcggccgggcatgcggagctggcctggacccaggaggccccggtcagctcggggccactcctgtcccccgtgcccaagctgtgccgtattaaggcctccaaggccctgaagaagaagatccgcaggttccagccgacggccctgaaggtcatgaccatggtgtgaggtgcagtgactgcgtcaagagaagcctgctgcacacaggggccctttccatgcagtgtcctgtgcatgtctgggtttcagtgtcgtcttgccaagtcgctttatcttccgaggccaccgtttaacaggagtccccgcagatgggttctgccctgtggagtatggccgtgagtccccgccccagcaaagacttccatgcggagctctggtttcagatgccagcagcctccccggccgacctagtgtctcttttcaaggtctgcccaggatgctgcttcccggcatgcaccttgtttccatgttgtcatcctcccatggcttcccctgccctcactcccctctggctggggaagtgtttcccaatcctttgaccattcctccccaaaagcattttaaagaggcggttgcaggactctgagctggaaattgaatttgagtttaaactccacgttaagctgtcagcatacacaaacacccaaattatgccatgatctcaaataaaaggaacattttttttccctcttttaa

SEQ ID NO: 127400 - DNA, 2028 bp, Homo sapiens
  Payload ID: 4928
  Gene Symbol: DACT2
  Gene Name: dishevelled-binding antagonist of beta-catenin 2
  Uniprot ID: Q5SW24
  ENST ID: ENST00000366796
  CDS Start-End: 122-964
ctgcggagccgggggcggagagaggaggcgcaggaggacccgcgacacagctcgggatccgcgcgcgctgggcctccggcgccgctcgtggggttcgggaggccgggaccctgcccgggagatgtggacgccgggcggacccccggggtccgcgggctgggaccgccgtaggttgggcgcgaggttgcgcgcggcgttcgcggggctgcaggagctgcaggggctgcgagccacgcagcaggagcgggtacggggcgccctggccctgcagcccccgcccgcgcccgccgcgccctgcggcccccacggcctccacggccccgagcagcagctggaggcggcgctggccgcgctgcaggagcagctgtcccggctgagacaacaggacatcggcctgaagacccacctggaccagctggacctgcagattagcaagctgcagctggatgtgggcacagcctcaggggaggccctggacagcgacagcaggcccagctcaggcttttacgagatgagcgacggtggatcctgctccctgtccacgtcctgtgcctccgtctgcagtgaccacatctctccctcgctgggcagtttgttgcctgtggcccaggcccacaaggccaggcccagcatgggggactggaggccccggtcggttgatgagactactgtgccagcgtggagaccccaggctaccgaggagggcgccaggcccccagggagcgtggaggatgcaggccagccgtggggcacattctggcccaggcctgtgtctacagagctgtgcaatgctccaggtgaacttgacatgcatgctccgcctgcaggctgcacctccagttcactgacaggtgtaggttctggtttgagaggaaagtgtggcctctgtggctgtcagctccctttctgctcagtgaacacaagttcaaagacaaaatcatcaggaatttcaagacagcaatgacagagcactacaccaagctgggggctgcattgactgaccagtcacaggctggaagtcgggtcctggccacaggcccagcttcttctcccgatatcatcggcccccctctgcccgccaagtcactctgctttccccacagtgagccagtgggagctgcagagaagtgtccagaaaggactgctggtcagtggaatttcctttacgtggaaagttgaagtgagggagtaatggacgtaagagagaatggtttctccctaacaaatagactggaaattccaatccttctactttctgtgtgtttttctagcatgactgcaagtgctggggccataagcaccatgttcagcagcacccaggaagcaaaagtagttgacagaatgttagtgagcattccttcttgtttttatttttttttaaagccccttctatatttcataatttttgtgattttgggtaaatacaatgttatcataagttaaggaaaagttaatctttttaggctaggaaaagttccagtttacgtgcatatatattattgcaaaatgatgtgaaaatttaatattttttgagataattgatatttttcattcactatgttaataagatgaatcatattaacaaaatgtccattgctaaaccaatcatgcattcataggatgaacaatgtttggttatggtgtttttgtttgtacttttaaatggtacttaaacataattagggagaagatgagctccaaagcacctggcacagctccagcaggctcagctaatggccggtcttctcatttaccaaacccacgtggccaccccgacctcagacgaattttttttacaaagtccagacattcaattatttacaatgtgtctttttaggacactgccagaattaggttgtaaatttttttttaggattgtatcttatgttcatagaagaaattggcctatgaaatttctttcatataatactcacatctggttttcatcccaaagctaaaccagcccataaaagcagctgtgatggttttcttcttcttatatttcaataaatggtatgtaaaagacag

SEQ ID NO: 127401 - DNA, 1620 bp, Homo sapiens
  Payload ID: 4928
  Gene Symbol: DACT2
  Gene Name: dishevelled-binding antagonist of beta-catenin 2
  Uniprot ID: Q5SW24
  ENST ID: ENST00000607983
  CDS Start-End: 311-1411
acacagctcgggatccgcgcgcgctgggcctccggcgccgctcgtggggttcgggaggccgggaccctgcccgggagatgtggacgccgggcggacccccggggtccgcgggctgggaccgccgtaggttgggcgcgagggagaacagggacctctaaggcatgcagcgtccccatctccacagaggcagggtggctggagtacagacggtggagggcgactgctggtcttcgccccagggagggaggacgagggagggccagctcagagcaggggtgccggcaggggcgggccccagcagcagggatacatgccccttgagggtccccagcagtctggcagccttccagaggagggctccaagccctcaaacagctgtgtcctcagggagaccatggtgcaggcttctcccagctcaaaggcccagcagacaccctcagctcaggactatggacgaggcaacatcatatccccatccaggatgctggacaagagcccctcaccggcctctgggcactttgcccacccatcctttgctgccagcctgaaaatgggtccccccaagagcaaggctgaaaaaatcaagagaagtcccatggacaaggtgctgaggtttgcaaggcagccgctgcttctactggacaggcctgagggagcccatgcagccccccagccatccctggagtgggaccctgcccactggcccacagggaggggcgggctccagcggaggccagccctggcctgggaggcacccgggcgctcctgttctgagtccaccctctaccccatgcctgtcctcgtccccttggcagtggccccgcaggagagccaccggacctcagcccaagccctgttcccctttgaggcgtcactgctcacctcagtggccaggaggaagcatcgccgctggcagtccaccgtggagatctcggcccgggcccgcctggccagctgtcctgagtctaacctggggccccccaggcccgtggccaggagagcaggtggcccactggcccggggccgtccctcactggtccgccaggacgcctacaccaggagcgactcagagccctccaagcactcggccgagtgtgacccgcggttcccgtcagtcatcccggagaccagcgagggagagtccagtgaccacaccaccaaccgattcggagaccgtgagtccagcagcagcgacgaggagggcggcgcccagagcagggactgtgacctggcactgggctatgtggcggccgggcatgcggagctggcctggacccaggaggccccggtcagctcggggccactcctgtcccccgtgcccaagctgtgccgtattaaggcctccaaggccctgaagaagaagatccgcaggttccagccgacggccctgaaggtcatgaccatggtgtgaggtgcagtgactgcgtcaagagaagcctgctgcacacaggggccctttccatgcagtgtcctgtgcatgtctgggtttcagtgtcgtcttgccaagtcgctttatcttccgaggccaccgtttaacaggagtccccgcagatgggttctgccctgtggagtatggccgtgagtccccgccccagcaaagacttccatgcggagctctgg

SEQ ID NO: 127402 - DNA, 2088 bp, Homo sapiens
  Payload ID: 4928
  Gene Symbol: DACT2
  Gene Name: dishevelled-binding antagonist of beta-catenin 2
  Uniprot ID: Q5SW24
  ENST ID: ENST00000610183
  CDS Start-End: 65-1879
acacagctcgggatccgcgcgcgctgggcctccggcgccgctcgtggggttcgggaggcccagcatgggggactggaggccccggtcggttgatgagactactgtgccagcgtggagaccccaggctaccgaggagggcgccaggcccccagggagcgtggaggatgcaggccagccgtggggcacattctggcccaggcctgtgtctacaggtgatcttgacagagccctgccggcggacacggggctccagaaagccagcgcggacgccgagctcctcgggctcctctgccagggggtggatatcccgctgcacgtgccggaccccaagtatcggcaggacctggtgtcccagggcggcagggaggtgtacccgtaccccagccccctgcacgccgtggctctacagagccccctgtttgtcctgactaaggaaaccccacagagaggtggcccctcgttccctagggagagccccaggggccccgcaggtctgaacaccatccagactgggccggtcctcgaggctggcccggccagggccagagcttatatcgacaggttgctgcatctgtggggccgggagaccccagcaaagggtagcgagggagaacagggacctctaaggcatgcagcgtccccatctccacagaggcagggtggctggagtacagacggtggagggcgactgctggtcttcgccccagggagggaggacgagggagggccagctcagagcaggggtgccggcaggggcgggccccagcagcagggatacatgccccttgagggtccccagcagtctggcagccttccagaggagggctccaagccctcaaacagctgtgtcctcagggagaccatggtgcaggcttctcccagctcaaaggcccagcagacaccctcagctcaggactatggacgaggcaacatcatatccccatccaggatgctggacaagagcccctcaccggcctctgggcactttgcccacccatcctttgctgccagcctgaaaatgggtccccccaagagcaaggctgaaaaaatcaagagaagtcccatggacaaggtgctgaggtttgcaaggcagccgctgcttctactggacaggcctgagggagcccatgcagccccccagccatccctggagtgggaccctgcccactggcccacagggaggggcgggctccagcggaggccagccctggcctgggaggcacccgggcgctcctgttctgagtccaccctctaccccatgcctgtcctcgtccccttggcagtggccccgcaggagagccaccggacctcagcccaagccctgttcccctttgaggcgtcactgctcacctcagtggccaggaggaagcatcgccgctggcagtccaccgtggagatctcggcccgggcccgcctggccagctgtcctgagtctaacctggggccccccaggcccgtggccaggagagcaggtggcccactggcccggggccgtccctcactggtccgccaggacgcctacaccaggagcgactcagagccctccaagcactcggccgagtgtgacccgcggttcccgtcagtcatcccggagaccagcgagggagagtccagtgaccacaccaccaaccgattcggagaccgtgagtccagcagcagcgacgaggagggcggcgcccagagcagggactgtgacctggcactgggctatgtggcggccgggcatgcggagctggcctggacccaggaggccccggtcagctcggggccactcctgtcccccgtgcccaagctgtgccgtattaaggcctccaaggccctgaagaagaagatccgcaggttccagccgacggccctgaaggtcatgaccatggtgtgaggtgcagtgactgcgtcaagagaagcctgctgcacacaggggccctttccatgcagtgtcctgtgcatgtctgggtttcagtgtcgtcttgccaagtcgctttatcttccgaggccaccgtttaacaggagtccccgcagatgggttctgccctgtggagtatggccgtgagtccccgccccagcaaagacttccatgcggagctctgg

SEQ ID NO: 127403 - DNA, 2526 bp, Homo sapiens
  Payload ID: 4929
  Gene Symbol: DACT3
  Gene Name: dishevelled-binding antagonist of beta-catenin 3
  ENST ID: ENST00000300875
  CDS Start-End: 442-1656
ctcactcagacccatgaggccctgcctggtctcgtctgggacctgggacagcagctgggagacctgagcctggagtctgggggcctggaacaggagagcgggcgtagctcgggcttctatgaagatcccagctctacaggaggtccagattcaccaccctcaaccttctgtggggacagtggcttctctggatccagctcctatggtcgcctgggtccctctgagccccggggcatctatgccagtgagaggcccaagtccctaggagacgccagtcccagcgctccggaggtggtgggcgcgcgggcagcggtgccgcggtccttctcagcgccctacccgacggcaggggggtccgccggcccggaggcctgctcctcggcggagcggcgggcccgcgccgggccctttctgacgcccagccccctgcacgccgtggcgatgcgcagcccgcggccctgcggccgccctcccaccgactcgcccgacgcggggggcgcagggcggcccctggacggctacatctcggcgctcctgcgcaggcgccgccgccggggggcgggccagccccggaccagtcccgggggcgcggacggcggcccgcggcgccagaacagcgtgcgccagcggccgcccgacgcgtctccgtcccccggcagcgcgcgacccgcgcgggagccctcgttggagcgcgtcgggggccaccccaccagccctgccgccttgagccgcgcctgggcgtcgtcgtgggagtcggaggcggcacccgagcccgctgcgccgcccgccgccccctcaccccccgacagcccggctgagggccgcttggtgaaggcgcagtacatcccgggcgcgcaggcggccacccgaggcctccctggccgcgccgcccgccgcaaaccgccgccactgacccgcggccgcagcgtggagcagtcaccaccccgggagcgtccccgggccgccggccgccgtggacgcatggccgaggcttcgggccgccgcggctcgcccagggcccgcaaggcctcgcgctcccagtctgagaccagcctgctgggccgcgcctccgcggtcccttcggggccccctaagtaccccacggcggagcgggaagagcctcggcctccacggccacgccgcggcccagcgcccacgctggcggcccaggccgcagggtcctgccgtcgctggcgctccactgcggagatcgacgctgccgatgggcgccgcgtgcggccccgagcccctgcggcgcgtgttcccggccccggcccgtccccgtcagctccccagcgtcgtctgctttacggctgcgcgggcagcgactccgagtgctcggctgggcgcctggggcccctgggacgccgggggcctgcgggaggcgtcggcgggggttacggggagagcgaatcgagcgccagcgagggagaatcgcctgccttcagctctgcctccagcgactcagacggcagcggtggcctcgtgtggccgcagcagctggtggcggccaccgcggcctctgggggtggagcaggtgcaggggcgcccgcaggccccgccaaagtcttcgtgaaaatcaaagcttcccacgcgctcaagaaaaagatactgcgtttccgttcgggttctctcaaggtcatgactacagtgtgagtttggggatttgcttgggctcccccttcatggcctctgcacctccacactcccaaccactgacccttccacatctaccttccaaagaccatcgttttctctgcttccaaagacccccctcactctccccactcctaacagtcttggttgaaaaggctcccccaccaccaccgagaggaatggggaggagccctgtttgacccagttcagcttctagcttggaagcccttgggcaagacagttccccttctctgggcgtcactttcctcatctgtacagtaagtgtccatgtatgcaaaaggggtaattcggtttgaatttccccgttttagtttagaagcctagtctgtttgttcccctccaccgctctccctctcattcctgatgagccctctcattcctcctttccttgcccagctatggccccctctcattcacaaagtgccccctccatgtccctggacccttaagatatccccttggcaccctggtcagagactctgtgtctgactcaggtggtccctgcagagtgccctgggaagggaaggagcactgatttgggggttttgagggtcaagtaggggttggtaacacctggaaagaaggactctttcacttcgatccctggacaattatggaggattcggaggtagaagaggggaaggaagatggtttctatctcatgacccccactccctgtgagagggaatgggggaagcctgatgaccctcagctgttccaatctagtattttttttcttttttaaaattactgtatttattatgacgatggtgactccccagtgcaaaggggggccagattctgtgtgtttctctaacctctttgtaaataaatgcacagtgtaacata

SEQ ID NO: 127404 - DNA, 2834 bp, Homo sapiens
  Payload ID: 4929
  Gene Symbol: DACT3
  Gene Name: dishevelled-binding antagonist of beta-catenin 3
  Uniprot ID: Q96B18
  ENST ID: ENST00000391916
  CDS Start-End: 75-1964
gctggggcggggaggtgggaccgggagaggggtggccgcggggcccggccgggctggggcggggggccgcagccatgatccgggccttctcgttcccggtgagccctgagcggggccggctgcggggctggctggagggtagcctggccgggctctgcgagttacattggctccgggagaggcaggagtaccgcgtgcagcaggcgctgcggctggcccagcccggaatggggggcgccgaggccgaggacgaggaggacgccgatgaggatgaagatgcggcggcggcgcgccgggccgcagcggccctggaggagcagctggaggccctgcctggtctcgtctgggacctgggacagcagctgggagacctgagcctggagtctgggggcctggaacaggagagcgggcgtagctcgggcttctatgaagatcccagctctacaggaggtccagattcaccaccctcaaccttctgtggggacagtggcttctctggatccagctcctatggtcgcctgggtccctctgagccccggggcatctatgccagtgagaggcccaagtccctaggagacgccagtcccagcgctccggaggtggtgggcgcgcgggcagcggtgccgcggtccttctcagcgccctacccgacggcaggggggtccgccggcccggaggcctgctcctcggcggagcggcgggcccgcgccgggccctttctgacgcccagccccctgcacgccgtggcgatgcgcagcccgcggccctgcggccgccctcccaccgactcgcccgacgcggggggcgcagggcggcccctggacggctacatctcggcgctcctgcgcaggcgccgccgccggggggcgggccagccccggaccagtcccgggggcgcggacggcggcccgcggcgccagaacagcgtgcgccagcggccgcccgacgcgtctccgtcccccggcagcgcgcgacccgcgcgggagccctcgttggagcgcgtcgggggccaccccaccagccctgccgccttgagccgcgcctgggcgtcgtcgtgggagtcggaggcggcacccgagcccgctgcgccgcccgccgccccctcaccccccgacagcccggctgagggccgcttggtgaaggcgcagtacatcccgggcgcgcaggcggccacccgaggcctccctggccgcgccgcccgccgcaaaccgccgccactgacccgcggccgcagcgtggagcagtcaccaccccgggagcgtccccgggccgccggccgccgtggacgcatggccgaggcttcgggccgccgcggctcgcccagggcccgcaaggcctcgcgctcccagtctgagaccagcctgctgggccgcgcctccgcggtcccttcggggccccctaagtaccccacggcggagcgggaagagcctcggcctccacggccacgccgcggcccagcgcccacgctggcggcccaggccgcagggtcctgccgtcgctggcgctccactgcggagatcgacgctgccgatgggcgccgcgtgcggccccgagcccctgcggcgcgtgttcccggccccggcccgtccccgtcagctccccagcgtcgtctgctttacggctgcgcgggcagcgactccgagtgctcggctgggcgcctggggcccctgggacgccgggggcctgcgggaggcgtcggcgggggttacggggagagcgaatcgagcgccagcgagggagaatcgcctgccttcagctctgcctccagcgactcagacggcagcggtggcctcgtgtggccgcagcagctggtggcggccaccgcggcctctgggggtggagcaggtgcaggggcgcccgcaggccccgccaaagtcttcgtgaaaatcaaagcttcccacgcgctcaagaaaaagatactgcgtttccgttcgggttctctcaaggtcatgactacagtgtgagtttggggatttgcttgggctcccccttcatggcctctgcacctccacactcccaaccactgacccttccacatctaccttccaaagaccatcgttttctctgcttccaaagacccccctcactctccccactcctaacagtcttggttgaaaaggctcccccaccaccaccgagaggaatggggaggagccctgtttgacccagttcagcttctagcttggaagcccttgggcaagacagttccccttctctgggcgtcactttcctcatctgtacagtaagtgtccatgtatgcaaaaggggtaattcggtttgaatttccccgttttagtttagaagcctagtctgtttgttcccctccaccgctctccctctcattcctgatgagccctctcattcctcctttccttgcccagctatggccccctctcattcacaaagtgccccctccatgtccctggacccttaagatatccccttggcaccctggtcagagactctgtgtctgactcaggtggtccctgcagagtgccctgggaagggaaggagcactgatttgggggttttgagggtcaagtaggggttggtaacacctggaaagaaggactctttcacttcgatccctggacaattatggaggattcggaggtagaagaggggaaggaagatggtttctatctcatgacccccactccctgtgagagggaatgggggaagcctgatgaccctcagctgttccaatctagtattttttttcttttttaaaattactgtatttattatgacgatggtgactccccagtgcaaaggggggccagattctgtgtgtttctctaacctctttgtaaataaatgcacagtgtaacata

SEQ ID NO: 127405 - DNA, 3085 bp, Homo sapiens
  Payload ID: 4929
  Gene Symbol: DACT3
  Gene Name: dishevelled-binding antagonist of beta-catenin 3
  ENST ID: ENST00000410105
  CDS Start-End: 75-620
gctggggcggggaggtgggaccgggagaggggtggccgcggggcccggccgggctggggcggggggccgcagccatgatccgggccttctcgttcccggtgagccctgagcggggccggctgcggggctggctggagggtagcctggccgggctctgcgagttacattggctccgggagaggcaggagtaccgcgtgcagcaggcgctgcggctggcccagcccggaatggggggcgccgaggccgaggacgaggaggacgccgatgaggatgaagatgcggcggcggcgcgccgggccgcagcggccctggaggagcagctggaggccctgcctggtctcgtctgggacctgggacagcagctgggagacctgagcctggagtctgggggcctggaacaggagagcgggcgtagctcgggcttctatgaagatcccagctctacaggaggtccagattcaccaccctcaaccttctgtggggacagtggcttctctggatccagctcctatggtcgcctgggtccctctgagccccggggcatctatgccagtgagaggcccaagtccctaggtaaggtgggtgagggtggggccctggggccagggaaaggacagtaggaggatggttgtgggcacagacttccgaatcgggcctggattccaattccagctgtgacatttccttttcacatggttatgagcaggtctcttatttctgggtctctgtttttccatctgttaaaatgaaatatggctgggtgcggtggctcacgcctgtaatcccagcactttgggaggtgggcggatcacttgaggccaggagattgagaccagcctggccaacatagtgaaaccccgtctatacaaaaattagttgggcgtggtagcgaacacctgtaattccagctactcgggaggctgaggtgggaggatcgcttgaacctgggaggtggaggttgcagtgagccaagattgtgccactgccctccagtctgggtgacagagcaagactctgtctcaaaataaataaataaataggctgggcacagtggctcatgcctgtaatcccaacactttgggaggccaaagcaggtggatcacctgagatcaggagttcgagaccaacctgaccaatatggtaaaatcctgtctctactaaaaatacaaaacttagctaggcgtggtgatgtgtgcctgtagtcccatctactctgaagactgaaacaggagaattgcttgagccctggaggtggaggttgcagtgagccaagatggagccactgcactctagccagggtgacagagtgagactccatctcaaaaaataaataaataaatataaaatggtataataacagtgcctcaatagccaggcattgtggtgcatgcctgtatcccagctacttgggaggctgagccaggaggattgcttgaacctgggaggcagaggttgcagtgagctgagatggtgtcactgcgctccagcctgggtgacagagcaagactctgcctcaaaaagataaaaataaaacaccaaccacacacacacacacacacacacacacacacacacacacacacacacaaacagtgcctgccctaaggggatatttttgaatattcagtgagcctctgctctaaggcattggacttggtgcatggcagtcactggtaaacaggaactgctgtcattcattcatacaagtaagtttttgagcccccactatgtgctacctagcagtatcccaggagcaatgaacaaaatgaacagtaatgaacaaaacaggcaaatccctgccctcaggaaactgccagcctagttggaggaatagataaaatacaggataaatggccaggcgcggtggctcatgcctgtaatcccagcactttgggaggccgagacgggcagatcacgaggtctggagttccagaccagcctgaccaacatggtgaaaccccgtctctacaaaaaatacaaaaattagctgggcgtggtggcgcgtgcctgtaatcccagctactcaggaggctgaggcaggagaatcgcttgaacctgggtggcagagattgcagtgagctgagatcatgccactgcactccagcctgggtgacagagcgagacttcgtctaaaaaataaataaataaataaataaataaataaatagataaataaataaaccaggataaataagtaaaatatctagggtacgaaataatgccatgtgctatgacaagaaataagccggggaaagggactcagaagtgtccctttgagtttggggagggaagtgcaattttagaaaatatggctggggagggcttcactgagactgtaacatttgagttgtgccctgaactaagtgggggagtggacctagcagatatccagaaggaagagcattccgggcatctggaatctggaatgggaagcagaaaggctctgaggccagaatgtgactggcgcctgctttcaggaggccagtgtggctggagtcctataagtagaggagaagggtcagctcagtggttcatgcctgtaatcccagcactttaggaggctgaggcgggaggattatttgagcctgggagctggagactagactgggcaacacagtgagaccccatccctacaaaaaataaaaaaatcagcagggcatggtgatgcgttcctgtagtcccagccgttcaggaagataaggcgagaggatcccttgagcccaggagctggaaactgcagtgagctatgattgcgccactgcactccagcctgggtgacagagcaagcaagaacctgtcttaaaaaaaaaaggccaggcgcagtggctcacacctgtaatcccagcactttgggaggccgaggcgggaggatcacgaggtcaggagatcgagaccatcctggcgaacacggtgaaaccccgtctctactaaaaatacaaaaaaattagccgggcgtggtggcgggcgcctgtagtcccagccactcaggaggagaatggcatgaacccgggaggcggagcttgcagtgagccgagatcgggctactgcactccagcctgggcgacagaacgagactccgtctcaa

SEQ ID NO: 127406 - DNA, 4762 bp, Homo sapiens
  Payload ID: 4930
  Gene Symbol: DISP1
  Gene Name: dispatched homolog 1 (Drosophila)
  Uniprot ID: Q96F81
  ENST ID: ENST00000284476
  CDS Start-End: 165-4739
attcagtctgtcctgccgctctgtggagctgcgcctgccaactcattgctttctgctgtgctgtgatcctgcagtcagttgccgctgttgctactgcaatcatttgcaccaaactgagccagagaagttccctcttttaacataaagagtcaagaaattggagcatggctatgagcaatggaaacaatgattttgtggttctgagcaacagcagcatcgcaaccagtgctgctaacccgagtcccctcaccccctgtgatggagaccatgcagcccagcagctcacacccaaagaagcaacaagaacaaaagtgagtccaaatggatgcctgcaacttaatggcacggtcaaatcatcctttctgcctttagacaaccaaagaatgcctcagatgttaccccaatgctgccatccttgcccataccatcaccctttgactagccatagcagtcaccaagagtgccatcccgaggctggccctgcagcaccctctgctttggcctcgtgttgcatgcagccacactccgagtattctgcatctctttgtccaaatcattcacctgtgtatcagactacgtgctgtcttcagccctctccatccttctgcctgcatcatccgtggcctgaccattttcagcatcagcctgtgcaacagcacatagccaacataagaccatccagacctttcaagttgccaaaaagttatgcagccctgatagccgactggccggtggtggtcttgggcatgtgcaccatgttcatcgtagtctgtgccttggttggagtattagtgccagagctccctgacttctctgatccattgctgggttttgaaccaagaggaacagcaataggccagagattggtcacatggaataatatggtgaaaaatacaggatacaaagcaacattagcaaattatccctttaaatatgcagatgaacaagccaaaagccatcgggatgatagatggtcagatgatcattatgaaagagagaaaagagaagttgactggaacttccacaaggacagctttttctgcgacgttccaagtgaccgatattccagagtggtatttacttcatctggaggggagacattatggaatttacctgcaattaaatcaatgtgcaatgtagataattccaggatcagatctcatccccagtttggtgatctctgccagaggaccactgctgcctcctgctgccccagctggacactgggaaactacatcgccattctgaacaatagatcgtcctgtcagaaaatagttgagcgagacgtttctcataccttgaagctgcttcggacttgtgccaaacactaccaaaatggcactctggggccagactgctgggacatggcagccagaagaaaggaccagctcaagtgcaccaatgtgccacgcaaatgtaccaagtacaatgctgtgtaccagatcctccattacttggtggacaaagactttatgaccccaaagacggctgactatgccacgccagctttaaaatacagcatgctcttctctcccacagagaaaggggagagcatgatgaacatttacttggacaactttgaaaactggaactcttctgacggcgtgactaccatcaccgggattgagtttggtatcaaacacagtttgtttcaggattatcttctaatggatactgtgtatcctgccatagccattgtgattgtccttttagttatgtgtgtctacaccaagtccatgtttatcactctgatgacaatgtttgcaataatcagttctttgattgtttcctattttctctatcgtgtagtatttcacttcgaattttttccttttatgaacctcactgccctcattattttggttggaattggagcagatgatgcttttgtcctgtgtgatgtttggaactacacaaaatttgataagcctcatgccgaaacctcagaaacagtaagcatcaccttgcagcacgctgccctctccatgttcgtcaccagttttaccactgctgctgccttttatgctaactatgttagcaacattacagcaatccgatgctttggggtttatgcggggacagctatattggtgaattacgttttgatggtcacatggcttccagcagttgttgtgctgcatgagcggtatcttcttaatatattcacttgcttcaaaaagccccagcagcaaatatatgataacaaaagctgctggacagtggcttgccagaagtgccacaaagtactctttgccatttcagaagcatctcgaatttttttcgaaaaagtattgccatgcattgtcattaagtttcgctacctttggctgttttggttccttgccttaactgtaggtggggcctacattgtatgtataaatccaaagatgaaactgccctcactggagttatccgagttccaggtgttccggtcgtcccatccttttgagcgttatgatgctgaatacaaaaagcttttcatgtttgaacgtgttcaccatggcgaggagctccacatgcccatcacagtaatctggggcgtgtccccagaagacaatggcaacccactaaatcccaagagtaaagggaagttgacattagatagcagttttaacatcgccagcccagcttcccaggcctggattttgcacttctgtcaaaaactgagaaaccaaacattcttttaccagactgatgaacaggacttcaccagctgcttcattgagacattcaaacagtggatggaaaaccaggactgtgatgagcctgccctgtacccatgctgcagccactggagcttcccctacaagcaagagatttttgaactgtgcatcaagagagctatcatggagctggaaaggagtacagggtaccatttggatagcaaaaccccagggccgaggtttgatatcaatgatactatcagggcagtggtgttagagttccagagtacctacctcttcacactggcttatgaaaagatgcatcagttttataaagaggtggactcgtggatatccagtgagctgagttcggcccctgaaggcctcagcaatggttggtttgtcagcaatctggagttctatgacctccaggatagcctctccgatggcaccctcattgccatggggctgtcagttgctgttgcatttagcgtgatgctgctgacaacttggaacatcatcataagcctttatgccatcatttcaattgctggaacgatatttgtcactgttggttctcttgtcctgctgggctgggagctcaatgtgttggaatctgtcaccatttcggttgccgtcggcttgtctgtagactttgccgtccattatggggttgcctaccgcttggctccagatcccgaccgagaaggcaaagtgatcttctctctgagtcgcgtgggctctgcgatggccatggctgccctgaccaccttcgtggcaggggccatgatgatgccctccacagttctagcttacacccagctgggcaccttcatgatgctcatcatgtgtatcagttgggctttcgccaccttctttttccagtgcatgtgccggtgccttggaccacagggtacctgtggtcagattcctttacctaaaaaactacagtgcagtgccttttcccatgccttgtctacaagtcccagtgacaagggacaaagcaaaacacataccataaatgcttatcatttagatcccaggggcccaaaatctgaactggagcatgagttttatgaattagaacctctggcttcccacagctgcactgcccctgagaagaccacttatgaagagacccacatctgctctgaatttttcaacagccaagcaaagaatttagggatgcctgtgcatgcagcttacaacagtgaactcagcaaaagcactgaaagtgacgctggctctgccttgttacagccccctcttgaacagcataccgtgtgtcacttcttctctctgaatcagagatgtagctgcccagatgcctacaaacacttgaactatggcccacactcttgccagcagatgggggactgcttgtgccaccagtgctctcctaccactagcagctttgtccagatccaaaacggcgtggcacctctgaaggccacacaccaagctgtcgagggctttgtgcaccccatcacgcacatccaccactgtccctgcctgcagggcagagtaaagccagccggaatgcagaattctctgcctaggaattttttcctccacccagtgcagcacattcaggcccaagaaaaaattggcaagaccaatgtacacagtcttcagaggagcatagaagagcatcttccaaagatggcagagccatcgtcatttgtctgcagaagcactggatcgttactcaaaacgtgttgcgaccccgagaataaacaaagggaactctgtaaaaatagagacgtgagcaatctggagagcagtggagggactgaaaacaaggcaggagggaaagtggagctgagcttgtcacagacggatgcaagtgtgaactcagaacatttcaatcagaatgaaccaaaagtcctatttaatcatttaatgggggaggctggttgtaggtcttgcccaaataattcacaaagttgtggcagaattgtgagagtgaagtgcaattctgtggactgtcaaatgccaaacatggaagccaatgtgcctgctgtattaacacactcggaactttctggtgaaagtttgttaataaaaacactataataaatgcagcattcaattcagaa

SEQ ID NO: 127407 - DNA, 12614 bp, Homo sapiens
  Payload ID: 4931
  Gene Symbol: DISP2
  Gene Name: dispatched homolog 2 (Drosophila)
  Uniprot ID: A7MBM2
  ENST ID: ENST00000267889
  CDS Start-End: 88-4293
cgccgccgctgccgccgccaccgccgccgccgccgccgccgccgcggcttcagcaccagcgcccggacagcggtgccgcccacgggcatggacggtgacagcagcagcagcagcggcggcagcggtccggctcccggcccgggtccggaaggggagcaacggcccgagggggagcccttggccccagacggcggctccccggacagcacccagaccaaggctgtgccccctgaggcaagcccagagagaagctgctccctccacagctgccccctggaggacccttccagctcttcaggacccccaccaacaacttccaccctccagcctgtgggtccatccagccccttggcccctgcccacttcacctatccccgggcactgcaggaataccaggggggcagttccctgccaggacttggggatcgggcagctctctgctcccacggctccagcctcagcccttctccagccccctcacagcgcgatgggacctggaagccacccgctgtgcagcaccatgtggtcagcgtcaggcaggaacgagccttccagatgccaaagagctattcccagctgattgctgagtggccagtggccgtgctgatgctgtgtctggctgtcatcttcctctgcaccctggctggactgttgggggcccggctgcccgacttctccaagcctttgctgggctttgagccacgggacacagacattgggagcaagttagtggtctggagagcactacaagccctcacaggccccaggaagctgcttttcctttccccagaccttgagctgaacagctcgagctcccacaacactctgaggcctgcacccagaggcagtgcccaggagagcgctgtccggcctcggagaatggtggagcccctggaggacagaaggcaagagaacttcttctgtggcccccctgagaagagctatgcaaagctggtgttcatgtccacctcctcgggcagcctatggaacctgcatgccatccattccatgtgtcgcatggaacaggaccagatccgctcccataccagcttcggggctctgtgccagcggacagcagccaaccagtgctgccccagctggtccctgggcaactatctggctgtgctctccaaccgctcctcctgcctggacactacccaagctgacgcagcccgcacactggccctgcttcggacctgtgccctctactaccacagtggcgccttggtgccctcttgtctgggacctgggcagaacaagtccccacgctgtgcccaggttcccaccaagtgctcccagagtagtgccatctaccaactcctgcactttctgcttgacagggactttctgagtccccagaccactgactaccaggtgccttccctcaagtacagcctgctcttcctgcccaccccaaagggtgcttccctcatggacatctacctggaccggctggccaccccctgggggcttgctgacaactacacctctgtcactggcatggacctgggcctcaagcaggagctgctgaggcacttcctggtccaggacacggtgtaccccttgctggctctggttgccatcttcttcggcatggccctgtacctgcgctcactcttcctcacgctcatggtgctgctgggggtgctgggctcactgctggtggccttcttcctttaccaggtggccttccgcatggcctacttccccttcgtcaatctggcagccctcctcctgctgagcagcgtctgcgccaaccacacgctcatcttcttcgacctgtggcgccttagcaagagccagctgccgtcgggggggctggcgcagcgcgtgggccgcaccatgcaccacttcggctacctgctgctggtctccggcctcaccacgagcgcggccttctatgccagctacctgagccgcctgccggccgttcgctgcctcgccctcttcatgggcacggctgtgctggtgcacctggcgctcacgctggtctggctgcccgcctccgccgtgctccacgagcgctacctggcgcgcggctgtgcgcgccgggcgcggggccggtgggagggcagcgcgccccggcggctactgctggcgctgcaccggcggctccgcggcctgcggagggcggcggctggcacctcgcgtctgctcttccagcgcctgctgccctgcggcgtcatcaagttccgctacatctggatctgctggttcgcagcactggcggcagggggcgcctacatcgccggagtcagcccccgcctgcggctgcccacgctgccgccgcccggcggccaggtcttccggcccagccaccccttcgagcgcttcgacgcggagtatcgccagctgttcctgttcgagcagctgccgcagggcgagggcggccacatgcccgtggttttggtgtggggcgtcctgcctgtggacactggcgaccctctggaccctcgtagcaacagcagcctggtgagggaccctgccttctcggccagcggccctgaggcccagcgctggctgctggcactctgtcaccgggcccggaatcagagcttcttcgacaccctgcaggaaggctggcccacgctgtgtttcgtggagaccctccagcgctggatggagagccccagctgcgcccgcctggggcctgacctctgctgcggccactcggacttcccctgggccccccagtttttcctgcactgcctgaaaatgatggctctggagcaaggccccgatggcacccaggacctgggactccgctttgatgcccatggcagcctggccgccctggtcctacaattccagaccaacttccggaacagtccggactacaaccagacccagctcttctacaatgaggtcagccactggctggcagcggagctgggcatggcacctccaggcctccgccgtggttggttcactagccgtctagagctgtatagcctgcagcacagcctgagcactgagcctgctgtggtgctgggcctggctttggcgctggcctttgccacactgctcctgggcacctggaatgttcccctcagcctattctccgtggcagctgtggcaggcaccgtgctgctcactgtaggactcctggttctcctcgagtggcagctcaacactgccgaggccctgtttctctctgcctcagtgggcctctcagtagacttcactgtcaactactgcatctcctatcacctgtgcccacaccctgaccgcctgagccgtgtggccttctctctgcgccagaccagctgcgccacagccgtgggggctgcagccctgtttgcggcaggcgtgctcatgctgcctgccacagtgctgctctatcgcaagctgggcatcatcctcatgatggtcaaatgcgtcagttgtggctttgccagcttcttcttccaatctctctgctgtttcttcgggccagagaagaactgtgggcagatcctctggccctgtgcccacctgccatgggatgctggtactggggaccctggtggggagaaggcaggccgcccacgaccagggtcagtgggagggatgcccgggtcctgctcagagcaatatgagctacagcccctggcacggcgtcggagccccagctttgacaccagcacagccaccagcaagctgtcccaccggccctcagtactctctgaggatctgcagctccatgatggtccgtgctgttcccggcccccaccagcccctgcctccccaagggagctgctgctggaccaccaggcagtcttcagccagtgccctgccctgcagacctcctccccctataagcaggctggccccagccccaaaacccgggccaggcaggactcccaaggggaggaggctgagcccctgccagcctcaccagaagccccagcccactctcctaaggccaaggctgcagatcctcctgatggcttctgttcctcagccagcaccctggaggggctcagcgtctctgatgagacctgcctaagcacctctgagcccagtgcccgtgtaccagattccgtgggtgtgtccccagatgacctggatgacactgggcagccagtccttgagcgaggccagctcaatgggaagcgggacaccctgtggctggcgctgagggagacagtgtatgacccatcattgcccgcttcccatcacagcagcttgtcctggaagggccgaggggggccaggggatggcagccctgtggtgctgcccaatagccagccagacctgccagatgtttggctgcgcaggcccagcactcacacgtcaggctatagcagctgagggggacccggggaggctggacagggcgcggaaccctgtcatggatgacaaggcaagggcagcaataggctggagcccgaaggtatttctccagatccacagggagaggtctcaccctccagctgtggatgttaaaccctgccagatgtcccagccttgatctgtctgctcctactcctcacatctggaggattccagcaggaggggttttggaggggacctgcttgcgacctgctgagggcttgtctgctcccacagcaccatctaagacccctcctctagaagtggggaaggccagatgtgtagcttcgggtatcagaggaggctgacctggcccccatcccaagttacaagaacttcagtgagactaagggacccccatcctagggatcttgtcagggttccttactgaccagaggagcccgcagcaatctccacagcctcctgggtctcacccctttcatgggctcttcatcaggacacttccctctcttttgggagcttctctgggcagaattgggctgggacctctctccccaactgccctgctctcctcatactcaccggtttgaccagaaattctccaaatccagccatagatggctgctgggtgtgcagcaggagaaggaggatggtcagccttggagcatctctcaattacgggacagtccctctttggaagcaggctcctgtgctttcctgtgttaataaacagtaataatcctttccatctctgcacattttagtctccttggaatctatctcactacttcactacagggtagcctgacattggtcaggttcttttgacacccaatttataggtaaagacattgagactaagtaagatgaactgacctcagggtcacttagccactaaatggcagagcggtttcattccaccactacaacctccagtttccctttggctacctgccttctttcaccgctagcaccctcctccaatctgctttctctggtgtctctgactgaatccagccaccctctttgggcctccacttcctgagagagctgtattccaaaaaaacccaggagttcctctccatctcccccgtgcctccctctggaatctggctgagatgtctgctggccctggggcgtcctagctgacctgattcccaggcttcaggaccgtgcctcttctacagccacagtgtataagaggccccaccagaagaggtactgaggggcagaagaggtgaagccaaatccaatcaaggcaggaactcagacctgccctttgggaagtgtatgagtctgaagctgcttcccaggttagggtccccagctttttaaggacaagtctctctgtggagcgttaagcagaccaaaggctggttcctccttcccaaacttcctggtagggaagttttatcccatgtgagagctcatgacaccaggtggcatcaacatgtttattgaacacctactttgcatatggtattacaaggggacagaggtgtggaagaaaaattgaacaccaccctcaaagagctcaccttctagctggggagacagcttatgcacacatgcaggcatcggatggctcacggacggcaccatatgcctgccatcatcattattgttggagctcaagtacccaggactgggtaacaagaaaggctttctggaggaggaaaaacttgagctgggcttcagaagaccaagcgtctcagactggaaggggccttggcgatcgtttattccagcagttttcaaattttgtagcctcaggactctttcttcaaagaagctctgtgtggaaaaacaatatataaaacaggtaaaaggcagctactctggtgggcgctgggtgttgggggtggagtcagcttagcctgtctttccactgcagcctctccgggtatctggggaacccctccggctcctggcagcttcacagaatgtaatatgaaagctactgatccaggctattttacagaggagtatcaggaaagggaagggattgttctagggccaaatagtctgtggcagagctggaggcaaatcagatgatgtttttgttttatttagttttttattattgagacctacttcctactccaagtagcccatgagaagtggagcagaaaccgaaaagagacatgggagttgtggaagagacagaaggcaataggcaggtacggcaggataccttggctcctttgcaagataagtaaatcaagatgagtaactcctgacaccaggaaggggaagctggaacctaatttgaacctgtccccagggggtctgctgggacctctctcttcatgtccaggtagcattcggcctctctgacctagagctgctcatcagccctggtttctctgataatggtgtccctctgtcatcatgcagccaggctgagagagccctggtatcctcagggacaatgagccacagggaggttaagggaactcttcctcccaagcatgagcagaagacactttgcctgaacataaccactgaaatgttagaatgcagaggggtggatgggtgggcatgagggatctgagcacacccgagggccctacctggggatttccaggtcatattcttgcaggctgtggccacacaacacttcaggaaggtgaatgagccatagcagctgatgcattgattagatttgttctttatgttgccaggcccagaagaacccagcagtaatctaaaacattaccttatacctagaatggcccaaaccaacagcaggcaatccacatcagcaggaaatccagcctgcctctctagccctgactttggaatgtggaacttaaagcacttcctatttcctttgagttgcagcagatcctttgctttattattattaggggcacttacaatgagtgtatggccctggagacatggcttacaagcacgctgtgaggcgtacaaaaatgagtcaaagcacttatgcttgccctgcaaaattcaagaaatgatttctccccactcagacactctaatagaactacattaacatttggaacttgaggtcatttcccctatttgtgccactgatccttgaactcacattctgagtacgagtatgtatcctgtatgctattaaaatataacttgaggccggacatgatggctcatgcctgtaatcccagcactttgggaggctgaggcaggtggatcactagacgttaggagtttgagaccagcctggccaacatggtgaaaccccgcctctactaaaaatacaaaaattagttgggcgtggtgggggatgcctgtagtcctagctacccaggaggctgaggcaggaaaatcatttgaacccgggatgcagaggttgaagtgagccgagatcgtgccactgcactccagcctggatgacagagcaagacaccgtctcaaaaaataaataaataaataagtcgggcacggtggctcacgcctgtaatcccagcactttgggaggccaaggcaggtggatcatgaggtcaggagatcgaaaccatcctggctaacatggtgaaaccccgtctctactaaaaatacaaaaattagccgggtgtggtggcgggcgcctgtagtcccagctactcgggaggctgaggcaggagaatgatgtgaacccaggaggcagagcttgcagtaagccgagattgcgccactgcactccagcctgggcaacagagcgagactccatcttaaaaaaaaaaaatatatatatatatatatgtaaacttgatatagtctgttaccatgggaaaaccatccttccatggctgtggtgatttggggacttttagagtgacagtgttagacagactgattttattggctgaatcttagattttactgatatatagcatatcccataccatgatatgcgggcaatattccagcttgagacaattttttttttttttttttgagacagagtcttgctctgtcgcccaggctggagtgcagtggcacaatttcggctcactgcactaattttttgtatttttagtagagacagtagagtatttttagtgttagccaggatggtctcgatctcctgacctcatgatccgcctgcctcggcctcccagagtgctgggattacaggcatgagccaccgcgcctggccgagacaatttttaaaaagacatttctcaagagagttataagccaaaatttccctagccccctccaactcattctgtccttctcccagtgcatgtcaggacagggaagaaggctttaaatcagattttaagaaagaggatacattggtttacaacctttgcctatcgtccagagagtttctgatcttttctttttttttgagacggagtcttgctctgtcgcccaggctggagtgtagtggcacgatcttggctcactgcaagctctgcctcccaggttcacgccattctcctgccccagcctcccgagcagttgggactacaggcacctgccaccacgcctggcaaattttttgtatttttagtaaagacggggtttcattgtgttagccaggatggtttcgatctcctgaccttgtgatccgcccacctcggcctcccagagtgctgggattacaggtgtgagccactacacccggccctgatcttttctttgacggtggcagtatctcattttttgataatacacatgggtaatggcaagctcttgggaccccatgccaagcatcaagatcccatttacctggtgataggaaagacagacattcctcaccctttctacccacacccttgttcacagggatgactgtaactaaggtctgcaggtatttatgcttaggagaagaaatcgtagttcaattcaccaggaatatgagaaacaaaagaaagccactatgtgctatgtaaatgtctggccatccaaagccaccttatgcagaggaacactggaagggccttgataaatttctcataattattatcgggcctctttgtgattactcacatttttctcaatataggggaaagatcagcattttaccaaatccacaaccatcaaacaaacaagagctttaatattgctaaagaaaatcacacagctgagcagattgatgtagatttgaattcatgaccacctatcttaactggaccctcagctctgcctagctagtattcattctagctactagttttgattatttgtattgactcttttatattttctccaccttcctcaaatatctcaccttcccccacccctcagtggacaaaaaaaaaaaaaaaattcttcatgaagaaaactgaagccttcaaatagaaatttcctcaccttcaaggcaccaaagccacaacttacctacccccgctcctgcctgctcctctccccatcccttctgctacaacgaaggaagcagtaatggctccatcaatggcttctcacacttggtgtcagaggccttcacacgagggtttgcactcccctacaaggacatgaagactttctagaaggtaggtggacacagatagttttaaagtaatcagtttccagagccgccttctccatatgttcccctccttatattggtgggcctaagaagccacaggcctgacagctgtccttcccaacttccactttcccagttgcctcccctccctcattctgaatcctactctggctccttgctctgcgctgtaaaaaacaaataaaagggccacttgagaatgctctgcttgaggaagtccttgaaagagcaaagcctggagagcttctttgagaaagttcacaggggcagccctgtggctcagttctgtgccttcttcatttaagaattcaaattcattgacatgttatattgtaaaatatataaatatatattaaaaaggaaaaaataataaaaatttttaaaaataattcaacttcaggtgagacacagtggctcatgcctataatcccagtgttttgaaaggctgaagtgggaggatggcttgaggccaggagtttgagaccagcttgggcaacatagcaagatcccgtatctacaaaaaataattttaaaaattagctgggcatgggccgggcgcggtggctcacgcctgtaatcccagcactctgggaggccgaggcaggtagatcatctgaggtcaggagttcaacaccagcctggccaacatggcaaaaccctgtctctactaaaaatacaaaaattagccgggcgtggtggagcatgcctgtagtcccagctactcaggaggctgaggaaggacaatcgcttgaaccctggaggcagaggttgcagtgagccaagatcatgccattgcactccagcctgggtgacagagcgagactacatctcaaaataaataaataaataataaaataaaaataaaaattagctgggcatggtgatatgcgcctgtagacccagctactccagaggctgaagcaagaggatcacttgaactctggagttcgaggttacagtgagccataatcacattatggcactccagcctggcaacagagcgagaccttaactctaaaaaaagaaataaagaagaatttaaactgaaagtgagatggttgacacaggatacatattaaccacattgatttgaatggaaaaataaaatcagactttttctgttagaaggtcagaattggctcacaggtttgacagagaggatagtctttgcaagtaggatgtatggtggacattttccctaaaatggaataactttaatctgcagctccacagtttgaacaaaaacagactgaaggctgggcgtggtggctcatgcctgtaatcccaacactttgggaggcctaggcgggcagatcacgaggtcaggagatcgagaccatcctggctaacatggtgaaacctcatctctactaaaaatacaaaaaaatagctgggcgtggtggcgggcacctgtagtcccagctactcaggaggctgaggcaggcgaatggcgtgaacccgggaggcggagcttgcagtgagccgagattgcgccactgcactccatcctgggcaacagagtctcaaaaaaaaaaaaaaaaatttttgactgaaagtacagatacaacttccctttccagccaagatggaggagcaggggccaagtttatcctcctgcctgaaacaaccaaccaaacagtaaatacatgaaataatgagtttcaagacactggacatgaggtaacaaaagacagtgatctctcagaggcaagaaacaaacaaggagaacccctcggttgcccagcttaccgcttgagaggatgtatttcacggagggagaacccaggcaaagcaagtgactctgaggtgaggggatagctgggagtgtggagcagccaagctggctagagtgctcaggacagggtactggagaggagaaaggtggatatatagagaattctggggatctgcaaagggccccccttgagtgttccacagagcatgattcatcatataagtgtaaggaaaccacttgagacaaaggaaaggaccacccaaaacaatgggccggaacagtagccagaagtcacacacagcctggaccacgcctgtccccatcagccagattggaaaacctcaaatttatggagcattggtcagaggtctcagaagggccttgcctcgtagtggggattcattagccctagtttaaacattgctggaacctacctaacaaatctcaaaagcaagacctgaattcaggaatcaagctgtttctaagtaactgaagtgtatcccagaacaaaacccaagaacattaacagaaatccaaaattaacgagcacccaaaaatgtaaaattcacaatggctggttttccaataaaaaattaccagtcatgcaaactataacccatcataaggagaaaaatcagttgaaaccactacagctgacacctatgtgagaattagacaaggacactaaaagaattattataactgtattccatatgtactaagtagagactaggaagatatttttaaatacccactttgaattttagagacgaaaactaaaatgtctgagatgatggggtgggtggggtaggcagaaagaggaggatgggaagaagtaccaaggggaaggaggaatgatttggggatgacggctgtgtttattatcttaattgtggtgatggtttcacaggtatatgtaatttctaaacttatcaaattgtacacttaaaatatgtggtctatggaatgttaattatatctcaataaagctgttaaaattgtactgaaacaaaaccattgggggaaactgggtaaagagtccaaaggacctccctatactatcattgtaacttcctgtcaattataacgattccaaaataaagaatttaaaagtgt

SEQ ID NO: 127408 - DNA, 1037 bp, Homo sapiens
  Payload ID: 4932
  Gene Symbol: DIRC1
  Gene Name: disrupted in renal carcinoma 1
  Uniprot ID: Q969H9
  ENST ID: ENST00000308100
  CDS Start-End: 272-586
tgacatgggcagagtttctcttgcccttaaagtcttactttccacttctaaataccttccaagatgttttcctccacaaacacaatatcttccttaaaagatagaccctgcatcagttgttaagctaacacatctttctcctcactacaaatgtatcactattgaatttctctccacaagtgtgaagatggctggagtagaaattctggcattgcttctcatcaccagaaggaaaaattcagagaaacagcccgaccacccaccctgacaaatgcctgaggcccacatgcagcctgcaaaactgcaaacatcactgcccaccacagaccacggaagcaagaagcctgtttcctgttacttgccaccactcagcaatgcccaccccatgtgtatagaggtccagaatgctcaaaattgttcttctgctgctgcaacattggagccttccatcatctcagacacatgcttttataaaccaataacaaaggatcaactttcttctaggtctgaattgaatactgtgaggctaaagtgtcttaactcattgagggggtggaaaatattaaaccaactaagccttacctaattacaatgccctgctgctgctcatctccctttattcgtttgtactcatactcaaaagaggttgtgtttttttcccttcattcaataacgattttccttgattcttagataagtccattccataatgtactccttaactgttctgaatttctttcagagaaaaactggaaaagacattaaatcatgttgaaatatttgactgactttcatctaggaaaaaatataaagttaaatctctacactaaaatataaacaaaataaaaagaaatttcagtaagaccaaaacatttacttttaaaaacctatatcatgttatatgtataactgaggaatgtaatcataattttgatttgtagaactgaagacaatatcaagtaaccctcaaaatgtaaattcaagaaacaaggtagttacgttagcctgcattaaaataaaaatatctgtgtgacaat

SEQ ID NO: 127409 - DNA, 3596 bp, Homo sapiens
  Payload ID: 4933
  Gene Symbol: DIRC2
  Gene Name: disrupted in renal carcinoma 2
  Uniprot ID: Q96SL1
  ENST ID: ENST00000261038
  CDS Start-End: 399-1835
tttaacttggacacttcctccaaacaccccagggttccttgcccaacctcctcgaatacagcctctctgggagtttccctctccccgactcagccgcgctggtccctgccttttcagcgctacctgccctccgtctgggacctggctcctttcctctcgccggtgtttcctcgccacccgcggaggggagggcggaccccagcctccttgccgcctgccccgcctccccgcctccccgccggcccggctcgggccgcgcaggcgcaccaggcgcggtccggaggccgagggcgaccacagcagcctccgcctcctgctgctcaggactattctgcgctgggctagtcggcggtgacccggactgcgcccggcagtggcttcgcgggcgacgcgtcgccatgggctctcgctggagcagcgaagaggagaggcagccgctgctggggcccgggctcgggcctgggctgggggcctcctggagaagccgggaggcggcggcggcggcgctgcccgcggcggtcccgggtcccgggcgggtatacgggcgccgctggctggtgctgctgctcttctcgctgctggcgttcgttcagggcctggtctggaacacctggggtcccatccagaactcggcgcgccaggcctacggcttctccagctgggacatcgcgctgctcgtgctgtgggggcccatcggcttcctgccctgcttcgcgttcatgtggctcctggacaagagaggtctccggataactgtgctcctgacatccttccttatggttttgggaactggtctaagatgcatacctatatcagacttaatccttaaaagaagattaattcatggaggacagatgttaaatggattggcaggtccaactgtaatgaatgcagcaccatttctctctacgacgtggttttctgcagatgaaagggccacagccacagctattgcatcaatgctcagttatcttgggggagcatgtgcatttttagttggaccacttgttgttccagctcccaatgggacatcacctcttcttgctgcagagagcagcagggcgcatattaaagatcgcatagaggctgtgttatatgcagaatttggagttgtctgcttaatattttctgcaacactagcttatttcccaccccgacctcctcttcctcccagtgttgctgcagctagccagcggctgagttatcggagaagcgtttgtagattattaagcaattttcgatttttgatgattgctttagcatatgccataccacttggtgtatttgctggctggtctggagttctggacttaattttaacaccagcgcatgtcagccaagtagatgctggctggattggattttggtccatagttggaggctgtgttgttggaatagctatggcaaggtttgcagattttatcaggggtatgctgaaactaattcttctcctcctgttttcgggagctacactgtcatccacgtggttcaccctgacctgtttgaacagcatcacacacctacctttaaccacagtgacattgtatgcctcctgtattctcctgggagtgttcttgaatagcagcgtgcctatattttttgagctttttgtggaaactgtctacccagttccagaaggaattacttgtggagttgtcacttttttaagtaatatgtttatgggagtacttttattttttctcacattttatcatacagagttgtcttggttcaactggtgccttcccgggtcgtgtttgctcagtctcctcctcattctgtgcttcagggaatcctatgacagactctatcttgatgtggttgtctccgtttaatagcacagacttgaaggagtttaaaaggaggctggaaatcaatactgcacactgcacatttgctcagaattgcacatctaacaggaaaagagggagaagaaagaaacttcattcagaggttttgttaggttacagattatcacattaatttaattactactaggtaataataatgggagacttgagtgataataggggattttaaaactctacagatggcatacctgtgcctgcttctggggttggaagtgtgacttcttacacataaagcactacctaagtaattctctctctgttttgtgccagtgctaaactactgattacttgtaattatgaaaagaaataaagggtgtctatcatatgaagataacgccttccctaagtcacatatcagaataggaagatatgccactaacttctaaagaagttcaaaccctgtatccaattttaatgataaaatagccaagaggtatatcgatgatggaaattagccacatgtacactacattttttctaataaagccatttcttatatgactccttattttaatcaggtcagaagcccttggccatctttactatggtgatcaggtgctttccagtgacttctgagcataggcactgtgtctccatctcaacttatccttgtttctgtgaaatacaatttcatctactaggcccttaaataattatgtgagggtgtctaaatgtttaatatgattacattaaatattgtatgaaaaaatgtaattccattaggatctagcactttgttacaagtgaaatgacaagtcacatggacatactgtgtcttctgcctgtatatggtggcatgagatgtaatgtccagagccaacaattatttaccagggttagattttattcagtgacccttgtttaaaaataataatttatcacattgaaactttcagctctgtcgaatgatttctgaattacatcctgtgtttcagcttaggttgtaaaatactccgttctctgtggagtcagcatatttgagagggcagcgttttgccagtacctatcttctttctacagaagatagctttttaagaaataagagttccacattgagtggctgtcagacacagatttcactgtgacgtaaaatacactgcagtgagaatatggtatcaccactattcatatttacatcattcccctcacacagaaaaaccaacccttttcccaaaaagtcaagaatactgctatacctttattattctcagcttcctccagcccttcttgtttttcctcacttgaaattgaaccttcattgtcagctaagtatatatacttttgtgttttcctggacagagtgcaagtggctcttatcagccaaggtggtgaaggttcaggaaagctgggcagcactgggccctgctcctctctgcacctgtgtgcgccatgacacacccacatgcagattcccaagtctgtctcccctcccccttagcaagtacaaggctgtgcattaactcacctcggtcctagaggagtatcctagtactgcttggcaacttctaagaccctaacttgtgaaactagggaagtaagaaaccgttcaaatttaacatctgtcttcagtcatctttaaatcgtctctctttataaacactctgctcacttagcagaaggactgaaggaactaaggaacttgctaaagagaagaagaaaacaaaagctagacttagttccagttaattctgttattcttctgaaataaaaatgaaataaaaggaa

SEQ ID NO: 127410 - DNA, 1822 bp, Homo sapiens
  Payload ID: 4933
  Gene Symbol: DIRC2
  Gene Name: disrupted in renal carcinoma 2
  ENST ID: ENST00000477647
  CDS Start-End: 110-457
ggcgaccacagcagcctccgcctcctgctgctcaggactattctgcgctgggctagtcggcggtgacccggactgcgcccggcagtggcttcgcgggcgacgcgtcgccatgggctctcgctggagcagcgaagaggagaggcagccgctgctggggcccgggctcgggcctgggctgggggcctcctggagaagccgggaggcggcggcggcggcgctgcccgcggcggtcccgggtcccgggcgggtatacgggcgccgctggctggtgctgctgctcttctcgctgctggcgttcgttcagggcctggtctggaacacctggggtcccatccagaactcggcgcgccaggcctacggcttctccagctgggacatcgcgctgctcgtgctgtgggggcccatcggcttcctgccctgcttcgcgttcatgtggctcctggacaagagagattaattcatggaggacagatgttaaatggattggcaggtccaactgtaatgaatgcagcaccatttctctctacgacgtggttttctgcagatgaaagggccacagccacagctattgcatcaatgctcagttatcttgggggagcatgtgcatttttagttggaccacttgttgttccagctcccaatgggacatcacctcttcttgctgcagagagcagcagggcgcatattaaagatcgcatagaggctgtgttatatgcagaatttggagttgtctgcttaatattttctgcaacactagcttatttcccaccccgacctcctcttcctcccagtgttgctgcagctagccagcggctgagttatcggagaagcgtttgtagattattaagcaattttcgatttttgatgattgctttagcatatgccataccacttggtgtatttgctggctggtctggagttctggacttaattttaacaccagcgcatgtcagccaagtagatgctggctggattggattttggtccatagttggaggctgtgttgttggaatagctatggcaaggtttgcagattttatcaggggtatgctgaaactaattcttctcctcctgttttcgggagctacactgtcatccacgtggttcaccctgacctgtttgaacagcatcacacacctacctttaaccacagtgacattgtatgcctcctgtattctcctgggagtgttcttgaatagcagcgtgcctatattttttgagctttttgtggaaactgtctacccagttccagaaggaattacttgtggagttgtcacttttttaagtaatatgtttatgggagtacttttattttttctcacattttatcatacagagttgtcttggttcaactggtgccttcccgggtcgtgtttgctcagtctcctcctcattctgtgcttcagggaatcctatgacagactctatcttgatgtggttgtctccgtttaatagcacagacttgaaggagtttaaaaggaggctggaaatcaatactgcacactgcacatttgctcagaattgcacatctaacaggaaaagagggagaagaaagaaacttcattcagaggttttgttaggttacagattatcacattaatttaattactactaggtaataataatgggagacttgagtgataataggggattttaaaactctacagatggcatacctgtgcctgcttctggggttggaagtgtgacttcttacacataaagcactacctaagtaattctctctctgttttgtgccagtgctaaactactgattacttgtaattatgaaaagaaataaagggtgtctatcatatgaagataa

SEQ ID NO: 127411 - DNA, 552 bp, Homo sapiens
  Payload ID: 4934
  Gene Symbol: DIRC3
  Gene Name: disrupted in renal carcinoma 3
  ENST ID: ENST00000423123
  CDS Start-End: 104-499
atatgtgtccaggtgcctacgcaggtgcctgaccctgggcaagtcgctccgtcatgcggacctcagttttctcatctgtccgacgaaggaatccgggcagaacatgaattctcagaactggtgggactttccaaccagttgcttctcatgcagaggcagaaaaatgaggggatcaacagcccaggcctcaggggcacccttcttggcccttacagtcctggatcaagaatctgtcattcagattattccagagcccctgccccagttctacttatgcctcctggatgctgagctgacaggcgtggtgagggggggtgaagatgcctctgctactcctagatccttgagccactccctggccaactgtatgatctctgaaaatggattggtttccagattgacagccttggaaactggactcctctgtttttcctgcaaacaggtatcgcctgtgagctgcaggtggaggcagaacatggtgttcaagcccaactcctgattctccacggcttggggtaggtgtgggagggtgagggaacattgggaatgcca

SEQ ID NO: 127412 - DNA, 2706 bp, Homo sapiens
  Payload ID: 4935
  Gene Symbol: DISC1
  Gene Name: disrupted in schizophrenia 1
  ENST ID: ENST00000295051
  CDS Start-End: 54-1697
ggaaggagcaggaggcagcccaggcggagcgggaggagctggcagcggggcgcatgccaggcgggggtcctcagggcgccccagccgccgccggcggcggcggcgtgagccaccgcgcaggcagccgggattgcttaccacctgcagcgtgctttcggaggcggcggctggcacggaggccgggctacatgagaagctcgacagggcctgggatcgggttcctttccccagcagtgggcacactgttccggttcccaggaggggtgtctggcgaggagtcccaccactcggagtccagggccagacagtgtggccttgactcgagaggcctcttggtccggagccctgtttccaagagtgcagcagcccctactgtgacctctgtgagaggaacctcggcgcactttgggattcagctcagaggtggcaccagattgcctgacaggcttagctggccgtgtggccctgggagtgctgggtggcagcaagagtttgcagccatggatagttctgagaccctggacgccagctgggaggcagcctgcagcgatggagcaaggcgtgtccgggcagcaggctctctgccatcagcagagttgagtagcaacagctgcagccctggctgtggccctgaggtccccccaacccctcctggctctcacagtgcctttacctcaagctttagctttattcggctctcgcttggctctgccggggaacgtggagaagcagaaggctgcccaccatccagagaggctgagtcccattgccagagcccccaggagatgggagccaaagctgccagcttggacgggcctcacgaggacccgcgatgtctctctcggcccttcagtctcttggctacacgggtctctgcagacttggcccaggccgcaaggaacagctccaggccagagcgtgacatgcattctttaccagacatggaccctggctcctccagttctctggatccctcactggctggctgtggtggtgatgggagcagcggctcaggggatgcccactcttgggacaccctgctcaggaaatgggagccagtgctgcgggactgcctgctgagaaaccggaggcagatggaggtaatatccttaagattaaaacttcagaaacttcaggaagatgcagttgagaatgatgattatgataaagctgagacgttacaacaaagattagaagacctggaacaagagaaaatcagcctgcactttcaacttccttcaaggcagccagctcttagcagtttcctgggtcacctggcagcacaagtccaggctgccttgcgccgtggggccactcagcaggccagcggagatgacacccacaccccactgagaatggagccgaggctgttggaacccactgctcaggacagcttgcacgtgtccatcacgagacgagactggcttcttcaggaaaagcagcagctacagaaagaaatcgaagctctccaagcaaggatgtttgtgctggaagccaaagatcaacagctgagaagggaaatagaggagcaagagcagcaactccagtggcagggctgcgacctgaccccactggtgggccagctgtccctgggtcagctgcaggaggtcagcaaggccttgcaggacaccctggcctcagccggtcagattcccttccatgcagagccaccggaaaccataaggaggtgtgtatgagtgagaaattctgcagcaccctgaggaagaaagttaacgatattgaaacccaactaccagccttgcttgaagccaaaatgcatgccatatcaggaaaccatttctggacggctaaagacctcaccgaggagattagatcattaacatcagagagagaagggctggagggactcctcagcaagctgttggtgttgagttccaggaatgtcaaaaagctgggaagtgttaaagaagattacaacagactgagaagagaagtggagcaccaggagactgcctatggtaggtagtgcacaactgttccccggcaagatattgatgatatttgttgtgttttgtggccaggcagaatgttctgtgccttatgtgaacgtcactgtgaagagcgtcatggagcacatggcccttttccttggggacatttttggcaggtgccttggcaaaccgaatggaattacttgtcagcttttgttttcatattcacatgtgacatcttttctttttctgttccctgtctcaacctgtgtttgctaatagccttgttattatttagagcagtctctcccttggcaaggtcttgagcattttctttgtgtgacaattatcttccttttgtcccttggctccgtctccttgtctgcacaatcatagactaaatcaggctgatctgagaaaattgagggaagaccataaagtggctcttctatgtgtggacttttctgagagcttctttccccaggaaggatgatgtagaagatgtgaatgccgccttagccaaagtgtctgcttgtcagaggagttcaagtgttcctgtgttctttccttttccagtcgttaggagtaactgagcttactctgagatttgcacccagagggatggtctcagaagacgctggttcagtgcaaattgagatggtaaaaacttatttcttaaaaaatggttcctaaataaatgtcatttactaaaacaaatgaaagaaatatatatatgaataaatggctatatttt

SEQ ID NO: 127413 - DNA, 2636 bp, Homo sapiens
  Payload ID: 4935
  Gene Symbol: DISC1
  Gene Name: disrupted in schizophrenia 1
  Uniprot ID: Q9NRI5
  ENST ID: ENST00000317586
  CDS Start-End: 54-1163
ggaaggagcaggaggcagcccaggcggagcgggaggagctggcagcggggcgcatgccaggcgggggtcctcagggcgccccagccgccgccggcggcggcggcgtgagccaccgcgcaggcagccgggattgcttaccacctgcagcgtgctttcggaggcggcggctggcacggaggccgggctacatgagaagctcgacagggcctgggatcgggttcctttccccagcagtgggcacactgttccggttcccaggaggggtgtctggcgaggagtcccaccactcggagtccagggccagacagtgtggccttgactcgagaggcctcttggtccggagccctgtttccaagagtgcagcagcccctactgtgacctctgtgagaggaacctcggcgcactttgggattcagctcagaggtggcaccagattgcctgacaggcttagctggccgtgtggccctgggagtgctgggtggcagcaagagtttgcagccatggatagttctgagaccctggacgccagctgggaggcagcctgcagcgatggagcaaggcgtgtccgggcagcaggctctctgccatcagcagagttgagtagcaacagctgcagccctggctgtggccctgaggtccccccaacccctcctggctctcacagtgcctttacctcaagctttagctttattcggctctcgcttggctctgccggggaacgtggagaagcagaaggctgcccaccatccagagaggctgagtcccattgccagagcccccaggagatgggagccaaagctgccagcttggacgggcctcacgaggacccgcgatgtctctctcggcccttcagtctcttggctacacgggtctctgcagacttggcccaggccgcaaggaacagctccaggccagagcgtgacatgcattctttaccagacatggaccctggctcctccagttctctggatccctcactggctggctgtggtggtgatgggagcagcggctcaggggatgcccactcttgggacaccctgctcaggaaatgggagccagtgctgcgggactgcctgctgagaaaccggaggcagatggagctggaaccaattgctttggatccaccatggaagcctcgacatcctgaaccaaactcctattaatgaaacttcccaaatttaaacaaagcaagacaaatagatatccacacagcgtagatcatgacttctttagacatcatgaaaagaaaaagaggacccacgtggaagaatacgctcatttatgatcagggtagcatcatattcctctcccttttaacattatttcaggatagcagctgtctggatgctggccatgggcttgaaaaaaaccaggtgggcatttctgcccactgtaccgtttctcccatgcgtttcccagtcccctgtcatggcatgaaaaaaccgctattgttctgtgttgggacaattagatttttgtaggggggagaaaccacccaaaagcaaatggaaaaatatgctatgattaatgtcagttacgggaattaaacttcggaggcctttaggacaattatgaaggaatcattttccccttggtggcaatatgtactacagttgtcccttgatatccatgggggattaattccaggacgcctgtggatacagaaatccacgtgtactcaagtcttgttttcagtggatatgaaaagtcggccctccatatctgcaggttttacacttggcgaatgctgtatttttgattcatgttggattaaggatctggaacccctgatacagactgtatttattgaaaaaaaagtctgcctatgagtagactcacatgttaaaacccgtgttgttcaagggtcaaccataactgcaggcagaacatctgggcaggaagctcctgcaggaagacctgtaaactcaggtctgtggaacggcgatgatcttcttcccttgcttccagaattattgctgtgagatcaggtgcactggctacgaccttactctttgtgcagaacttatttctggtctggtttaagtgaacgttattctttctgtgcagtcctgtggttacatcaaaggttaaatttcatatagcatgtctgttatatcagacttctctgatggcctgtccagagcaaacattttaaaatattggtcctattctgtcttataacagtctgctctggtgatttttgtctcatcaattggattatgacactgtcagccactgttagtgttattctcaaattcagtcttccattcatctctccttcccttccctggcagacagacttctgcagccactgggactgttggggtgaggaaaggcaagaaccgatgtttcattctctccctcccttcttcctccctcttttttgttggttgtggggtgggctacatcttcttacccaaacaaccaggagcatttgttggcaagtttattgtgcccagtgccgatgtctggacaattaattccctaggtcagtggctttcacagtttgtgatggtgactccaggaaggaaactcaccatgaccctgtatatacatagaacaaaaatgcagcccactctgatattgtatttgttctattctagttcattaaaagtgaatgttggtcttcatccttt

SEQ ID NO: 127414 - DNA, 2525 bp, Homo sapiens
  Payload ID: 4935
  Gene Symbol: DISC1
  Gene Name: disrupted in schizophrenia 1
  ENST ID: ENST00000366632
  CDS Start-End: 54-1202
ggaaggagcaggaggcagcccaggcggagcgggaggagctggcagcggggcgcatgccaggcgggggtcctcagggcgccccagccgccgccggcggcggcggcgtgagccaccgcgcaggcagccgggattgcttaccacctgcagcgtgctttcggaggcggcggctggcacggaggccgggctacatgagaagctcgacagggcctgggatcgggttcctttccccagcagtgggcacactgttccggttcccaggaggggtgtctggcgaggagtcccaccactcggagtccagggccagacagtgtggccttgactcgagaggcctcttggtccggagccctgtttccaagagtgcagcagcccctactgtgacctctgtgagaggaacctcggcgcactttgggattcagctcagaggtggcaccagattgcctgacaggcttagctggccgtgtggccctgggagtgctgggtggcagcaagagtttgcagccatggatagttctgagaccctggacgccagctgggaggcagcctgcagcgatggagcaaggcgtgtccgggcagcaggctctctgccatcagcagagttgagtagcaacagctgcagccctggctgtggccctgaggtccccccaacccctcctggctctcacagtgcctttacctcaagctttagctttattcggctctcgcttggctctgccggggaacgtggagaagcagaaggctgcccaccatccagagaggctgagtcccattgccagagcccccaggagatgggagccaaagctgccagcttggacgggcctcacgaggacccgcgatgtctctctcggcccttcagtctcttggctacacgggtctctgcagacttggcccaggccgcaaggaacagctccaggccagagcgtgacatgcattctttaccagacatggaccctggctcctccagttctctggatccctcactggctggctgtggtggtgatgggagcagcggctcaggggatgcccactcttgggacaccctgctcaggaaatgggagccagtgctgcgggactgcctgctgagaaaccggaggcagatggaggtaatatccttaagattaaaacttcagaaacttcaggaagatgcagttgagaatgatgattatgataaagggccagcggagatgacacccacaccccactgagaatggagccgaggctgttggaacccactgctcaggacagcttgcacgtgtccatcacgagacgagactggcttcttcaggaaaagcagcagctacagaaagaaatcgaagctctccaagcaaggatgtttgtgctggaagccaaagatcaacagctgagaagggaaatagaggagcaagagcagcaactccagtggcagggctgcgacctgaccccactggtgggccagctgtccctgggtcagctgcaggaggtcagcaaggccttgcaggacaccctggcctcagccggtcagattcccttccatgcagagccaccggaaaccataaggagcctccaggaaagaataaaatccctcaacttgtcacttaaagaaatcactactaaggtgtgtatgagtgagaaattctgcagcaccctgaggaagaaagttaacgatattgaaacccaactaccagccttgcttgaagccaaaatgcatgccatatcaggaaaccatttctggacggctaaagacctcaccgaggagattagatcattaacatcagagagagaagggctggagggactcctcagcaagctgttggtgttgagttccaggaatgtcaaaaagctgggaagtgttaaagaagattacaacagactgagaagagaagtggagcaccaggagactgcctatgatggagtctcactctgtcgcccagtctggagtgcagtggtacgatcttgctcactgcaacctctgcctcccgagttcaagcaattctcctgcctcagcctccggagtagctgggattacaggtgcccgccaccatgcctggctaattttgtattcttagtagagatggggttttaccatgttgaccagactggtctaaaactcctgacctcaagtgatccaccttcctcagcctcccaaagtgctgggattacagacatgagccactgtgcctggcccctacaataattctttaatgtgaggaaatatcaaatgaaaaataagaaattctaggtaaggaaagaaatttatttagtggaagtataaaagaagtttaaaaagttgaagaaaattttggttttcaatgttgatgcagcgtcctttgtgaatctttaaatttgtgaatgacacttttgaaaacttacaccttattctaagtgtctttgttcactttacactgtactgtaaagaatcacaagagtgtctcataaataactttctatataacatatgtatatttcaaaataacatgttatatatataatacatacaatttttgtcaattaaacagtacattaaaaagacaaaaataactttccataaa

SEQ ID NO: 127415 - DNA, 2676 bp, Homo sapiens
  Payload ID: 4935
  Gene Symbol: DISC1
  Gene Name: disrupted in schizophrenia 1
  Uniprot ID: Q9NRI5
  ENST ID: ENST00000366633
  CDS Start-End: 54-2321
ggaaggagcaggaggcagcccaggcggagcgggaggagctggcagcggggcgcatgccaggcgggggtcctcagggcgccccagccgccgccggcggcggcggcgtgagccaccgcgcaggcagccgggattgcttaccacctgcagcgtgctttcggaggcggcggctggcacggaggccgggctacatgagaagctcgacagggcctgggatcgggttcctttccccagcagtgggcacactgttccggttcccaggaggggtgtctggcgaggagtcccaccactcggagtccagggccagacagtgtggccttgactcgagaggcctcttggtccggagccctgtttccaagagtgcagcagcccctactgtgacctctgtgagaggaacctcggcgcactttgggattcagctcagaggtggcaccagattgcctgacaggcttagctggccgtgtggccctgggagtgctgggtggcagcaagagtttgcagccatggatagttctgagaccctggacgccagctgggaggcagcctgcagcgatggagcaaggcgtgtccgggcagcaggctctctgccatcagcagagttgagtagcaacagctgcagccctggctgtggccctgaggtccccccaacccctcctggctctcacagtgcctttacctcaagctttagctttattcggctctcgcttggctctgccggggaacgtggagaagcagaaggctgcccaccatccagagaggctgagtcccattgccagagcccccaggagatgggagccaaagctgccagcttggacgggcctcacgaggacccgcgatgtctctctcggcccttcagtctcttggctacacgggtctctgcagacttggcccaggccgcaaggaacagctccaggccagagcgtgacatgcattctttaccagacatggaccctggctcctccagttctctggatccctcactggctggctgtggtggtgatgggagcagcggctcaggggatgcccactcttgggacaccctgctcaggaaatgggagccagtgctgcgggactgcctgctgagaaaccggaggcagatggaggtaatatccttaagattaaaacttcagaaacttcaggaagatgcagttgagaatgatgattatgataaagctgagacgttacaacaaagattagaagacctggaacaagagaaaatcagcctgcactttcaacttccttcaaggcagccagctcttagcagtttcctgggtcacctggcagcacaagtccaggctgccttgcgccgtggggccactcagcaggccagcggagatgacacccacaccccactgagaatggagccgaggctgttggaacccactgctcaggacagcttgcacgtgtccatcacgagacgagactggcttcttcaggaaaagcagcagctacagaaagaaatcgaagctctccaagcaaggatgtttgtgctggaagccaaagatcaacagctgagaagggaaatagaggagcaagagcagcaactccagtggcagggctgcgacctgaccccactggtgggccagctgtccctgggtcagctgcaggaggtcagcaaggccttgcaggacaccctggcctcagccggtcagattcccttccatgcagagccaccggaaaccataaggagcctccaggaaagaataaaatccctcaacttgtcacttaaagaaatcactactaaggtgtgtatgagtgagaaattctgcagcaccctgaggaagaaagttaacgatattgaaacccaactaccagccttgcttgaagccaaaatgcatgccatatcaggaaaccatttctggacggctaaagacctcaccgaggagattagatcattaacatcagagagagaagggctggagggactcctcagcaagctgttggtgttgagttccaggaatgtcaaaaagctgggaagtgttaaagaagattacaacagactgagaagagaagtggagcaccaggagactgcctatgatggagtctcactctgtcgcccagtctggagtgcagtggtacgatcttgctcactgcaacctctgcctcccgagttcaagcaattctcctgcctcagcctccggagtagctgggattacaggtgcccgccaccatgcctggctaattttgtattcttagtagagatggggttttaccatgttgaccagactggtctaaaactcctgacctcaagtgatccaccttcctcagcctcccaaagtgctgggattacagacatgagccactgtgcctggcccctacaataattctttaatgtgaggaaatatcaaatgaaaaataagaaattctaggtaaggaaagaaatttatttagtggaagtataaaagaagtttaaaaagttgaagaaaattttggttttcaatgttgatgcagcgtcctttgtgaatctttaaatttgtgaatgacacttttgaaaacttacaccttattctaagtgtctttgttcactttacactgtactgtaaagaatcacaagagtgtctcataaataactttctatataacatatgtatatttcaaaataacatgttatatatataatacatacaatttttgtcaattaaacagtacattaaaaagacaaaaataactttccataaa

SEQ ID NO: 127416 - DNA, 2224 bp, Homo sapiens
  Payload ID: 4935
  Gene Symbol: DISC1
  Gene Name: disrupted in schizophrenia 1
  Uniprot ID: Q9NRI5
  ENST ID: ENST00000366636
  CDS Start-End: 54-2090
ggaaggagcaggaggcagcccaggcggagcgggaggagctggcagcggggcgcatgccaggcgggggtcctcagggcgccccagccgccgccggcggcggcggcgtgagccaccgcgcaggcagccgggattgcttaccacctgcagcgtgctttcggaggcggcggctggcacggaggccgggctacatgagaagctcgacagggcctgggatcgggttcctttccccagcagtgggcacactgttccggttcccaggaggggtgtctggcgaggagtcccaccactcggagtccagggccagacagtgtggccttgactcgagaggcctcttggtccggagccctgtttccaagagtgcagcagcccctactgtgacctctgtgagaggaacctcggcgcactttgggattcagctcagaggtggcaccagattgcctgacaggcttagctggccgtgtggccctgggagtgctgggtggcagcaagagtttgcagccatggatagttctgagaccctggacgccagctgggaggcagcctgcagcgatggagcaaggcgtgtccgggcagcaggctctctgccatcagcagagttgagtagcaacagctgcagccctggctgtggccctgaggtccccccaacccctcctggctctcacagtgcctttacctcaagctttagctttattcggctctcgcttggctctgccggggaacgtggagaagcagaaggctgcccaccatccagagaggctgagtcccattgccagagcccccaggagatgggagccaaagctgccagcttggacgggcctcacgaggacccgcgatgtctctctcggcccttcagtctcttggctacacgggtctctgcagacttggcccaggccgcaaggaacagctccaggccagagcgtgacatgcattctttaccagacatggaccctggctcctccagttctctggatccctcactggctggctgtggtggtgatgggagcagcggctcaggggatgcccactcttgggacaccctgctcaggaaatgggagccagtgctgcgggactgcctgctgagaaaccggaggcagatggaggtaatatccttaagattaaaacttcagaaacttcaggaagatgcagttgagaatgatgattatgataaagctgagacgttacaacaaagattagaagacctggaacaagagaaaatcagcctgcactttcaacttccttcaaggcagccagctcttagcagtttcctgggtcacctggcagcacaagtccaggctgccttgcgccgtggggccactcagcaggccagcggagatgacacccacaccccactgagaatggagccgaggctgttggaacccactgctcaggacagcttgcacgtgtccatcacgagacgagactggcttcttcaggaaaagcagcagctacagaaagaaatcgaagctctccaagcaaggatgtttgtgctggaagccaaagatcaacagctgagaagggaaatagaggagcaagagcagcaactccagtggcagggctgcgacctgaccccactggtgggccagctgtccctgggtcagctgcaggaggtcagcaaggccttgcaggacaccctggcctcagccggtcagattcccttccatgcagagccaccggaaaccataaggagcctccaggaaagaataaaatccctcaacttgtcacttaaagaaatcactactaaggtgtgtatgagtgagaaattctgcagcaccctgaggaagaaagttaacgatattgaaacccaactaccagccttgcttgaagccaaaatgcatgccatatcaggaaaccatttctggacggctaaagacctcaccgaggagattagatcattaacatcagagagagaagggctggagggactcctcagcaagctgttggtgttgagttccaggaatgtcaaaaagctgggaagtgttaaagaagattacaacagactgagaagagaagtggagcaccaggagactgcctatggatataagtactgtgatgcagagtcctggacacagagaagtcagcaacttgcctgaggacagcctgcaggacacagcactgtgatttgaacccagagagtctgacttcagcccccagcgctcaactactattaattgaaagggcattgaagagacatgatgtcacaataaaaagaaaaaaagaaaagaaa

SEQ ID NO: 127417 - DNA, 6848 bp, Homo sapiens
  Payload ID: 4935
  Gene Symbol: DISC1
  Gene Name: disrupted in schizophrenia 1
  ENST ID: ENST00000366637
  CDS Start-End: 54-2552
ggaaggagcaggaggcagcccaggcggagcgggaggagctggcagcggggcgcatgccaggcgggggtcctcagggcgccccagccgccgccggcggcggcggcgtgagccaccgcgcaggcagccgggattgcttaccacctgcagcgtgctttcggaggcggcggctggcacggaggccgggctacatgagaagctcgacagggcctgggatcgggttcctttccccagcagtgggcacactgttccggttcccaggaggggtgtctggcgaggagtcccaccactcggagtccagggccagacagtgtggccttgactcgagaggcctcttggtccggagccctgtttccaagagtgcagcagcccctactgtgacctctgtgagaggaacctcggcgcactttgggattcagctcagaggtggcaccagattgcctgacaggcttagctggccgtgtggccctgggagtgctgggtggcagcaagagtttgcagccatggatagttctgagaccctggacgccagctgggaggcagcctgcagcgatggagcaaggcgtgtccgggcagcaggctctctgccatcagcagagttgagtagcaacagctgcagccctggctgtggccctgaggtccccccaacccctcctggctctcacagtgcctttacctcaagctttagctttattcggctctcgcttggctctgccggggaacgtggagaagcagaaggctgcccaccatccagagaggctgagtcccattgccagagcccccaggagatgggagccaaagctgccagcttggacgggcctcacgaggacccgcgatgtctctctcggcccttcagtctcttggctacacgggtctctgcagacttggcccaggccgcaaggaacagctccaggccagagcgtgacatgcattctttaccagacatggaccctggctcctccagttctctggatccctcactggctggctgtggtggtgatgggagcagcggctcaggggatgcccactcttgggacaccctgctcaggaaatgggagccagtgctgcgggactgcctgctgagaaaccggaggcagatggaggtaatatccttaagattaaaacttcagaaacttcaggaagatgcagttgagaatgatgattatgataaagctgagacgttacaacaaagattagaagacctggaacaagagaaaatcagcctgcactttcaacttccttcaaggcagccagctcttagcagtttcctgggtcacctggcagcacaagtccaggctgccttgcgccgtggggccactcagcaggccagcggagatgacacccacaccccactgagaatggagccgaggctgttggaacccactgctcaggacagcttgcacgtgtccatcacgagacgagactggcttcttcaggaaaagcagcagctacagaaagaaatcgaagctctccaagcaaggatgtttgtgctggaagccaaagatcaacagctgagaagggaaatagaggagcaagagcagcaactccagtggcagggctgcgacctgaccccactggtgggccagctgtccctgggtcagctgcaggaggtcagcaaggccttgcaggacaccctggcctcagccggtcagattcccttccatgcagagccaccggaaaccataaggagcctccaggaaagaataaaatccctcaacttgtcacttaaagaaatcactactaaggtgtgtatgagtgagaaattctgcagcaccctgaggaagaaagttaacgatattgaaacccaactaccagccttgcttgaagccaaaatgcatgccatatcaggaaaccatttctggacggctaaagacctcaccgaggagattagatcattaacatcagagagagaagggctggagggactcctcagcaagctgttggtgttgagttccaggaatgtcaaaaagctgggaagtgttaaagaagattacaacagactgagaagagaagtggagcaccaggagactgcctatgaaacaagtgtgaaggaaaatactatgaagtacatggaaacacttaagaataaactgtgcagctgcaagtgtccactgcttgggaaagtgtgggaagctgacttggaagcttgtcgattgcttatccagagcctacagctccaggaagccaggggaagcctgtctgtagaagatgagaggcagatggatgacttagagggagctgctcctcctattccccccaggctccactccgaggataaaaggaagacccctttgaaggaatcttacatcctttctgcagaacttggagaaaagtgtgaagacataggcaagaagctattgtacttggaagatcaacttcacacagcaatccacagtcatgatgaagatctcattcattctctcaggagggagctccagatggtgaaggaaactctgcaggccatgatcctgcagctccagccagcaaaggaggcgggagaaagagaagctgcagcttcctgcatgacagctggtgtccacgaagcacaagcctgaggagtgacgggatgggggagggaggtgggccaccatgtttggacccggggggctgctcttccctcccccgccatagctaagatgcctgaatcaattacggagatacagagccttgaggtctttcagtggaaaggtggttcatgttcattctcatcagtgtgaaactgaggagtctgcaatttggaatatggagagagagactgatttgctgaatttccttctaaatgtcactcaaaaatttcttttccatgtcattcttgggaatgtcttccacaggatttgagaatagtttcatctcagcccccattagagagaagttggggtgaattctggaaaaatgtctctttttcctgtgccatttgccttctgctgcaacgaaaatatttcctgattcaagattctataaaaaggaaaccaagcataagactctgtcatcatacctgttacacgttcctacaggtgcacaatctaagagagctaattaacctcagagtctggagttaacagcttttcaccttacttctcctgtgatctaatattatcttagaaaaattaatatgcaatttccaaaagatattttggtaagacaacaacctcccagtgatatgccacctttcaattttccttttgtggcaatgattgcatctgaagaaaggatccctgagagtctctgtttcatcaggacattctgaaatttacccacagtgaggctgtggatggatcaggggacctgtataaaatgtttgagcctgttccattttcccgtggaacctgtttcactcaatgccaggcagtgcagcatttaggaaagcagtgcagtactcagtaaggcagtgcagtactcagtaacacaatacagtactcaggcagtgcagtactcagtaagacagtgcagtgctcagtaaggcagtgcaatactcagtaacagtgtagtactcagtaacagtgaagtactcagtaatacagtacagtattcagtaaggcagtgaagtactcagtaatacaatacagtactcagttaggcagtgcagtactcaggaatgcagcacagtactcaggcagtgcaatactcagtgcggtactcagtaacacagtgcagtactcagtaacagtgcagtactcagtaacagtgcagtactcagtaaggcagtgcagtactcagtaacacagtgcagtactcagtaatacagtacagtactcagtaaggcagtatggtactcagtaaagcaatgcaatgctcagtaacacagtgcagtgctcaataaggcagtgcagtgctcagtaaggcagtgaattgcttagtaacacagtgtagtgctcagtaggacagcatagtactcagtaacacagggcagctagtactcagtactataagtactgagtacttatataggcaatgtagtactcagtaaatcagtgcagtactcagtaatgcaagggcatttcaggctcctgctgggctgcttctttggcccagctgggactcctattgagacagctgcaaaacaggctgatttcaattaggcagcacttcccaaagtgcactgaggaaggtggccccaagagaagctctctaaacaaaggagtaccctctctggtcaagtacctttggtaaatacaccataccataatatctgcttggagaaccacaatgcacattagcatattagtctgagagagaacttatagtaaggaaactcacttgattttatctaacctcaaactttccaagtttaatggatcgtgaatttttttcatgtaactcctattcatatcccatagatctagtattgtacagcactgcattctctgaggaagtcccagtccaaactctgatttacatcactttagaaaccacactcacacttttgcagagtgttgagcttaataactacctgccacagattggtaaatttaatccagtggttgttctgtttgtgcttctgttctcatttatgtgtttagggatagtgaggttcctgccttcactaggatccacggatatgagaccatttttgtcatttcctgaagtcacactggcgtttccagaaggcatctggtgctttgctcagccttccatgctgtgcagcacttctgtcctcagtcaaggagatggccatgcttaagccagcaattggctggggtccaggaaacaaagcaaaagcacaatatgtgaatgtgctgattgtgttccctatggctttatctcgagcaaaatacactctacatattttaataataagtataattagcttgttcctggacttcattttcaatgatgaaccaaattcctgaattatttataattgtgtctaaagaaaattatgaactggtcacatggcacttggaatccttgagttaattccagtgaagcaaaacttgggaagagtcaggattggccacattgccaataacaaattcctacttcgacatatgtcttttcaaaaagcctcccagacacaagacatcttaaccgtcactagcccaagtgttttgtattactcagacaccatcatgaaataattctgtgaggtcatgatgtatttgaaaattctgcaagttaataactgccttgaattgtttgaacccgaaataagggttctttggtacctctagtagatagtgtgttcatttccctgctgcaaattttgaagtatttgggcaggtgagtcatgttttaaccacaagccataactcatctgttgtctttgcttggtcttagagtatcattcagaaagtccgctaagggccagcgtgcttcttctggctacacaaccttctcaggacaagcccactgtcttaagccactttgaccctgggagacacaggactgtgtatcctcaatcatactatacagcagtttttgtcaggggaacataaaaatatccaagagaggttagggcttagatttaaaagcatcaaaacaacaacaatggaaatttatgttggcgatagccaagaccacaagcaaaagcacatactggaaatgatgagttagaatctgatttgactgggatgttttatgagaatgtaagtgtgatattatactgtctgccttgctggaatgctggctttcaaatggtcacccatttttctttcactggcctgagttaggacatgctatcagtaatagtcccagttccatccaactttctgaaatttcatttttttttttgagatggagtctctctctgtcacccaagttggagtgcagtggccccgcaatctcggctcactgcaacctctacctcccaggttcaagctattctactgcctcagcctcccaagtagctggggttacaggcatttgccaccgggccctgatgatttttgtatttttagtagagacagggcttcaccatgttggctaggagggtctcaaactcctgacctcaggcgatccacccccacctcggcttcccaaagtgctgagattacaggtgtgagccaccgcacccggccaactttctgaaatttcaaaactgaattgatccttctccaaattagtatatactattggaaacttgtctttccctgcagtaaggctggtttccccaccccagaaacatgtaacggttggtaccatgctaagcccttgccatgctaagccctttacagtcatatcctataatccccatatcaaccttataaggaaggtgtttgtagatgatgcaactgagccttaagaggactaattccctttttctaaggcacagagctggtaaaatgtgaagtaatagtgaacctaacagtcagagacaggcagcatgctcttaactagtgctcttcctaaagttcctttaatgtccttttgagattttgagccatggaacttacttgttcacctggctaagaactcatggccactgtggaaatcttggttagggagtcaaagaaactgagcctggggcaaacgaggcttcccacactgccaggggagcctcactgtgaagtctaggctcagacaggcatcaacaaacctattcaccccaccatcatcctgatctaaccattccccagtcatcccaggaaaaccactcacagcctgacactgggctgactttcttgaagatcctcatccaattggtgtttttcagaagtgttccaatattatgaattctgtgttgtggagaaaagcaaccatgcatttactggtcaatgccttcttgtatatgtaattcaatacttttacttttaatatcctcaccttatctaatctttgaattttgtcatgtaatttattgcttcattaaggttactttttgttatacaaaataaaagctgatatccaaggca

SEQ ID NO: 127418 - DNA, 7059 bp, Homo sapiens
  Payload ID: 4935
  Gene Symbol: DISC1
  Gene Name: disrupted in schizophrenia 1
  ENST ID: ENST00000439617
  CDS Start-End: 54-2618
ggaaggagcaggaggcagcccaggcggagcgggaggagctggcagcggggcgcatgccaggcgggggtcctcagggcgccccagccgccgccggcggcggcggcgtgagccaccgcgcaggcagccgggattgcttaccacctgcagcgtgctttcggaggcggcggctggcacggaggccgggctacatgagaagctcgacagggcctgggatcgggttcctttccccagcagtgggcacactgttccggttcccaggaggggtgtctggcgaggagtcccaccactcggagtccagggccagacagtgtggccttgactcgagaggcctcttggtccggagccctgtttccaagagtgcagcagcccctactgtgacctctgtgagaggaacctcggcgcactttgggattcagctcagaggtggcaccagattgcctgacaggcttagctggccgtgtggccctgggagtgctgggtggcagcaagagtttgcagccatggatagttctgagaccctggacgccagctgggaggcagcctgcagcgatggagcaaggcgtgtccgggcagcaggctctctgccatcagcagagttgagtagcaacagctgcagccctggctgtggccctgaggtccccccaacccctcctggctctcacagtgcctttacctcaagctttagctttattcggctctcgcttggctctgccggggaacgtggagaagcagaaggctgcccaccatccagagaggctgagtcccattgccagagcccccaggagatgggagccaaagctgccagcttggacgggcctcacgaggacccgcgatgtctctctcggcccttcagtctcttggctacacgggtctctgcagacttggcccaggccgcaaggaacagctccaggccagagcgtgacatgcattctttaccagacatggaccctggctcctccagttctctggatccctcactggctggctgtggtggtgatgggagcagcggctcaggggatgcccactcttgggacaccctgctcaggaaatgggagccagtgctgcgggactgcctgctgagaaaccggaggcagatggaggtaatatccttaagattaaaacttcagaaacttcaggaagatgcagttgagaatgatgattatgataaagctgagacgttacaacaaagattagaagacctggaacaagagaaaatcagcctgcactttcaacttccttcaaggcagccagctcttagcagtttcctgggtcacctggcagcacaagtccaggctgccttgcgccgtggggccactcagcaggccagcggagatgacacccacaccccactgagaatggagccgaggctgttggaacccactgctcaggacagcttgcacgtgtccatcacgagacgagactggcttcttcaggaaaagcagcagctacagaaagaaatcgaagctctccaagcaaggatgtttgtgctggaagccaaagatcaacagctgagaagggaaatagaggagcaagagcagcaactccagtggcagggctgcgacctgaccccactggtgggccagctgtccctgggtcagctgcaggaggtcagcaaggccttgcaggacaccctggcctcagccggtcagattcccttccatgcagagccaccggaaaccataaggagcctccaggaaagaataaaatccctcaacttgtcacttaaagaaatcactactaaggtgtgtatgagtgagaaattctgcagcaccctgaggaagaaagttaacgatattgaaacccaactaccagccttgcttgaagccaaaatgcatgccatatcaggaaaccatttctggacggctaaagacctcaccgaggagattagatcattaacatcagagagagaagggctggagggactcctcagcaagctgttggtgttgagttccaggaatgtcaaaaagctgggaagtgttaaagaagattacaacagactgagaagagaagtggagcaccaggagactgcctatgaaacaagtgtgaaggaaaatactatgaagtacatggaaacacttaagaataaactgtgcagctgcaagtgtccactgcttgggaaagtgtgggaagctgacttggaagcttgtcgattgcttatccagagcctacagctccaggaagccaggggaagcctgtctgtagaagatgagaggcagatggatgacttagagggagctgctcctcctattccccccaggctccactccgaggataaaaggaagacccctttgaaggtattggaagaatggaagactcacctcatcccctctctgcactgtgctggaggtgaacagaaagaggaatcttacatcctttctgcagaacttggagaaaagtgtgaagacataggcaagaagctattgtacttggaagatcaacttcacacagcaatccacagtcatgatgaagatctcattcattctctcaggagggagctccagatggtgaaggaaactctgcaggccatgatcctgcagctccagccagcaaaggaggcgggagaaagagaagctgcagcttcctgcatgacagctggtgtccacgaagcacaagcctgaggagtgacgggatgggggagggaggtgggccaccatgtttggacccggggggctgctcttccctcccccgccatagctaagatgcctgaatcaattacggagatacagagccttgaggtctttcagtggaaaggtggttcatgttcattctcatcagtgtgaaactgaggagtctgcaatttggaatatggagagagagactgatttgctgaatttccttctaaatgtcactcaaaaatttcttttccatgtcattcttgggaatgtcttccacaggatttgagaatagtttcatctcagcccccattagagagaagttggggtgaattctggaaaaatgtctctttttcctgtgccatttgccttctgctgcaacgaaaatatttcctgattcaagattctataaaaaggaaaccaagcataagactctgtcatcatacctgttacacgttcctacaggtgcacaatctaagagagctaattaacctcagagtctggagttaacagcttttcaccttacttctcctgtgatctaatattatcttagaaaaattaatatgcaatttccaaaagatattttggtaagacaacaacctcccagtgatatgccacctttcaattttccttttgtggcaatgattgcatctgaagaaaggatccctgagagtctctgtttcatcaggacattctgaaatttacccacagtgaggctgtggatggatcaggggacctgtataaaatgtttgagcctgttccattttcccgtggaacctgtttcactcaatgccaggcagtgcagcatttaggaaagcagtgcagtactcagtaaggcagtgcagtactcagtaacacaatacagtactcaggcagtgcagtactcagtaagacagtgcagtgctcagtaaggcagtgcaatactcagtaacagtgtagtactcagtaacagtgaagtactcagtaatacagtacagtattcagtaaggcagtgaagtactcagtaatacaatacagtactcagttaggcagtgcagtactcaggaatgcagcacagtactcaggcagtgcaatactcagtgcggtactcagtaacacagtgcagtactcagtaacagtgcagtactcagtaacagtgcagtactcagtaaggcagtgcagtactcagtaacacagtgcagtactcagtaatacagtacagtactcagtaaggcagtatggtactcagtaaagcaatgcaatgctcagtaacacagtgcagtgctcaataaggcagtgcagtgctcagtaaggcagtgaattgcttagtaacacagtgtagtgctcagtaggacagcatagtactcagtaacacagggcagctagtactcagtactataagtactgagtacttatataggcaatgtagtactcagtaaatcagtgcagtactcagtaatgcaagggcatttcaggctcctgctgggctgcttctttggcccagctgggactcctattgagacagctgcaaaacaggctgatttcaattaggcagcacttcccaaagtgcactgaggaaggtggccccaagagaagctctctaaacaaaggagtaccctctctggtcaagtacctttggtaaatacaccataccataatatctgcttggagaaccacaatgcacattagcatattagtctgagagagaacttatagtaaggaaactcacttgattttatctaacctcaaactttccaagtttaatggatcgtgaatttttttcatgtaactcctattcatatcccatagatctagtattgtacagcactgcattctctgaggaagtcccagtccaaactctgatttacatcactttagaaaccacactcacacttttgcagagtgttgagcttaataactacctgccacagattggtaaatttaatccagtggttgttctgtttgtgcttctgttctcatttatgtgtttagggatagtgaggttcctgccttcactaggatccacggatatgagaccatttttgtcatttcctgaagtcacactggcgtttccagaaggcatctggtgctttgctcagccttccatgctgtgcagcacttctgtcctcagtcaaggagatggccatgcttaagccagcaattggctggggtccaggaaacaaagcaaaagcacaatatgtgaatgtgctgattgtgttccctatggctttatctcgagcaaaatacactctacatattttaataataagtataattagcttgttcctggacttcattttcaatgatgaaccaaattcctgaattatttataattgtgtctaaagaaaattatgaactggtcacatggcacttggaatccttgagttaattccagtgaagcaaaacttgggaagagtcaggattggccacattgccaataacaaattcctacttcgacatatgtcttttcaaaaagcctcccagacacaagacatcttaaccgtcactagcccaagtgttttgtattactcagacaccatcatgaaataattctgtgaggtcatgatgtatttgaaaattctgcaagttaataactgccttgaattgtttgaacccgaaataagggttctttggtacctctagtagatagtgtgttcatttccctgctgcaaattttgaagtatttgggcaggtgagtcatgttttaaccacaagccataactcatctgttgtctttgcttggtcttagagtatcattcagaaagtccgctaagggccagcgtgcttcttctggctacacaaccttctcaggacaagcccactgtcttaagccactttgaccctgggagacacaggactgtgtatcctcaatcatactatacagcagtttttgtcaggggaacataaaaatatccaagagaggttagggcttagatttaaaagcatcaaaacaacaacaatggaaatttatgttggcgatagccaagaccacaagcaaaagcacatactggaaatgatgagttagaatctgatttgactgggatgttttatgagaatgtaagtgtgatattatactgtctgccttgctggaatgctggctttcaaatggtcacccatttttctttcactggcctgagttaggacatgctatcagtaatagtcccagttccatccaactttctgaaatttcatttttttttttgagatggagtctctctctgtcacccaagttggagtgcagtggccccgcaatctcggctcactgcaacctctacctcccaggttcaagctattctactgcctcagcctcccaagtagctggggttacaggcatttgccaccgggccctgatgatttttgtatttttagtagagacagggcttcaccatgttggctaggagggtctcaaactcctgacctcaggcgatccacccccacctcggcttcccaaagtgctgagattacaggtgtgagccaccgcacccggccaactttctgaaatttcaaaactgaattgatccttctccaaattagtatatactattggaaacttgtctttccctgcagtaaggctggtttccccaccccagaaacatgtaacggttggtaccatgctaagcccttgccatgctaagccctttacagtcatatcctataatccccatatcaaccttataaggaaggtgtttgtagatgatgcaactgagccttaagaggactaattccctttttctaaggcacagagctggtaaaatgtgaagtaatagtgaacctaacagtcagagacaggcagcatgctcttaactagtgctcttcctaaagttcctttaatgtccttttgagattttgagccatggaacttacttgttcacctggctaagaactcatggccactgtggaaatcttggttagggagtcaaagaaactgagcctggggcaaacgaggcttcccacactgccaggggagcctcactgtgaagtctaggctcagacaggcatcaacaaacctattcaccccaccatcatcctgatctaaccattccccagtcatcccaggaaaaccactcacagcctgacactgggctgactttcttgaagatcctcatccaattggtgtttttcagaagtgttccaatattatgaattctgtgttgtggagaaaagcaaccatgcatttactggtcaatgccttcttgtatatgtaattcaatacttttacttttaatatcctcaccttatctaatctttgaattttgtcatgtaatttattgcttcattaaggttactttttgttatacaaaataaaagctgatatccaaggcatggtgcatcttgatgattttttgtcctttgaagtatggatgatagaaaaatgtatcaggtttattcatctcatctttctgttacaggatgattaattgtacagttacatcacacgaaacatttataataaagtcatgctttagaa

SEQ ID NO: 127419 - DNA, 2939 bp, Homo sapiens
  Payload ID: 4935
  Gene Symbol: DISC1
  Gene Name: disrupted in schizophrenia 1
  ENST ID: ENST00000422590
  CDS Start-End: 32-166
ggcggagcgggaggagctggcagcggggcgcatgccaggcgggggtcctcagggcgccccagccgccgccggcggcggcggcgtgagccaccgcgcagccgggattgcttaccacctgcagcgtgctttcggaggcggcggctggcacggaggccgggctacatgagaagctcgacagggcctgggatcgggttcctttccccagcagtgggcacactgttccggttcccaggaggggtgtctggcgaggagtcccaccactcggagtccagggccagacagtgtggccttgactcgagaggcctcttggtccggagccctgtttccaagagtgcagcagcccctactgtgacctctgtgagaggaacctcggcgcactttgggattcagctcagaggtggcaccagattgcctgacaggcttagctggccgtgtggccctgggagtgctgggtggcagcaagagtttgcagccatggatagttctgagaccctggacgccagctgggaggcagcctgcagcgatggagcaaggcgtgtccgggcagcaggctctctgccatcagcagagttgagtagcaacagctgcagccctggctgtggccctgaggtccccccaacccctcctggctctcacagtgcctttacctcaagctttagctttattcggctctcgcttggctctgccggggaacgtggagaagcagaaggctgcccaccatccagagaggctgagtcccattgccagagcccccaggagatgggagccaaagctgccagcttggacgggcctcacgaggacccgcgatgtctctctcggcccttcagtctcttggctacacgggtctctgcagacttggcccaggccgcaaggaacagctccaggccagagcgtgacatgcattctttaccagacatggaccctggctcctccagttctctggatccctcactggctggctgtggtggtgatgggagcagcggctcaggggatgcccactcttgggacaccctgctcaggaaatgggagccagtgctgcgggactgcctgctgagaaaccggaggcagatggaggtaatatccttaagattaaaacttcagaaacttcaggaagatgcagttgagaatgatgattatgataaagctgagacgttacaacaaagattagaagacctggaacaagagaaaatcagcctgcactttcaacttccttcaaggcagccagctcttagcagtttcctgggtcacctggcagcacaagtccaggctgccttgcgccgtggggccactcagcaggccagcggagatgacacccacaccccactgagaatggagccgaggctgttggaacccactgctcaggacagcttgcacgtgtccatcacgagacgagactggcttcttcaggaaaagcagcagctacagaaagaaatcgaagctctccaagcaaggatgtttgtgctggaagccaaagatcaacagctgagaagggaaatagaggagcaagagcagcaactccagtggcagggctgcgacctgaccccactggtgggccagctgtccctgggtcagctgcaggaggtcagcaaggccttgcaggacaccctggcctcagccggtcagattcccttccatgcagagccaccggaaaccataaggagcctccaggaaagaataaaatccctcaacttgtcacttaaagaaatcactactaaggtgtgtatgagtgagaaattctgcagcaccctgaggaagaaagttaacgatattgaaacccaactaccagccttgcttgaagccaaaatgcatgccatatcaggaaaccatttctggacggctaaagacctcaccgaggagattagatcattaacatcagagagagaagggctggagggactcctcagcaagctgttggtgttgagttccaggaatgtcaaaaagctgggaagtgttaaagaagattacaacagactgagaagagaagtggagcaccaggagactgcctatgaaacaagtgtgaaggaaaatactatgaagtacatggaaacacttaagaataaactgtgcagctgcaagtgtccactgcttgggaaagtgtgggaagctgacttggaagcttgtcgattgcttatccagagcctacagctccaggaagccaggggaagcctgtctgtagaagatgagaggcagatggatgacttagagggagctgctcctcctattccccccaggctccactccgaggataaaaggaagacccctttgaaggtattggaagaatggaagactcacctcatcccctctctgcactgtgctggaggtgaacagaaagaggtctgtccttttcacatggcctccagaggggacccttattctaaggggtgctttgggaccatgctccaaatgggaacaataaatattgggaaggcttcccattgagcatataaacttttaaaagtttcaataactcttgaatatgattacaaaataaagtagaatttttgtagaagtttgaaatatagaagagcaaaaaaacccaacttttggcatatttagttccattttcattctaatttagtggctagaattagaatatgcagtctaatatagaattaccatatatagcatacattatatatgtcatatataatatagttattatattcactatagattatatatgccatacatgatatttaacatatatactatacattatgtattgtatgtcatatatgatgtttatatatttagaatctatatattacaatatattattatttatttgaatgaaacattcaaatatatgtatttatcccattaattgtttttaccaaaaccagatcataatgaatgtttataatgttcttctttcataaacacaactaaagtttggcctgagatatatgtattacaaattaaaatatggttttatttaa

SEQ ID NO: 127420 - DNA, 2349 bp, Homo sapiens
  Payload ID: 4935
  Gene Symbol: DISC1
  Gene Name: disrupted in schizophrenia 1
  ENST ID: ENST00000537876
  CDS Start-End: 54-1922
ggaaggagcaggaggcagcccaggcggagcgggaggagctggcagcggggcgcatgccaggcgggggtcctcagggcgccccagccgccgccggcggcggcggcgtgagccaccgcgcaggcagccgggattgcttaccacctgcagcgtgctttcggaggcggcggctggcacggaggccgggctacatgagaagctcgacagggcctgggatcgggttcctttccccagcagtgggcacactgttccggttcccaggaggggtgtctggcgaggagtcccaccactcggagtccagggccagacagtgtggccttgactcgagaggcctcttggtccggagccctgtttccaagagtgcagcagcccctactgtgacctctgtgagaggaacctcggcgcactttgggattcagctcagaggtggcaccagattgcctgacaggcttagctggccgtgtggccctgggagtgctgggtggcagcaagagtttgcagccatggatagttctgagaccctggacgccagctgggaggcagcctgcagcgatggagcaaggcgtgtccgggcagcaggctctctgccatcagcagagttgagtagcaacagctgcagccctggctgtggccctgaggtccccccaacccctcctggctctcacagtgcctttacctcaagctttagctttattcggctctcgcttggctctgccggggaacgtggagaagcagaaggctgcccaccatccagagaggctgagtcccattgccagagcccccaggagatgggagccaaagctgccagcttggacgggcctcacgaggacccgcgatgtctctctcggcccttcagtctcttggctacacgggtctctgcagacttggcccaggccgcaaggaacagctccaggccagagcgtgacatgcattctttaccagacatggaccctggctcctccagttctctggatccctcactggctggctgtggtggtgatgggagcagcggctcaggggatgcccactcttgggacaccctgctcaggaaatgggagccagtgctgcgggactgcctgctgagaaaccggaggcagatggaggtaatatccttaagattaaaacttcagaaacttcaggaagatgcagttgagaatgatgattatgataaagctgagacgttacaacaaagattagaagacctggaacaagagaaaatcagcctgcactttcaacttccttcaaggcagccagctcttagcagtttcctgggtcacctggcagcacaagtccaggctgccttgcgccgtggggccactcagcaggccagcggagatgacacccacaccccactgagaatggagccgaggctgttggaacccactgctcaggacagcttgcacgtgtccatcacgagacgagactggcttcttcaggaaaagcagcagctacagaaagaaatcgaagctctccaagcaaggatgtttgtgctggaagccaaagatcaacagctgagaagggaaatagaggagcaagagcagcaactccagtggcagggctgcgacctgaccccactggtgggccagctgtccctgggtcagctgcaggaggtcagcaaggccttgcaggacaccctggcctcagccggtcagattcccttccatgcagagccaccggaaaccataaggagcctccaggaaagaataaaatccctcaacttgtcacttaaagaaatcactactaaggtgtgtatgagtgagaaattctgcagcaccctgaggaagaaagttaacgatattgaaacccaactaccagccttgcttgaagccaaaatgcatgccatatcaggaggacatggcacgctgtggcatattctgcctgatgtctctggaggcatagttggtgcccatcccactttttattaactctcttggttgaaaacacagcccagaagacatgttgggacttcataagcacagcctaaggaggaacattggaaggaaaccatttctggacggctaaagacctcaccgaggagattagatcattaacatcagagagagaagggctggagggactcctcagcaagctgttggtgttgagttccaggaatgtcaaaaagctgggaagtgttaaagaagattacaacagactgagaagagaagtggagcaccaggagactgcctatggatataagtactgtgatgcagagtcctggacacagagaagtcagcaacttgcctgaggacagcctgcaggacacagcactgtgatttgaacccagagagtctgacttcagcccccagcgctcaactactattaattgaaagggcattgaagagacatgatgtc

SEQ ID NO: 127421 - DNA, 2658 bp, Homo sapiens
  Payload ID: 4935
  Gene Symbol: DISC1
  Gene Name: disrupted in schizophrenia 1
  Uniprot ID: Q9NRI5
  ENST ID: ENST00000539444
  CDS Start-End: 54-1793
ggaaggagcaggaggcagcccaggcggagcgggaggagctggcagcggggcgcatgccaggcgggggtcctcagggcgccccagccgccgccggcggcggcggcgtgagccaccgcgcaggcagccgggattgcttaccacctgcagcgtgctttcggaggcggcggctggcacggaggccgggctacatgagaagctcgacagggcctgggatcgggttcctttccccagcagtgggcacactgttccggttcccaggaggggtgtctggcgaggagtcccaccactcggagtccagggccagacagtgtggccttgactcgagaggcctcttggtccggagccctgtttccaagagtgcagcagcccctactgtgacctctgtgagaggaacctcggcgcactttgggattcagctcagaggtggcaccagattgcctgacaggcttagctggccgtgtggccctgggagtgctgggtggcagcaagagtttgcagccatggatagttctgagaccctggacgccagctgggaggcagcctgcagcgatggagcaaggcgtgtccgggcagcaggctctctgccatcagcagagttgagtagcaacagctgcagccctggctgtggccctgaggtccccccaacccctcctggctctcacagtgcctttacctcaagctttagctttattcggctctcgcttggctctgccggggaacgtggagaagcagaaggctgcccaccatccagagaggctgagtcccattgccagagcccccaggagatgggagccaaagctgccagcttggacgggcctcacgaggacccgcgatgtctctctcggcccttcagtctcttggctacacgggtctctgcagacttggcccaggccgcaaggaacagctccaggccagagcgtgacatgcattctttaccagacatggaccctggctcctccagttctctggatccctcactggctggctgtggtggtgatgggagcagcggctcaggggatgcccactcttgggacaccctgctcaggaaatgggagccagtgctgcgggactgcctgctgagaaaccggaggcagatggaggtaatatccttaagattaaaacttcagaaacttcaggaagatgcagttgagaatgatgattatgataaagctgagacgttacaacaaagattagaagacctggaacaagagaaaatcagcctgcactttcaacttccttcaaggcagccagctcttagcagtttcctgggtcacctggcagcacaagtccaggctgccttgcgccgtggggccactcagcaggccagcggagatgacacccacaccccactgagaatggagccgaggctgttggaacccactgctcaggacagcttgcacgtgtccatcacgagacgagactggcttcttcaggaaaagcagcagctacagaaagaaatcgaagctctccaagcaaggatgtttgtgctggaagccaaagatcaacagctgagaagggaaatagaggagcaagagcagcaactccagtggcagggctgcgacctgaccccactggtgggccagctgtccctgggtcagctgcaggaggtcagcaaggccttgcaggacaccctggcctcagccggtcagattcccttccatgcagagccaccggaaaccataaggagcctccaggaaagaataaaatccctcaacttgtcacttaaagaaatcactactaaggaaaccatttctggacggctaaagacctcaccgaggagattagatcattaacatcagagagagaagggctggagggactcctcagcaagctgttggtgttgagttccaggaatgtcaaaaagctgggaagtgttaaagaagattacaacagactgagaagagaagtggagcaccaggagactgcctatggtaggtagtgcacaactgttccccggcaagatattgatgatatttgttgtgttttgtggccaggcagaatgttctgtgccttatgtgaacgtcactgtgaagagcgtcatggagcacatggcccttttccttggggacatttttggcaggtgccttggcaaaccgaatggaattacttgtcagcttttgttttcatattcacatgtgacatcttttctttttctgttccctgtctcaacctgtgtttgctaatagccttgttattatttagagcagtctctcccttggcaaggtcttgagcattttctttgtgtgacaattatcttccttttgtcccttggctccgtctccttgtctgcacaatcatagactaaatcaggctgatctgagaaaattgagggaagaccataaagtggctcttctatgtgtggacttttctgagagcttctttccccaggaaggatgatgtagaagatgtgaatgccgccttagccaaagtgtctgcttgtcagaggagttcaagtgttcctgtgttctttccttttccagtcgttaggagtaactgagcttactctgagatttgcacccagagggatggtctcagaagacgctggttcagtgcaaattgagatggtaaaaacttatttcttaaaaaatggttcctaaataaatgtcatttactaaaacaaatgaaagaaatatatatatgaataaatggctatatttt

SEQ ID NO: 127422 - DNA, 2940 bp, Homo sapiens
  Payload ID: 4935
  Gene Symbol: DISC1
  Gene Name: disrupted in schizophrenia 1
  ENST ID: ENST00000535944
  CDS Start-End: 54-1883
ggaaggagcaggaggcagcccaggcggagcgggaggagctggcagcggggcgcatgccaggcgggggtcctcagggcgccccagccgccgccggcggcggcggcgtgagccaccgcgcaggcagccgggattgcttaccacctgcagcgtgctttcggaggcggcggctggcacggaggccgggctacatgagaagctcgacagggcctgggatcgggttcctttccccagcagtgggcacactgttccggttcccaggaggggtgtctggcgaggagtcccaccactcggagtccagggccagacagtgtggccttgactcgagaggcctcttggtccggagccctgtttccaagagtgcagcagcccctactgtgacctctgtgagaggaacctcggcgcactttgggattcagctcagaggtggcaccagattgcctgacaggcttagctggccgtgtggccctgggagtgctgggtggcagcaagagtttgcagccatggatagttctgagaccctggacgccagctgggaggcagcctgcagcgatggagcaaggcgtgtccgggcagcaggctctctgccatcagcagagttgagtagcaacagctgcagccctggctgtggccctgaggtccccccaacccctcctggctctcacagtgcctttacctcaagctttagctttattcggctctcgcttggctctgccggggaacgtggagaagcagaaggctgcccaccatccagagaggctgagtcccattgccagagcccccaggagatgggagccaaagctgccagcttggacgggcctcacgaggacccgcgatgtctctctcggcccttcagtctcttggctacacgggtctctgcagacttggcccaggccgcaaggaacagctccaggccagagcgtgacatgcattctttaccagacatggaccctggctcctccagttctctggatccctcactggctggctgtggtggtgatgggagcagcggctcaggggatgcccactcttgggacaccctgctcaggaaatgggagccagtgctgcgggactgcctgctgagaaaccggaggcagatggaggtaatatccttaagattaaaacttcagaaacttcaggaagatgcagttgagaatgatgattatgataaagctgagacgttacaacaaagattagaagacctggaacaagagaaaatcagcctgcactttcaacttccttcaaggcagccagctcttagcagtttcctgggtcacctggcagcacaagtccaggctgccttgcgccgtggggccactcagcaggccagcggagatgacacccacaccccactgagaatggagccgaggctgttggaacccactgctcaggacagcttgcacgtgtccatcacgagacgagactggcttcttcaggaaaagcagcagctacagaaagaaatcgaagctctccaagcaaggatgtttgtgctggaagccaaagatcaacagctgagaagggaaatagaggagcaagagcagcaactccagtggcagggctgcgacctgaccccactggtgggccagctgtccctgggtcagctgcaggaggtcagcaaggccttgcaggacaccctggcctcagccggtcagattcccttccatgcagagccaccggaaaccataaggagggaggtgaggcatcagactgctccctgccgtaaccatcaactagagaaacccgtcatcaatatttgggctttccatttgagaaggaagatatgtcttttccaagctgatgggctgcagcatggatctgcagaagtgaagcatttgaaagaaaccagtgtagaaccagctggctcaacagcctccaggaaagaataaaatccctcaacttgtcacttaaagaaatcactactaaggtgtgtatgagtgagaaattctgcagcaccctgaggaagaaagttaacgatattgaaacccaactaccagccttgcttgaagccaaaatgcatgccatatcaggaaaccatttctggacggctaaagacctcaccgaggagattagatcattaacatcagagagagaagggctggagggactcctcagcaagctgttggtgttgagttccaggaatgtcaaaaagctgggaagtgttaaagaagattacaacagactgagaagagaagtggagcaccaggagactgcctatggtaggtagtgcacaactgttccccggcaagatattgatgatatttgttgtgttttgtggccaggcagaatgttctgtgccttatgtgaacgtcactgtgaagagcgtcatggagcacatggcccttttccttggggacatttttggcaggtgccttggcaaaccgaatggaattacttgtcagcttttgttttcatattcacatgtgacatcttttctttttctgttccctgtctcaacctgtgtttgctaatagccttgttattatttagagcagtctctcccttggcaaggtcttgagcattttctttgtgtgacaattatcttccttttgtcccttggctccgtctccttgtctgcacaatcatagactaaatcaggctgatctgagaaaattgagggaagaccataaagtggctcttctatgtgtggacttttctgagagcttctttccccaggaaggatgatgtagaagatgtgaatgccgccttagccaaagtgtctgcttgtcagaggagttcaagtgttcctgtgttctttccttttccagtcgttaggagtaactgagcttactctgagatttgcacccagagggatggtctcagaagacgctggttcagtgcaaattgagatggtaaaaacttatttcttaaaaaatggttcctaaataaatgtcatttactaaaacaaatgaaagaaatatatatatgaataaatggctatatttt

SEQ ID NO: 127423 - DNA, 2505 bp, Homo sapiens
  Payload ID: 4935
  Gene Symbol: DISC1
  Gene Name: disrupted in schizophrenia 1
  Uniprot ID: Q9NRI5
  ENST ID: ENST00000535983
  CDS Start-End: 54-2141
ggaaggagcaggaggcagcccaggcggagcgggaggagctggcagcggggcgcatgccaggcgggggtcctcagggcgccccagccgccgccggcggcggcggcgtgagccaccgcgcaggcagccgggattgcttaccacctgcagcgtgctttcggaggcggcggctggcacggaggccgggctacatgagaagctcgacagggcctgggatcgggttcctttccccagcagtgggcacactgttccggttcccaggaggggtgtctggcgaggagtcccaccactcggagtccagggccagacagtgtggccttgactcgagaggcctcttggtccggagccctgtttccaagagtgcagcagcccctactgtgacctctgtgagaggaacctcggcgcactttgggattcagctcagaggtggcaccagattgcctgacaggcttagctggccgtgtggccctgggagtgctgggtggcagcaagagtttgcagccatggatagttctgagaccctggacgccagctgggaggcagcctgcagcgatggagcaaggcgtgtccgggcagcaggctctctgccatcagcagagttgagtagcaacagctgcagccctggctgtggccctgaggtccccccaacccctcctggctctcacagtgcctttacctcaagctttagctttattcggctctcgcttggctctgccggggaacgtggagaagcagaaggctgcccaccatccagagaggctgagtcccattgccagagcccccaggagatgggagccaaagctgccagcttggacgggcctcacgaggacccgcgatgtctctctcggcccttcagtctcttggctacacgggtctctgcagacttggcccaggccgcaaggaacagctccaggccagagcgtgacatgcattctttaccagacatggaccctggctcctccagttctctggatccctcactggctggctgtggtggtgatgggagcagcggctcaggggatgcccactcttgggacaccctgctcaggaaatgggagccagtgctgcgggactgcctgctgagaaaccggaggcagatggaggtaatatccttaagattaaaacttcagaaacttcaggaagatgcagttgagaatgatgattatgataaagctgagacgttacaacaaagattagaagacctggaacaagagaaaatcagcctgcactttcaacttccttcaaggcagccagctcttagcagtttcctgggtcacctggcagcacaagtccaggctgccttgcgccgtggggccactcagcaggccagcggagatgacacccacaccccactgagaatggagccgaggctgttggaacccactgctcaggacagcttgcacgtgtccatcacgagacgagactggcttcttcaggaaaagcagcagctacagaaagaaatcgaagctctccaagcaaggatgtttgtgctggaagccaaagatcaacagctgagaagggaaatagaggagcaagagcagcaactccagtggcagggctgcgacctgaccccactggtgggccagctgtccctgggtcagctgcaggaggtcagcaaggccttgcaggacaccctggcctcagccggtcagattcccttccatgcagagccaccggaaaccataaggagcctccaggaaagaataaaatccctcaacttgtcacttaaagaaatcactactaaggtgtgtatgagtgagaaattctgcagcaccctgaggaagaaagttaacgatattgaaacccaactaccagccttgcttgaagccaaaatgcatgccatatcaggaaaccatttctggacggctaaagacctcaccgaggagattagatcattaacatcagagagagaagggctggagggactcctcagcaagctgttggtgttgagttccaggaatgtcaaaaagctgggaagtgttaaagaagattacaacagactgagaagagaagtggagcaccaggagactgcctatgctgcaagtgtccactgcttgggaaagtgtgggaagctgacttggaagcttgtcgattgcttatccagagcctacagctccaggaagccaggggaagcctgtctgtagaagatgagaggcagatggatgacttagagggagctgctcctcctattccccccaggctccactccgaggataaaaggaagacccctttgaaggtattggaagaatggaagactcacctcatcccctctctgcactgtgctggaggtgaacagaaagaggtctgtccttttcacatggcctccagaggggacccttattctaaggggtgctttgggaccatgctccaaatgggaacaataaatattgggaaggcttcccattgagcatataaacttttaaaagtttcaataactcttgaatatgattacaaaataaagtagaatttttgtagaagtttgaaatatagaagagcaaaaaaacccaa

SEQ ID NO: 127424 - DNA, 2606 bp, Homo sapiens
  Payload ID: 4935
  Gene Symbol: DISC1
  Gene Name: disrupted in schizophrenia 1
  Uniprot ID: Q9NRI5
  ENST ID: ENST00000602713
  CDS Start-End: 54-1124
ggaaggagcaggaggcagcccaggcggagcgggaggagctggcagcggggcgcatgccaggcgggggtcctcagggcgccccagccgccgccggcggcggcggcgtgagccaccgcgcaggcagccgggattgcttaccacctgcagcgtgctttcggaggcggcggctggcacggaggccgggctacatgagaagctcgacagggcctgggatcgggttcctttccccagcagtgggcacactgttccggttcccaggaggggtgtctggcgaggagtcccaccactcggagtccagggccagacagtgtggccttgactcgagaggcctcttggtccggagccctgtttccaagagtgcagcagcccctactgtgacctctgtgagaggaacctcggcgcactttgggattcagctcagaggtggcaccagattgcctgacaggcttagctggccgtgtggccctgggagtgctgggtggcagcaagagtttgcagccatggatagttctgagaccctggacgccagctgggaggcagcctgcagcgatggagcaaggcgtgtccgggcagcaggctctctgccatcagcagagttgagtagcaacagctgcagccctggctgtggccctgaggtccccccaacccctcctggctctcacagtgcctttacctcaagctttagctttattcggctctcgcttggctctgccggggaacgtggagaagcagaaggctgcccaccatccagagaggctgagtcccattgccagagcccccaggagatgggagccaaagctgccagcttggacgggcctcacgaggacccgcgatgtctctctcggcccttcagtctcttggctacacgggtctctgcagacttggcccaggccgcaaggaacagctccaggccagagcgtgacatgcattctttaccagacatggaccctggctcctccagttctctggatccctcactggctggctgtggtggtgatgggagcagcggctcaggggatgcccactcttgggacaccctgctcaggaaatgggagccagtgctgcgggactgcctgctgagaaaccggaggcagatggagctgagacgttacaacaaagattagaagacctggaacaagagaaaatcagcctgcactttcaacttccttcaaggcagccagctcttagcagtttcctgggtcacctggcagcacaagtccaggctgccttgcgccgtggggccactcagcaggccagcggagatgacacccacaccccactgagaatggagccgaggctgttggaacccactgctcaggacagcttgcacgtgtccatcacgagacgagactggcttcttcaggaaaagcagcagctacagaaagaaatcgaagctctccaagcaaggatgtttgtgctggaagccaaagatcaacagctgagaagggaaatagaggagcaagagcagcaactccagtggcagggctgcgacctgaccccactggtgggccagctgtccctgggtcagctgcaggaggtcagcaaggccttgcaggacaccctggcctcagccggtcagattcccttccatgcagagccaccggaaaccataaggagcctccaggaaagaataaaatccctcaacttgtcacttaaagaaatcactactaaggtgtgtatgagtgagaaattctgcagcaccctgaggaagaaagttaacgatattgaaacccaactaccagccttgcttgaagccaaaatgcatgccatatcaggaaaccatttctggacggctaaagacctcaccgaggagattagatcattaacatcagagagagaagggctggagggactcctcagcaagctgttggtgttgagttccaggaatgtcaaaaagctgggaagtgttaaagaagattacaacagactgagaagagaagtggagcaccaggagactgcctatgatggagtctcactctgtcgcccagtctggagtgcagtggtacgatcttgctcactgcaacctctgcctcccgagttcaagcaattctcctgcctcagcctccggagtagctgggattacaggtgcccgccaccatgcctggctaattttgtattcttagtagagatggggttttaccatgttgaccagactggtctaaaactcctgacctcaagtgatccaccttcctcagcctcccaaagtgctgggattacagacatgagccactgtgcctggcccctacaataattctttaatgtgaggaaatatcaaatgaaaaataagaaattctaggtaaggaaagaaatttatttagtggaagtataaaagaagtttaaaaagttgaagaaaattttggttttcaatgttgatgcagcgtcctttgtgaatctttaaatttgtgaatgacacttttgaaaacttacaccttattctaagtgtctttgttcactttacactgtactgtaaagaatcacaagagtgtctcataaataactttctatataacatatgtatatttcaaaataacatgttatatatataatacatacaatttttgtcaattaaacagtacattaaaaagacaaaaataactttccataaa

SEQ ID NO: 127425 - DNA, 1553 bp, Homo sapiens
  Payload ID: 4935
  Gene Symbol: DISC1
  Gene Name: disrupted in schizophrenia 1
  Uniprot ID: Q9NRI5
  ENST ID: ENST00000602873
  CDS Start-End: 54-659
ggaaggagcaggaggcagcccaggcggagcgggaggagctggcagcggggcgcatgccaggcgggggtcctcagggcgccccagccgccgccggcggcggcggcgtgagccaccgcgcagctgagacgttacaacaaagattagaagacctggaacaagagaaaatcagcctgcactttcaacttccttcaaggcagccagctcttagcagtttcctgggtcacctggcagcacaagtccaggctgccttgcgccgtggggccactcagcaggccagcggagatgacacccacaccccactgagaatggagccgaggctgttggaacccactgctcaggacagcttgcacgtgtccatcacgagacgagactggcttcttcaggaaaagcagcagctacagaaagaaatcgaagctctccaagcaaggatgtttgtgctggaagccaaagatcaacagctgagaagggaaatagaggagcaagagcagcaactccagtggcagggctgcgacctgaccccactggtgggccagctgtccctgggtcagctgcaggaggtcagcaaggccttgcaggacaccctggcctcagccggtcagattcccttccatgcagagccaccggaaaccataaggaggaaaccatttctggacggctaaagacctcaccgaggagattagatcattaacatcagagagagaagggctggagggactcctcagcaagctgttggtgttgagttccaggaatgtcaaaaagctgggaagtgttaaagaagattacaacagactgagaagagaagtggagcaccaggagactgcctatggtaggtagtgcacaactgttccccggcaagatattgatgatatttgttgtgttttgtggccaggcagaatgttctgtgccttatgtgaacgtcactgtgaagagcgtcatggagcacatggcccttttccttggggacatttttggcaggtgccttggcaaaccgaatggaattacttgtcagcttttgttttcatattcacatgtgacatcttttctttttctgttccctgtctcaacctgtgtttgctaatagccttgttattatttagagcagtctctcccttggcaaggtcttgagcattttctttgtgtgacaattatcttccttttgtcccttggctccgtctccttgtctgcacaatcatagactaaatcaggctgatctgagaaaattgagggaagaccataaagtggctcttctatgtgtggacttttctgagagcttctttccccaggaaggatgatgtagaagatgtgaatgccgccttagccaaagtgtctgcttgtcagaggagttcaagtgttcctgtgttctttccttttccagtcgttaggagtaactgagcttactctgagatttgcacccagagggatggtctcagaagacgctggttcagtgcaaattgagatggtaaaaacttatttcttaaaaaatggttcctaaataaatgtcatttactaaaacaaatgaaagaaatatatatatgaataaatggctatatttt

SEQ ID NO: 127426 - DNA, 2533 bp, Homo sapiens
  Payload ID: 4935
  Gene Symbol: DISC1
  Gene Name: disrupted in schizophrenia 1
  Uniprot ID: Q9NRI5
  ENST ID: ENST00000602700
  CDS Start-End: 54-1124
ggaaggagcaggaggcagcccaggcggagcgggaggagctggcagcggggcgcatgccaggcgggggtcctcagggcgccccagccgccgccggcggcggcggcgtgagccaccgcgcaggcagccgggattgcttaccacctgcagcgtgctttcggaggcggcggctggcacggaggccgggctacatgagaagctcgacagggcctgggatcgggttcctttccccagcagtgggcacactgttccggttcccaggaggggtgtctggcgaggagtcccaccactcggagtccagggccagacagtgtggccttgactcgagaggcctcttggtccggagccctgtttccaagagtgcagcagcccctactgtgacctctgtgagaggaacctcggcgcactttgggattcagctcagaggtggcaccagattgcctgacaggcttagctggccgtgtggccctgggagtgctgggtggcagcaagagtttgcagccatggatagttctgagaccctggacgccagctgggaggcagcctgcagcgatggagcaaggcgtgtccgggcagcaggctctctgccatcagcagagttgagtagcaacagctgcagccctggctgtggccctgaggtccccccaacccctcctggctctcacagtgcctttacctcaagctttagctttattcggctctcgcttggctctgccggggaacgtggagaagcagaaggctgcccaccatccagagaggctgagtcccattgccagagcccccaggagatgggagccaaagctgccagcttggacgggcctcacgaggacccgcgatgtctctctcggcccttcagtctcttggctacacgggtctctgcagacttggcccaggccgcaaggaacagctccaggccagagcgtgacatgcattctttaccagacatggaccctggctcctccagttctctggatccctcactggctggctgtggtggtgatgggagcagcggctcaggggatgcccactcttgggacaccctgctcaggaaatgggagccagtgctgcgggactgcctgctgagaaaccggaggcagatggagctgagacgttacaacaaagattagaagacctggaacaagagaaaatcagcctgcactttcaacttccttcaaggcagccagctcttagcagtttcctgggtcacctggcagcacaagtccaggctgccttgcgccgtggggccactcagcaggccagcggagatgacacccacaccccactgagaatggagccgaggctgttggaacccactgctcaggacagcttgcacgtgtccatcacgagacgagactggcttcttcaggaaaagcagcagctacagaaagaaatcgaagctctccaagcaaggatgtttgtgctggaagccaaagatcaacagctgagaagggaaatagaggagcaagagcagcaactccagtggcagggctgcgacctgaccccactggtgggccagctgtccctgggtcagctgcaggaggtcagcaaggccttgcaggacaccctggcctcagccggtcagattcccttccatgcagagccaccggaaaccataaggaggaaaccatttctggacggctaaagacctcaccgaggagattagatcattaacatcagagagagaagggctggagggactcctcagcaagctgttggtgttgagttccaggaatgtcaaaaagctgggaagtgttaaagaagattacaacagactgagaagagaagtggagcaccaggagactgcctatggtaggtagtgcacaactgttccccggcaagatattgatgatatttgttgtgttttgtggccaggcagaatgttctgtgccttatgtgaacgtcactgtgaagagcgtcatggagcacatggcccttttccttggggacatttttggcaggtgccttggcaaaccgaatggaattacttgtcagcttttgttttcatattcacatgtgacatcttttctttttctgttccctgtctcaacctgtgtttgctaatagccttgttattatttagagcagtctctcccttggcaaggtcttgagcattttctttgtgtgacaattatcttccttttgtcccttggctccgtctccttgtctgcacaatcatagactaaatcaggctgatctgagaaaattgagggaagaccataaagtggctcttctatgtgtggacttttctgagagcttctttccccaggaaggatgatgtagaagatgtgaatgccgccttagccaaagtgtctgcttgtcagaggagttcaagtgttcctgtgttctttccttttccagtcgttaggagtaactgagcttactctgagatttgcacccagagggatggtctcagaagacgctggttcagtgcaaattgagatggtaaaaacttatttcttaaaaaatggttcctaaataaatgtcatttactaaaacaaatgaaagaaatatatatatgaataaatggctatatttt

SEQ ID NO: 127427 - DNA, 2761 bp, Homo sapiens
  Payload ID: 4935
  Gene Symbol: DISC1
  Gene Name: disrupted in schizophrenia 1
  Uniprot ID: Q9NRI5
  ENST ID: ENST00000602281
  CDS Start-End: 54-2042
ggaaggagcaggaggcagcccaggcggagcgggaggagctggcagcggggcgcatgccaggcgggggtcctcagggcgccccagccgccgccggcggcggcggcgtgagccaccgcgcaggcagccgggattgcttaccacctgcagcgtgctttcggaggcggcggctggcacggaggccgggctacatgagaagctcgacagggcctgggatcgggttcctttccccagcagtgggcacactgttccggttcccaggaggggtgtctggcgaggagtcccaccactcggagtccagggccagacagtgtggccttgactcgagaggcctcttggtccggagccctgtttccaagagtgcagcagcccctactgtgacctctgtgagaggaacctcggcgcactttgggattcagctcagaggtggcaccagattgcctgacaggcttagctggccgtgtggccctgggagtgctgggtggcagcaagagtttgcagccatggatagttctgagaccctggacgccagctgggaggcagcctgcagcgatggagcaaggcgtgtccgggcagcaggctctctgccatcagcagagttgagtagcaacagctgcagccctggctgtggccctgaggtccccccaacccctcctggctctcacagtgcctttacctcaagctttagctttattcggctctcgcttggctctgccggggaacgtggagaagcagaaggctgcccaccatccagagaggctgagtcccattgccagagcccccaggagatgggagccaaagctgccagcttggacgggcctcacgaggacccgcgatgtctctctcggcccttcagtctcttggctacacgggtctctgcagacttggcccaggccgcaaggaacagctccaggccagagcgtgacatgcattctttaccagacatggaccctggctcctccagttctctggatccctcactggctggctgtggtggtgatgggagcagcggctcaggggatgcccactcttgggacaccctgctcaggaaatgggagccagtgctgcgggactgcctgctgagaaaccggaggcagatggaggtaatatccttaagattaaaacttcagaaacttcaggaagatgcagttgagaatgatgattatgataaagctgagacgttacaacaaagattagaagacctggaacaagagaaaatcagcctgcactttcaacttccttcaaggcagccagctcttagcagtttcctgggtcacctggcagcacaagtccaggctgccttgcgccgtggggccactcagcaggccagcggagatgacacccacaccccactgagaatggagccgaggctgttggaacccactgctcaggacagcttgcacgtgtccatcacgagacgagactggcttcttcaggaaaagcagcagctacagaaagaaatcgaagctctccaagcaaggatgtttgtgctggaagccaaagatcaacagctgagaagggaaatagaggagcaagagcagcaactccagtggcagggctgcgacctgaccccactggtgggccagctgtccctgggtcagctgcaggaggtcagcaaggccttgcaggacaccctggcctcagccggtcagattcccttccatgcagagccaccggaaaccataaggagcctccaggaaagaataaaatccctcaacttgtcacttaaagaaatcactactaaggtgtgtatgagtgagaaattctgcagcaccctgaggaagaaagttaacgatattgaaacccaactaccagccttgcttgaagccaaaatgcatgccatatcaggaaaccatttctggacggctaaagacctcaccgaggagattagatcattaacatcagagagagaagggctggagggactcctcagcaagctgttggtgttgagttccaggaatgtcaaaaagctgggaagtgttaaagaagattacaacagactgagaagagaagtggagcaccaggagactgcctatggtaggtagtgcacaactgttccccggcaagatattgatgatatttgttgtgttttgtggccaggcagaatgttctgtgccttatgtgaacgtcactgtgaagagcgtcatggagcacatggcccttttccttggggacatttttggcaggtgccttggcaaaccgaatggaattacttgtcagcttttgttttcatattcacatgtgacatcttttctttttctgttccctgtctcaacctgtgtttgctaatagccttgttattatttagagcagtctctcccttggcaaggtcttgagcattttctttgtgtgacaattatcttccttttgtcccttggctccgtctccttgtctgcacaatcatagactaaatcaggctgatctgagaaaattgagggaagaccataaagtggctcttctatgtgtggacttttctgagagcttctttccccaggaaggatgatgtagaagatgtgaatgccgccttagccaaagtgtctgcttgtcagaggagttcaagtgttcctgtgttctttccttttccagtcgttaggagtaactgagcttactctgagatttgcacccagagggatggtctcagaagacgctggttcagtgcaaattgagatggtaaaaacttatttcttaaaaaatggttcctaaataaatgtcatttactaaaacaaatgaaagaaatatatatatgaataaatggctatatttt

SEQ ID NO: 127428 - DNA, 2691 bp, Homo sapiens
  Payload ID: 4935
  Gene Symbol: DISC1
  Gene Name: disrupted in schizophrenia 1
  Uniprot ID: Q9NRI5
  ENST ID: ENST00000602822
  CDS Start-End: 54-1124
ggaaggagcaggaggcagcccaggcggagcgggaggagctggcagcggggcgcatgccaggcgggggtcctcagggcgccccagccgccgccggcggcggcggcgtgagccaccgcgcaggcagccgggattgcttaccacctgcagcgtgctttcggaggcggcggctggcacggaggccgggctacatgagaagctcgacagggcctgggatcgggttcctttccccagcagtgggcacactgttccggttcccaggaggggtgtctggcgaggagtcccaccactcggagtccagggccagacagtgtggccttgactcgagaggcctcttggtccggagccctgtttccaagagtgcagcagcccctactgtgacctctgtgagaggaacctcggcgcactttgggattcagctcagaggtggcaccagattgcctgacaggcttagctggccgtgtggccctgggagtgctgggtggcagcaagagtttgcagccatggatagttctgagaccctggacgccagctgggaggcagcctgcagcgatggagcaaggcgtgtccgggcagcaggctctctgccatcagcagagttgagtagcaacagctgcagccctggctgtggccctgaggtccccccaacccctcctggctctcacagtgcctttacctcaagctttagctttattcggctctcgcttggctctgccggggaacgtggagaagcagaaggctgcccaccatccagagaggctgagtcccattgccagagcccccaggagatgggagccaaagctgccagcttggacgggcctcacgaggacccgcgatgtctctctcggcccttcagtctcttggctacacgggtctctgcagacttggcccaggccgcaaggaacagctccaggccagagcgtgacatgcattctttaccagacatggaccctggctcctccagttctctggatccctcactggctggctgtggtggtgatgggagcagcggctcaggggatgcccactcttgggacaccctgctcaggaaatgggagccagtgctgcgggactgcctgctgagaaaccggaggcagatggagctgagacgttacaacaaagattagaagacctggaacaagagaaaatcagcctgcactttcaacttccttcaaggcagccagctcttagcagtttcctgggtcacctggcagcacaagtccaggctgccttgcgccgtggggccactcagcaggccagcggagatgacacccacaccccactgagaatggagccgaggctgttggaacccactgctcaggacagcttgcacgtgtccatcacgagacgagactggcttcttcaggaaaagcagcagctacagaaagaaatcgaagctctccaagcaaggatgtttgtgctggaagccaaagatcaacagctgagaagggaaatagaggagcaagagcagcaactccagtggcagggctgcgacctgaccccactggtgggccagctgtccctgggtcagctgcaggaggtcagcaaggccttgcaggacaccctggcctcagccggtcagattcccttccatgcagagccaccggaaaccataaggagcctccaggaaagaataaaatccctcaacttgtcacttaaagaaatcactactaaggtgtgtatgagtgagaaattctgcagcaccctgaggaagaaagttaacgatattgaaacccaactaccagccttgcttgaagccaaaatgcatgccatatcaggaaaccatttctggacggctaaagacctcaccgaggagattagatcattaacatcagagagagaagggctggagggactcctcagcaagctgttggtgttgagttccaggaatgtcaaaaagctgggaagtgttaaagaagattacaacagactgagaagagaagtggagcaccaggagactgcctatggtaggtagtgcacaactgttccccggcaagatattgatgatatttgttgtgttttgtggccaggcagaatgttctgtgccttatgtgaacgtcactgtgaagagcgtcatggagcacatggcccttttccttggggacatttttggcaggtgccttggcaaaccgaatggaattacttgtcagcttttgttttcatattcacatgtgacatcttttctttttctgttccctgtctcaacctgtgtttgctaatagccttgttattatttagagcagtctctcccttggcaaggtcttgagcattttctttgtgtgacaattatcttccttttgtcccttggctccgtctccttgtctgcacaatcatagactaaatcaggctgatctgagaaaattgagggaagaccataaagtggctcttctatgtgtggacttttctgagagcttctttccccaggaaggatgatgtagaagatgtgaatgccgccttagccaaagtgtctgcttgtcagaggagttcaagtgttcctgtgttctttccttttccagtcgttaggagtaactgagcttactctgagatttgcacccagagggatggtctcagaagacgctggttcagtgcaaattgagatggtaaaaacttatttcttaaaaaatggttcctaaataaatgtcatttactaaaacaaatgaaagaaatatatatatgaataaatggctatatttt

SEQ ID NO: 127429 - DNA, 6927 bp, Homo sapiens
  Payload ID: 4935
  Gene Symbol: DISC1
  Gene Name: disrupted in schizophrenia 1
  ENST ID: ENST00000622252
  CDS Start-End: 54-1382
ggaaggagcaggaggcagcccaggcggagcgggaggagctggcagcggggcgcatgccaggcgggggtcctcagggcgccccagccgccgccggcggcggcggcgtgagccaccgcgcaggcagccgggattgcttaccacctgcagcgtgctttcggaggcggcggctggcacggaggccgggctacatgagaagctcgacagggcctgggatcgggttcctttccccagcagtgggcacactgttccggttcccaggaggggtgtctggcgaggagtcccaccactcggagtccagggccagacagtgtggccttgactcgagaggcctcttggtccggagccctgtttccaagagtgcagcagcccctactgtgacctctgtgagaggaacctcggcgcactttgggattcagctcagaggtggcaccagattgcctgacaggcttagctggccgtgtggccctgggagtgctgggtggcagcaagagtttgcagccatggatagttctgagaccctggacgccagctgggaggcagcctgcagcgatggagcaaggcgtgtccgggcagcaggctctctgccatcagcagagttgagtagcaacagctgcagccctggctgtggccctgaggtccccccaacccctcctggctctcacagtgcctttacctcaagctttagctttattcggctctcgcttggctctgccggggaacgtggagaagcagaaggctgcccaccatccagagaggctgagtcccattgccagagcccccaggagatgggagccaaagctgccagcttggacgggcctcacgaggacccgcgatgtctctctcggcccttcagtctcttggctacacgggtctctgcagacttggcccaggccgcaaggaacagctccaggccagagcgtgacatgcattctttaccagacatggaccctggctcctccagttctctggatccctcactggctggctgtggtggtgatgggagcagcggctcaggggatgcccactcttgggacaccctgctcaggaaatgggagccagtgctgcgggactgcctgctgagaaaccggaggcagatggaggtaatatccttaagattaaaacttcagaaacttcaggaagatgcagttgagaatgatgattatgataaagctgagacgttacaacaaagattagaagacctggaacaagagaaaatcagcctgcactttcaacttccttcaaggcagccagctcttagcagtttcctgggtcacctggcagcacaagtccaggctgccttgcgccgtggggccactcagcaaaagaaatcgaagctctccaagcaaggatgtttgtgctggaagccaaagatcaacagctgagaagggaaatagaggagcaagagcagcaactccagtggcagggctgcgacctgaccccactggtgggccagctgtccctgggtcagctgcaggaggtcagcaaggccttgcaggacaccctggcctcagccggtcagattcccttccatgcagagccaccggaaaccataaggagcctccaggaaagaataaaatccctcaacttgtcacttaaagaaatcactactaaggtgtgtatgagtgagaaattctgcagcaccctgaggaagaaagttaacgatattgaaacccaactaccagccttgcttgaagccaaaatgcatgccatatcaggaaaccatttctggacggctaaagacctcaccgaggagattagatcattaacatcagagagagaagggctggagggactcctcagcaagctgttggtgttgagttccaggaatgtcaaaaagctgggaagtgttaaagaagattacaacagactgagaagagaagtggagcaccaggagactgcctatgaaacaagtgtgaaggaaaatactatgaagtacatggaaacacttaagaataaactgtgcagctgcaagtgtccactgcttgggaaagtgtgggaagctgacttggaagcttgtcgattgcttatccagagcctacagctccaggaagccaggggaagcctgtctgtagaagatgagaggcagatggatgacttagagggagctgctcctcctattccccccaggctccactccgaggataaaaggaagacccctttgaaggtattggaagaatggaagactcacctcatcccctctctgcactgtgctggaggtgaacagaaagaggaatcttacatcctttctgcagaacttggagaaaagtgtgaagacataggcaagaagctattgtacttggaagatcaacttcacacagcaatccacagtcatgatgaagatctcattcagtctctcaggagggagctccagatggtgaaggaaactctgcaggccatgatcctgcagctccagccagcaaaggaggcgggagaaagagaagctgcagcttcctgcatgacagctggtgtccacgaagcacaagcctgaggagtgacgggatgggggagggaggtgggccaccatgtttggacccggggggctgctcttccctcccccgccatagctaagatgcctgaatcaattacggagatacagagccttgaggtctttcagtggaaaggtggttcatgttcattctcatcagtgtgaaactgaggagtctgcaatttggaatatggagagagagactgatttgctgaatttccttctaaatgtcactcaaaaatttcttttccatgtcattcttgggaatgtcttccacaggatttgagaatagtttcatctcagcccccattagagagaagttggggtgaattctggaaaaatgtctctttttcctgtgccatttgccttctgctgcaacgaaaatatttcctgattcaagattctataaaaaggaaaccaagcataagactctgtcatcatacctgttacacgttcctacaggtgcacaatctaagagagctaattaacctcagagtctggagttaacagcttttcaccttacttctcctgtgatctaatattatcttagaaaaattaatatgcaatttccaaaagatattttggtaagacaacaacctcccagtgatatgccacctttcaattttccttttgtggcaatgattgcatctgaagaaaggatccctgagagtctctgtttcatcaggacattctgaaatttacccacagtgaggctgtggatggatcaggggacctgtataaaatgtttgagcctgttccattttcccgtggaacctgtttcactcaatgccaggcagtgcagcatttaggaaagcagtgcagtactcagtaaggcagtgcagtactcagtaacacaatacagtactcaggcagtgcagtactcagtaagacagtgcagtgctcagtaaggcagtgcaatactcagtaacagtgtagtactcagtaacagtgaagtactcagtaatacagtacagtattcagtaaggcagtgaagtactcagtaatacaatacagtactcagttaggcagtgcagtactcaggaatgcagcacagtactcaggcagtgcaatactcagtgcggtactcagtaacacagtgcagtactcagtaacagtgcagtactcagtaacagtgcagtactcagtaaggcagtgcagtactcagtaacacagtgcagtactcagtaatacagtacagtactcagtaaggcagtatggtactcagtaaagcaatgcaatgctcagtaacacagtgcagtgctcaataaggcagtgcagtgctcagtaaggcagtgaattgcttagtaacacagtgtagtgctcagtaggacagcatagtactcagtaacacagggcagctagtactcagtactataagtactgagtacttatataggcaatgtagtactcagtaaatcagtgcagtactcagtaatgcaagggcatttcaggctcctgctgggctgcttctttggcccagctgggactcctattgagacagctgcaaaacaggctgatttcaattaggcagcacttcccaaagtgcactgaggaaggtggccccaagagaagctctctaaacaaaggagtaccctctctggtcaagtacctttggtaaatacaccataccataatatctgcttggagaaccacaatgcacattagcatattagtctgagagagaacttatagtaaggaaactcacttgattttatctaacctcaaactttccaagtttaatggatcgtgaatttttttcatgtaactcctattcatatcccatagatctagtattgtacagcactgcattctctgaggaagtcccagtccaaactctgatttacatcactttagaaaccacactcacacttttgcagagtgttgagcttaataactacctgccacagattggtaaatttaatccagtggttgttctgtttgtgcttctgttctcatttatgtgtttagggatagtgaggttcctgccttcactaggatccacggatatgagaccatttttgtcatttcctgaagtcacactggcgtttccagaaggcatctggtgctttgctcagccttccatgctgtgcagcacttctgtcctcagtcaaggagatggccatgcttaagccagcaattggctggggtccaggaaacaaagcaaaagcacaatatgtgaatgtgctgattgtgttccctatggctttatctcgagcaaaatacactctacatattttaataataagtataattagcttgttcctggacttcattttcaatgatgaaccaaattcctgaattatttataattgtgtctaaagaaaattatgaactggtcacatggcacttggaatccttgagttaattccagtgaagcaaaacttgggaagagtcaggattggccacattgccaataacaaattcctacttcgacatatgtcttttcaaaaagcctcccagacacaagacatcttaaccgtcactagcccaagtgttttgtattactcagacaccatcatgaaataattctgtgaggtcatgatgtatttgaaaattctgcaagttaataactgccttgaattgtttgaacccgaaataagggttctttggtacctctagtagatagtgtgttcatttccctgctgcaaattttgaagtatttgggcaggtgagtcatgttttaaccacaagccataactcatctgttgtctttgcttggtcttagagtatcattcagaaagtccgctaagggccagcgtgcttcttctggctacacaaccttctcaggacaagcccactgtcttaagccactttgaccctgggagacacaggactgtgtatcctcaatcatactatacagcagtttttgtcaggggaacataaaaatatccaagagaggttagggcttagatttaaaagcatcaaaacaacaacaatggaaatttatgttggcgatagccaagaccacaagcaaaagcacatactggaaatgatgagttagaatctgatttgactgggatgttttatgagaatgtaagtgtgatattatactgtctgccttgctggaatgctggctttcaaatggtcacccatttttctttcactggcctgagttaggacatgctatcagtaatagtcccagttccatccaactttctgaaatttcatttttttttttgagatggagtctctctctgtcacccaagttggagtgcagtggccccgcaatctcggctcactgcaacctctacctcccaggttcaagctattctactgcctcagcctcccaagtagctggggttacaggcatttgccaccgggccctgatgatttttgtatttttagtagagacagggcttcaccatgttggctaggagggtctcaaactcctgacctcaggcgatccacccccacctcggcttcccaaagtgctgagattacaggtgtgagccaccgcacccggccaactttctgaaatttcaaaactgaattgatccttctccaaattagtatatactattggaaacttgtctttccctgcagtaaggctggtttccccaccccagaaacatgtaacggttggtaccatgctaagcccttgccatgctaagccctttacagtcatatcctataatccccatatcaaccttataaggaaggtgtttgtagatgatgcaactgagccttaagaggactaattccctttttctaaggcacagagctggtaaaatgtgaagtaatagtgaacctaacagtcagagacaggcagcatgctcttaactagtgctcttcctaaagttcctttaatgtccttttgagattttgagccatggaacttacttgttcacctggctaagaactcatggccactgtggaaatcttggttagggagtcaaagaaactgagcctggggcaaacgaggcttcccacactgccaggggagcctcactgtgaagtctaggctcagacaggcatcaacaaacctattcaccccaccatcatcctgatctaaccattccccagtcatcccaggaaaaccactcacagcctgacactgggctgactttcttgaagatcctcatccaattggtgtttttcagaagtgttccaatattatgaattctgtgttgtggagaaaagcaaccatgcatttactggtcaatgccttcttgtatatgtaattcaatacttttacttttaatatcctcaccttatctaatctttgaattttgtcatgtaatttattgcttcattaaggttactttttgttatacaaaataaaagctgatatccaaggcatggtgcatcttgatgattttttgtcctttgaagtatggatgatagaaaaatgtatcaggtttattcatctcatctttctgttacaggatgattaattgtacagttacatcacacgaaacatttataataaagtcatgctttag

SEQ ID NO: 127430 - DNA, 6689 bp, Homo sapiens
  Payload ID: 4935
  Gene Symbol: DISC1
  Gene Name: disrupted in schizophrenia 1
  ENST ID: ENST00000620189
  CDS Start-End: 54-2252
ggaaggagcaggaggcagcccaggcggagcgggaggagctggcagcggggcgcatgccaggcgggggtcctcagggcgccccagccgccgccggcggcggcggcgtgagccaccgcgcaggcagccgggattgcttaccacctgcagcgtgctttcggaggcggcggctggcacggaggccgggctacatgagaagctcgacagggcctgggatcgggttcctttccccagcagtgggcacactgttccggttcccaggaggggtgtctggcgaggagtcccaccactcggagtccagggccagacagtgtggccttgactcgagaggcctcttggtccggagccctgtttccaagagtgcagcagcccctactgtgacctctgtgagaggaacctcggcgcactttgggattcagctcagaggtggcaccagattgcctgacaggcttagctggccgtgtggccctgggagtgctgggtggcagcaagagtttgcagccatggatagttctgagaccctggacgccagctgggaggcagcctgcagcgatggagcaaggcgtgtccgggcagcaggctctctgccatcagcagagttgagtagcaacagctgcagccctggctgtggccctgaggtccccccaacccctcctggctctcacagtgcctttacctcaagctttagctttattcggctctcgcttggctctgccggggaacgtggagaagcagaaggctgcccaccatccagagaggctgagtcccattgccagagcccccaggagatgggagccaaagctgccagcttggacgggcctcacgaggacccgcgatgtctctctcggcccttcagtctcttggctacacgggtctctgcagacttggcccaggccgcaaggaacagctccaggccagagcgtgacatgcattctttaccagacatggaccctggctcctccagttctctggatccctcactggctggctgtggtggtgatgggagcagcggctcaggggatgcccactcttgggacaccctgctcaggaaatgggagccagtgctgcgggactgcctgctgagaaaccggaggcagatggaggtaatatccttaagattaaaacttcagaaacttcaggaagatgcagttgagaatgatgattatgataaagctgagacgttacaacaaagattagaagacctggaacaagagaaaatcagcctgcactttcaacttccttcaaggcagccagctcttagcagtttcctgggtcacctggcagcacaagtccaggctgccttgcgccgtggggccactcagcacctccaggaaagaataaaatccctcaacttgtcacttaaagaaatcactactaaggtgtgtatgagtgagaaattctgcagcaccctgaggaagaaagttaacgatattgaaacccaactaccagccttgcttgaagccaaaatgcatgccatatcaggaaaccatttctggacggctaaagacctcaccgaggagattagatcattaacatcagagagagaagggctggagggactcctcagcaagctgttggtgttgagttccaggaatgtcaaaaagctgggaagtgttaaagaagattacaacagactgagaagagaagtggagcaccaggagactgcctatgaaacaagtgtgaaggaaaatactatgaagtacatggaaacacttaagaataaactgtgcagctgcaagtgtccactgcttgggaaagtgtgggaagctgacttggaagcttgtcgattgcttatccagagcctacagctccaggaagccaggggaagcctgtctgtagaagatgagaggcagatggatgacttagagggagctgctcctcctattccccccaggctccactccgaggataaaaggaagacccctttgaaggtattggaagaatggaagactcacctcatcccctctctgcactgtgctggaggtgaacagaaagaggaatcttacatcctttctgcagaacttggagaaaagtgtgaagacataggcaagaagctattgtacttggaagatcaacttcacacagcaatccacagtcatgatgaagatctcattcattctctcaggagggagctccagatggtgaaggaaactctgcaggccatgatcctgcagctccagccagcaaaggaggcgggagaaagagaagctgcagcttcctgcatgacagctggtgtccacgaagcacaagcctgaggagtgacgggatgggggagggaggtgggccaccatgtttggacccggggggctgctcttccctcccccgccatagctaagatgcctgaatcaattacggagatacagagccttgaggtctttcagtggaaaggtggttcatgttcattctcatcagtgtgaaactgaggagtctgcaatttggaatatggagagagagactgatttgctgaatttccttctaaatgtcactcaaaaatttcttttccatgtcattcttgggaatgtcttccacaggatttgagaatagtttcatctcagcccccattagagagaagttggggtgaattctggaaaaatgtctctttttcctgtgccatttgccttctgctgcaacgaaaatatttcctgattcaagattctataaaaaggaaaccaagcataagactctgtcatcatacctgttacacgttcctacaggtgcacaatctaagagagctaattaacctcagagtctggagttaacagcttttcaccttacttctcctgtgatctaatattatcttagaaaaattaatatgcaatttccaaaagatattttggtaagacaacaacctcccagtgatatgccacctttcaattttccttttgtggcaatgattgcatctgaagaaaggatccctgagagtctctgtttcatcaggacattctgaaatttacccacagtgaggctgtggatggatcaggggacctgtataaaatgtttgagcctgttccattttcccgtggaacctgtttcactcaatgccaggcagtgcagcatttaggaaagcagtgcagtactcagtaaggcagtgcagtactcagtaacacaatacagtactcaggcagtgcagtactcagtaagacagtgcagtgctcagtaaggcagtgcaatactcagtaacagtgtagtactcagtaacagtgaagtactcagtaatacagtacagtattcagtaaggcagtgaagtactcagtaatacaatacagtactcagttaggcagtgcagtactcaggaatgcagcacagtactcaggcagtgcaatactcagtgcggtactcagtaacacagtgcagtactcagtaacagtgcagtactcagtaacagtgcagtactcagtaaggcagtgcagtactcagtaacacagtgcagtactcagtaatacagtacagtactcagtaaggcagtatggtactcagtaaagcaatgcaatgctcagtaacacagtgcagtgctcaataaggcagtgcagtgctcagtaaggcagtgaattgcttagtaacacagtgtagtgctcagtaggacagcatagtactcagtaacacagggcagctagtactcagtactataagtactgagtacttatataggcaatgtagtactcagtaaatcagtgcagtactcagtaatgcaagggcatttcaggctcctgctgggctgcttctttggcccagctgggactcctattgagacagctgcaaaacaggctgatttcaattaggcagcacttcccaaagtgcactgaggaaggtggccccaagagaagctctctaaacaaaggagtaccctctctggtcaagtacctttggtaaatacaccataccataatatctgcttggagaaccacaatgcacattagcatattagtctgagagagaacttatagtaaggaaactcacttgattttatctaacctcaaactttccaagtttaatggatcgtgaatttttttcatgtaactcctattcatatcccatagatctagtattgtacagcactgcattctctgaggaagtcccagtccaaactctgatttacatcactttagaaaccacactcacacttttgcagagtgttgagcttaataactacctgccacagattggtaaatttaatccagtggttgttctgtttgtgcttctgttctcatttatgtgtttagggatagtgaggttcctgccttcactaggatccacggatatgagaccatttttgtcatttcctgaagtcacactggcgtttccagaaggcatctggtgctttgctcagccttccatgctgtgcagcacttctgtcctcagtcaaggagatggccatgcttaagccagcaattggctggggtccaggaaacaaagcaaaagcacaatatgtgaatgtgctgattgtgttccctatggctttatctcgagcaaaatacactctacatattttaataataagtataattagcttgttcctggacttcattttcaatgatgaaccaaattcctgaattatttataattgtgtctaaagaaaattatgaactggtcacatggcacttggaatccttgagttaattccagtgaagcaaaacttgggaagagtcaggattggccacattgccaataacaaattcctacttcgacatatgtcttttcaaaaagcctcccagacacaagacatcttaaccgtcactagcccaagtgttttgtattactcagacaccatcatgaaataattctgtgaggtcatgatgtatttgaaaattctgcaagttaataactgccttgaattgtttgaacccgaaataagggttctttggtacctctagtagatagtgtgttcatttccctgctgcaaattttgaagtatttgggcaggtgagtcatgttttaaccacaagccataactcatctgttgtctttgcttggtcttagagtatcattcagaaagtccgctaagggccagcgtgcttcttctggctacacaaccttctcaggacaagcccactgtcttaagccactttgaccctgggagacacaggactgtgtatcctcaatcatactatacagcagtttttgtcaggggaacataaaaatatccaagagaggttagggcttagatttaaaagcatcaaaacaacaacaatggaaatttatgttggcgatagccaagaccacaagcaaaagcacatactggaaatgatgagttagaatctgatttgactgggatgttttatgagaatgtaagtgtgatattatactgtctgccttgctggaatgctggctttcaaatggtcacccatttttctttcactggcctgagttaggacatgctatcagtaatagtcccagttccatccaactttctgaaatttcatttttttttttgagatggagtctctctctgtcacccaagttggagtgcagtggccccgcaatctcggctcactgcaacctctacctcccaggttcaagctattctactgcctcagcctcccaagtagctggggttacaggcatttgccaccgggccctgatgatttttgtatttttagtagagacagggcttcaccatgttggctaggagggtctcaaactcctgacctcaggcgatccacccccacctcggcttcccaaagtgctgagattacaggtgtgagccaccgcacccggccaactttctgaaatttcaaaactgaattgatccttctccaaattagtatatactattggaaacttgtctttccctgcagtaaggctggtttccccaccccagaaacatgtaacggttggtaccatgctaagcccttgccatgctaagccctttacagtcatatcctataatccccatatcaaccttataaggaaggtgtttgtagatgatgcaactgagccttaagaggactaattccctttttctaaggcacagagctggtaaaatgtgaagtaatagtgaacctaacagtcagagacaggcagcatgctcttaactagtgctcttcctaaagttcctttaatgtccttttgagattttgagccatggaacttacttgttcacctggctaagaactcatggccactgtggaaatcttggttagggagtcaaagaaactgagcctggggcaaacgaggcttcccacactgccaggggagcctcactgtgaagtctaggctcagacaggcatcaacaaacctattcaccccaccatcatcctgatctaaccattccccagtcatcccaggaaaaccactcacagcctgacactgggctgactttcttgaagatcctcatccaattggtgtttttcagaagtgttccaatattatgaattctgtgttgtggagaaaagcaaccatgcatttactggtcaatgccttcttgtatatgtaattcaatacttttacttttaatatcctcaccttatctaatctttgaattttgtcatgtaatttattgcttcattaaggttactttttgttatacaaaataaaagctgatatccaaggcatggtgcatcttgatgattttttgtcctttgaagtatggatgatagaaaaatgtatcaggtttattcatctcatctttctgttacaggatgattaattgtacagttacatcacacgaaacatttataataaagtcatgcttt

SEQ ID NO: 127431 - DNA, 2363 bp, Homo sapiens
  Payload ID: 4935
  Gene Symbol: DISC1
  Gene Name: disrupted in schizophrenia 1
  Uniprot ID: Q9NRI5
  ENST ID: ENST00000628350
  CDS Start-End: 54-1733
ggaaggagcaggaggcagcccaggcggagcgggaggagctggcagcggggcgcatgccaggcgggggtcctcagggcgccccagccgccgccggcggcggcggcgtgagccaccgcgcaggcagccgggattgcttaccacctgcagcgtgctttcggaggcggcggctggcacggaggccgggctacatgagaagctcgacagggcctgggatcgggttcctttccccagcagtgggcacactgttccggttcccaggaggggtgtctggcgaggagtcccaccactcggagtccagggccagacagtgtggccttgactcgagaggcctcttggtccggagccctgtttccaagagtgcagcagcccctactgtgacctctgtgagaggaacctcggcgcactttgggattcagctcagaggtggcaccagattgcctgacaggcttagctggccgtgtggccctgggagtgctgggtggcagcaagagtttgcagccatggatagttctgagaccctggacgccagctgggaggcagcctgcagcgatggagcaaggcgtgtccgggcagcaggctctctgccatcagcagagttgagtagcaacagctgcagccctggctgtggccctgaggtccccccaacccctcctggctctcacagtgcctttacctcaagctttagctttattcggctctcgcttggctctgccggggaacgtggagaagcagaaggctgcccaccatccagagaggctgagtcccattgccagagcccccaggagatgggagccaaagctgccagcttggacgggcctcacgaggacccgcgatgtctctctcggcccttcagtctcttggctacacgggtctctgcagacttggcccaggccgcaaggaacagctccaggccagagcgtgacatgcattctttaccagacatggaccctggctcctccagttctctggatccctcactggctggctgtggtggtgatgggagcagcggctcaggggatgcccactcttgggacaccctgctcaggaaatgggagccagtgctgcgggactgcctgctgagaaaccggaggcagatggaggtaatatccttaagattaaaacttcagaaacttcaggaagatgcagttgagaatgatgattatgataaagctgagacgttacaacaaagattagaagacctggaacaagagaaaatcagcctgcactttcaacttccttcaaggcagccagctcttagcagtttcctgggtcacctggcagcacaagtccaggctgccttgcgccgtggggccactcagcaggccagcggagatgacacccacaccccactgagaatggagccgaggctgttggaacccactgctcaggacagcttgcacgtgtccatcacgagacgagactggcttcttcaggaaaagcagcagctacagaaagaaatcgaagctctccaagcaaggatgtttgtgctggaagccaaagatcaacagctgagaagggaaatagaggagcaagagcagcaactccagtggcagggctgcgacctgaccccactggtgggccagctgtccctgggtcagctgcaggaggtcagcaaggccttgcaggacaccctggcctcagccggtcagattcccttccatgcagagccaccggaaaccataaggagaaacaagtgtgaaggaaaatactatgaagtacatggaaacacttaagaataaactgtgcaggtaaggataataatttctgtatttcagactccgtagcacatctagattctttattataacagaatttagttaaatcgatgaaaaaggctggccagtttctctaataaattaacaaagaaagacacaaaaaagccttttgaaccccatcagtgaaagagcaggtgccagccctcatcttgtcttttaaaaagtaagtagattaagatgtttaaaagtgtcttggagagatcacaggagagttttcatgttccataagagaagaatcttctttactatattaaattcagaattcattccttagtctgtttttcccttttttaaactttagtgtttgaggggggtcttaaggattttaaggcggtttatacatggtttggaataatatagaaatgcacgtcttaggttctgttttgaatcctgaatcaaaaccagcatgaaaatttctggttgctttttttaaaacccaattaggaattcatctttgagaaatgtcagggatgctgcagcatgacaagatgtttctggcttttgtggatgtgtgcttaggaaaataaatcccagtcatcagaatctgttcctaattaaggcaacaagtactagagtggaatatgcgct

SEQ ID NO: 127432 - DNA, 2130 bp, Homo sapiens
  Payload ID: 4936
  Gene Symbol: DLX1
  Gene Name: distal-less homeobox 1
  Uniprot ID: P56177
  ENST ID: ENST00000341900
  CDS Start-End: 143-532
gacaaactccattttcttatgaatggaaagtgaaaacccctgttccgcttaaattgggttccttcctgtcctgagaaacatagagacccccaaaagggaagcagaggagagaaagtcccacacccagaccccgcgagaagagatgaccatgaccaccatgccagaaagtctcaacagccccgtgtcgggcaaggcggtgtttatggagtttgggccgcccaaccagcaaatgtctccttctcccatgtcccacgggcactactccatgcactgtttacactcggcgggccattcgcagcccgacggcgcctacagctcagcctcgtccttctcccgaccgctgggctacccctacgtcaactcggtcagcagccacgcatccagcccctacatcagttcggtgcagtcctacccgggcagcgccagcctcgcccagagccgcctggaggacccaggtcaagatctggttccaaaacaagcgatccaagttcaagaagctgatgaagcagggtggggcggctctggagggtagtgcgttggccaacggtcgggccctgtctgctggctccccacccgtgccgcccggctggaaccctaactcttcatccgggaagggctcaggaggaaacgcgggctcctatatccccagctacacatcgtggtacccttcagcgcaccaagaagctatgcagcaaccccaacttatgtgaggttgcccgcccgtctccttcttgtctccccggcccaggtccctcccgcctccaggtccatccatcccgtccggaaaagaaggacccagagggaagaaggaacagtggaggcgggacgccctccatctcctcggagccccgcgaggtccggcccagcaacttcccggcatccgcgctctagcctgaaccctggcctgggccgagcagtggcagcagagagtggcctcggagggaagccactgccacctgagacagcccaagcagcaagataaacccgctccacccgacccgccgaccttcagctttgtgggactatcaggaaaaaacaaaacaaaaacaaaatgtagaaaaagcaaaagctcttttctgtcctgtcagtctcctgtctccttttgctctgtctgtgcgctggtaaagtccaggtcctcatccgtccgctgtcctcattctgcggcctcagcaaaaagccacaaggtctgagcggcccgggtcctgccgggctgaccatctccggatcctgggacactctgcctgaccatctgtgtagctggtgtgggaatctgggggcattggagggagggggttttatttattgagaaatggacttcgcctgaggctgtttgccaattcagggttctgctgggcgcaaggaacgcactgttcaaacgcactgtttactttaagcgcacggggagaaacgaataaggaggacgtggtgatttttaatttatacagtaacttttgtacttctctggtatggagagtttggagccgaatgatttgcattttttacatgtccgacattatttaataaataatttttaaaagaaaagaacgataaatgaagccaacatgattttctcatttcgggaggaactctgttgcttcgcctggacaagaaggaaaatgctgatttcctccttgggtagaaagagggagcgagggcaaatggggagtagagagaaaacaggcgagaacaagcactctaattccagtgggctttaaaataagacaaaatcagctttacaacaatccctagaggctcgaccacagaataatgccagtcaccaccctgaacgcacaatctccagtgcaggatctaatgactgtacatattattgttattattattattgttattattgttgttctgtaaacatgttgcacaagcttagcctttttgcgttctgttgtgtgtggctgtaaaaccccatgctttgtgaaatgagaatcttgacatttttcttgtgaaatttggaaaatgtgatcaattgaaatcaactgtgttttgtgttctctatgtcaaagtttagttttatattgagaatgttaacttattgctttgtatcttgggaaaaaaactttgtaaataagttataaagtttctttgagacagtaaaattatgatttcttgaaagaa

SEQ ID NO: 127433 - DNA, 2640 bp, Homo sapiens
  Payload ID: 4936
  Gene Symbol: DLX1
  Gene Name: distal-less homeobox 1
  Uniprot ID: P56177
  ENST ID: ENST00000361725
  CDS Start-End: 453-1220
gggaggccgatgagccgcgggccgcaggggccccggcgcagacgccgcagcccattgtgcttcctgcccggcgcgctctgttgcagaggagccccggccgggaagtgtggatgcgtcttacccgaggccgggccgcctcgcccgctctagtccagcggagcccgagcgcctcggaccaatccccagtgattatgcaagacagcggaccaatcagctccgccagctcatgaatatttatgaccttcgctgagtcaaagctttgaaccgagtttggggagctcagcagcatcatgcttagacttttcaaagagacaaactccattttcttatgaatggaaagtgaaaacccctgttccgcttaaattgggttccttcctgtcctgagaaacatagagacccccaaaagggaagcagaggagagaaagtcccacacccagaccccgcgagaagagatgaccatgaccaccatgccagaaagtctcaacagccccgtgtcgggcaaggcggtgtttatggagtttgggccgcccaaccagcaaatgtctccttctcccatgtcccacgggcactactccatgcactgtttacactcggcgggccattcgcagcccgacggcgcctacagctcagcctcgtccttctcccgaccgctgggctacccctacgtcaactcggtcagcagccacgcatccagcccctacatcagttcggtgcagtcctacccgggcagcgccagcctcgcccagagccgcctggaggacccaggggcggactcggagaagagcacggtggtggaaggcggtgaagtgcgcttcaatggcaagggaaaaaagatccgtaaacccaggacgatttattccagtttgcagttgcaggctttgaaccggaggttccagcaaactcagtacctagctctgccggagagggcggagctcgcggcctctttgggactcacacagactcaggtcaagatctggttccaaaacaagcgatccaagttcaagaagctgatgaagcagggtggggcggctctggagggtagtgcgttggccaacggtcgggccctgtctgctggctccccacccgtgccgcccggctggaaccctaactcttcatccgggaagggctcaggaggaaacgcgggctcctatatccccagctacacatcgtggtacccttcagcgcaccaagaagctatgcagcaaccccaacttatgtgaggttgcccgcccgtctccttcttgtctccccggcccaggtccctcccgcctccaggtccatccatcccgtccggaaaagaaggacccagagggaagaaggaacagtggaggcgggacgccctccatctcctcggagccccgcgaggtccggcccagcaacttcccggcatccgcgctctagcctgaaccctggcctgggccgagcagtggcagcagagagtggcctcggagggaagccactgccacctgagacagcccaagcagcaagataaacccgctccacccgacccgccgaccttcagctttgtgggactatcaggaaaaaacaaaacaaaaacaaaatgtagaaaaagcaaaagctcttttctgtcctgtcagtctcctgtctccttttgctctgtctgtgcgctggtaaagtccaggtcctcatccgtccgctgtcctcattctgcggcctcagcaaaaagccacaaggtctgagcggcccgggtcctgccgggctgaccatctccggatcctgggacactctgcctgaccatctgtgtagctggtgtgggaatctgggggcattggagggagggggttttatttattgagaaatggacttcgcctgaggctgtttgccaattcagggttctgctgggcgcaaggaacgcactgttcaaacgcactgtttactttaagcgcacggggagaaacgaataaggaggacgtggtgatttttaatttatacagtaacttttgtacttctctggtatggagagtttggagccgaatgatttgcattttttacatgtccgacattatttaataaataatttttaaaagaaaagaacgataaatgaagccaacatgattttctcatttcgggaggaactctgttgcttcgcctggacaagaaggaaaatgctgatttcctccttgggtagaaagagggagcgagggcaaatggggagtagagagaaaacaggcgagaacaagcactctaattccagtgggctttaaaataagacaaaatcagctttacaacaatccctagaggctcgaccacagaataatgccagtcaccaccctgaacgcacaatctccagtgcaggatctaatgactgtacatattattgttattattattattgttattattgttgttctgtaaacatgttgcacaagcttagcctttttgcgttctgttgtgtgtggctgtaaaaccccatgctttgtgaaatgagaatcttgacatttttcttgtgaaatttggaaaatgtgatcaattgaaatcaactgtgttttgtgttctctatgtcaaagtttagttttatattgagaatgttaacttattgctttgtatcttgggaaaaaaactttgtaaataagttataaagtttctttgagacagtaaaattatgatttcttgaaagaa

SEQ ID NO: 127434 - DNA, 1022 bp, Homo sapiens
  Payload ID: 4936
  Gene Symbol: DLX1
  Gene Name: distal-less homeobox 1
  ENST ID: ENST00000361609
  CDS Start-End: 509-1022
gggaggagaagcgcgggttcctggctctccacgcgcactgctttaatcagacccgtgcagcctcgagctggagtggccagctgggcctggagcaatgcgagcgggccccagggagcgacagcggcgttggcgcagcggccgaaggagccccggccgggaagtgtggatgcgtcttacccgaggccgggccgcctcgcccgctctagtccagcggagcccgagcgcctcggaccaatccccagtgattatgcaagacagcggaccaatcagctccgccagctcatgaatatttatgaccttcgctgagtcaaagctttgaaccgagtttggggagctcagcagcatcatgcttagacttttcaaagagacaaactccattttcttatgaatggaaagtgaaaacccctgttccgcttaaattgggttccttcctgtcctgagaaacatagagacccccaaaagggaagcagaggagagaaagtcccacacccagaccccgcgagaagagatgaccatgaccaccatgccagaaagtctcaacagccccgtgtcgggcaaggcggtgtttatggagtttgggccgcccaaccagcaaatgtctccttctcccatgtcccacgggcactactccatgcactgtttacactcggcgggccattcgcagcccgacggcgcctacagctcagcctcgtccttctcccgaccgctgggctacccctacgtcaactcggtcagcagccacgcatccagcccctacatcagttcggtgcagtcctacccgggcagcgccagcctcgcccagagccgcctggaggacccaggggcggactcggagaagagcacggtggtggaaggcggtgaagtgcgcttcaatggcaagggaaaaaagatccgtaaacccaggacgatttattccagtttgcagttgcaggctttgaaccggaggttccagcaaactcagtacctagctctgccggagagggcggagctcgcggcctctttgggactcacacagactcagg

SEQ ID NO: 127435 - DNA, 762 bp, Homo sapiens
  Payload ID: 4936
  Gene Symbol: DLX1
  Gene Name: distal-less homeobox 1
  ENST ID: ENST00000469444
  CDS Start-End: 201-762
agcgcgggttcctggctctccacgcgcactgctttaatcagacccgtgcagcctcgagctggagtggccagctgggcctggagcaatgcgagcgggccccagggagcgacagcggcgttggcgcagcggccgaaaacatagagacccccaaaagggaagcagaggagagaaagtcccacacccagaccccgcgagaagagatgaccatgaccaccatgccagaaagtctcaacagccccgtgtcgggcaaggcggtgtttatggagtttgggccgcccaaccagcaaatgtctccttctcccatgtcccacgggcactactccatgcactgtttacactcggcgggccattcgcagcccgacggcgcctacagctcagcctcgtccttctcccgaccgctgggctacccctacgtcaactcggtcagcagccacgcatccagcccctacatcagttcggtgcagtcctacccgggcagcgccagcctcgcccagagccgcctggaggacccaggggcggactcggagaagagcacggtggtggaaggcggtgaagtgcgcttcaatggcaagggaaaaaagatccgtaaacccaggacgatttattccagtttgcagttgcaggctttgaaccggaggttccagcaaactcagtacctagctctgccggagagggcggagctcgcggcctctttgggactcacacagactcaggtcaagatctggttccaaaacaagcgatccaagttcaagaagctgatga

SEQ ID NO: 127436 - DNA, 2453 bp, Homo sapiens
  Payload ID: 4937
  Gene Symbol: DLX2
  Gene Name: distal-less homeobox 2
  Uniprot ID: Q07687
  ENST ID: ENST00000234198
  CDS Start-End: 363-1349
agacaatcgtaaagccgctcggggccgctcacctgctcccgcctcccagagccccgacccggcccagccacccctgccccctccactgcccgccccccgccagagcccgcgctcgcgctgggcaaggagccgagcgggcccagaggccgaaagaggatgcgaccagaggcagctgtcccgagcagcgcacggtgatcgcctcccccggaggaggaggcgcctagacggttgcctcctttcttgtttccccaccaccacccccgtaattacattggctgctggaggggaccgggagagacagaggaggcgcctggcttcccccgcacgcccgccacctctgctctttcccgtctcgggccaggatgactggagtctttgacagtctagtggctgatatgcactcgacccagatcgccgcctccagcacgtaccaccagcaccagcagcccccgagcggcggcggcgccggcccgggtggcaacagcagcagcagcagcagcctccacaagccccaggagtcgcccacccttccggtgtccaccgccaccgacagcagctactacaccaaccagcagcacccggcgggcggcggcggcggcgggggctcgccctacgcgcacatgggttcctaccagtaccaagccagcggcctcaacaacgtcccttactccgccaagagcagctatgacctgggctacaccgccgcctacacctcctacgctccctatggaaccagttcgtccccagccaacaacgagcctgagaaggaggaccttgagcctgaaattcggatagtgaacgggaagccaaagaaagtccggaaaccccgcaccatctactccagtttccagctggcggctcttcagcggcgtttccaaaagactcaatacttggccttgccggagcgagccgagctggcggcctctctgggcctcacccagactcaggtcaaaatctggttccagaaccgccggtccaagttcaagaagatgtggaaaagtggtgagatcccctcggagcagcaccctggggccagcgcttctccaccttgtgcttcgccgccagtctcagcgccggcctcctgggactttggtgtgccgcagcggatggcgggcggcggtggtccgggcagtggcggcagcggcgccggcagctcgggctccagcccgagcagcgcggcctcggcttttctgggcaactacccctggtaccaccagacctcgggatccgcctcacacctgcaggccacggcgccgctgctgcaccccactcagaccccgcagccgcatcaccaccaccaccatcacggcggcgggggcgccccggtgagcgcggggacgattttctaaccccagggagaactcgccagagactgagagcagagaccacttatcctcattgcttaccccgagccggggttccctcctcccggcccgctgccgccacccacctctcctgcaggctgcgacctgcagtggcccgtctcaggccctgctcactcccggggccaccaaacgggcccctctctcgggggaaccggacagcagcttggcaaaggcctccctaaaaggccgcatttctgacctgagccccgggtctcggctgtttcgagccccgcctcggacttgccttccctcccctccgggtgagcctgtctggcgccttcctcgccccgggctgagagctgggtcccgggagatggaagcctcccaggcgcgcgaggcttcccgggcgctctgaggcttctttctcctcgcccgctcccctgggctcagctcggacgctgcagttattgacctcccggtcccgcctgcccgccctcccccacgtggccccttgacccgggcggccccgccgcttctttccttcctgcagttcccagccctcggagcccccatcccttatcttacccccaccgcgctcccccaggagcgctccctcagctctctcctcatccatcaccagtggagtttttttatttgttatttttttaaaagtttaggtgcctttgcggatgacctcattttgacgttgaaaaaatgattttttaatatgtgaacactgcaaaaatgtgtttaaattatcttttttaaaacctattcaggattattagcctggacttggacacagagtttgtaaataaaggtgtctgtgcagattttcccactgatttatttgtataaaaatactcatcttttcagacttttttgtaaacccccagttgtgaaaactgcagtttagcagtgacctcagcaacccctcctttttattttttcctttaaaaacatttcagttaaattaagctactgatttggatttgttttatcgtatcctaaagtctttgttgttgaaatgaaaggtattttggggttatttattatgaaaacaacatgctcttaatgttgattttacaatatgaagagattatttaaataaattattgttttcattgg

SEQ ID NO: 127437 - DNA, 1852 bp, Homo sapiens
  Payload ID: 4937
  Gene Symbol: DLX2
  Gene Name: distal-less homeobox 2
  Uniprot ID: Q07687
  ENST ID: ENST00000466293
  CDS Start-End: 363-1016
agacaatcgtaaagccgctcggggccgctcacctgctcccgcctcccagagccccgacccggcccagccacccctgccccctccactgcccgccccccgccagagcccgcgctcgcgctgggcaaggagccgagcgggcccagaggccgaaagaggatgcgaccagaggcagctgtcccgagcagcgcacggtgatcgcctcccccggaggaggaggcgcctagacggttgcctcctttcttgtttccccaccaccacccccgtaattacattggctgctggaggggaccgggagagacagaggaggcgcctggcttcccccgcacgcccgccacctctgctctttcccgtctcgggccaggatgactggagtctttgacagtctagtggctgatatgcactcgacccagatcgccgcctccagcacgtaccaccagcaccagcagcccccgagcggcggcggcgccggcccgggtggcaacagcagcagcagcagcagcctccacaagccccaggagtcgcccacccttccggtgtccaccgccaccgacagcagctactacaccaaccagcagcacccggcgggcggcggcggcggcgggggctcgccctacgcgcacatgggttcctaccagtaccaagccagcggcctcaacaacgtcccttactccgccaagagcagctatgacctgggctacaccgccgcctacacctcctacgctccctatggaaccagttcgtccccagccaacaacgagcctgagaaggaggaccttgagcctgaaattcggatagtgaacgggaagccaaagaaagtccggaaaccccgcaccatctactccagtttccagctggcggctcttcagcggcgtttccaaaagactcaatacttggccttgccggagcgagccgagctggcggcctctctgggcctcacccagactcaggtggggctcgcgccctgcaggggcgaggagagcgcgggcctgagatggctgggaagcaggcgggtttaggacaatgctttttaaagttcattttaagtacttttaaggatttccaggcctgcgcctcgagcggccctaagtaagcttctaggcccaaagctggaaacccccaaggggccgccgtgggagggaaggaaagggaccgggtggacagaaatcccgtacctctcgctactgattaagcgggtgaaataactggccctcctcaccctcccgctgtcaccatcatcacagtgcacgtacaccagcagtcctggccttttggcaattacctccccagggagcaggaaccggcagagcctcgaaggccgccgcccgtgatcctcttatctccccagggcgctcgctgcccaccgctagccagcggtttttctctgccttcttttttctcctcttcgaacccctactgccccaagactaggttcctccactaatgctcaggtctttttcctcaaaggtcaaaatctggttccagaaccgccggtccaagttcaagaagatgtggaaaagtggtgagatcccctcggagcagcaccctggggccagcgcttctccaccttgtgcttcgccgccagtctcagcgccggcctcctgggactttggtgtgccgcagcggatggcgggcggcggtggtccgggcagtggcggcagcggcgccggcagctcgggctccagcccgagcagcgcggcctcggcttttctgggcaactacccctggtaccaccagacctcgggatccgcctcacacctgcaggccacggcgccgctgctgcaccccactcagaccccgcagccgcatcaccaccaccaccatcacggcggcgggggcgccccggtgagcgcgg

SEQ ID NO: 127438 - DNA, 2602 bp, Homo sapiens
  Payload ID: 4938
  Gene Symbol: DLX3
  Gene Name: distal-less homeobox 3
  Uniprot ID: O60479
  ENST ID: ENST00000434704
  CDS Start-End: 227-1090
agcatttgattgtggcttgggacgcgaggagaggcgcgcagcgaccgcctgacggcaggcaatggtgtaagcgcctctcggcctccccctccccccagacgcggccgggtcctcccttcgccttctggacacacacccctgcctcgtctcttccgcctctctcgcactccggtccgttcctgtcctctgcggaggccagccctggggaggtgcagcgcccgccaggatgagtggctccttcgatcgcaagctcagcagcatcctcaccgacatctccagctcccttagctgccatgcgggctccaaggactcgcctaccctgcccgagtcttctgtcactgacctgggctactacagcgctccccagcacgattactactcgggccagccctatggccagacggtgaacccctacacctaccaccaccaattcaatctcaatgggcttgcaggcacgggcgcttactcgcccaagtcggaatatacctacggagcctcctaccggcaatacggggcgtatcgggagcagccgctgccagcccaggacccagtgtcggtgaaggaggagccggaagcagaggtgcgcatggtgaatgggaagcccaagaaggtccgaaagccgcgtacgatctactccagctaccagctggccgccctgcagcgccgcttccagaaggcccagtacctggcgctgcccgagcgcgccgagctggccgcgcagctgggcctcacgcagacacaggtgaaaatctggttccagaaccgccgttccaagttcaagaaactctacaagaacggggaggtgccgctggagcacagtcccaataacagtgattccatggcctgcaactcaccaccatcacccgccctctgggacacctcttcccactccactccggcccctgcccgcagtcagctgcccccgccgctcccatacagtgcctcccccagctacctggacgaccccaccaactcctggtatcacgcacagaacctgagtggaccccacttacagcagcagccgcctcagccagccaccctgcaccatgcctctcccgggcccccgcccaaccctggggctgtgtactgagcacccatctggcctgcacccttgacaaaggaccccaggaccaggcagaaggcgcctccgtcctagccactcaggaatcatcgaggagcacagggaaaaggaactccctttccccctcccttgccccttcctccagggacccaagcgcttccagatgacaattgcatggaccaaggatgccccctgaacctccctccctctgcctagacactggggtacccctccagatgtggggacattccaccccagtggggacagccattcccctacctgctccaggagcctggattggctttaaatggctcatcatcttccagcttcttaaacttagtgcctgttcccagactggagaccttgggatgggggagagtgtggagggtttgcgggtcctgcctgtgctggggcacctggcaccgtggatcttaaaacttgccaggcctagttcctcctgagcctctggtggtctccccctgctcgagcggcccctcggccaataagacagtggacatcatgacgaggactccgggtggggacctgaactggtcaccgccctgcacttctagccctcatttaagatttgagggtgaaaccaaagaaaaccccctaagtgagggaatcttttaatatttgtggctttagaggaaagaactaaaggagccatctctctcccctctcctccgttccgagaggaggggtgggtctcagacgtttttcctatggacttatttcttccatgtccaggactttgcacaactttggttttaaaagctgttgaaaaataggaaaacaaagggcattgttcacagatagggccaagtctccccttgcaagggtgcctctgttctgtccctgcccccacctcaccttctctactcctccagtaagttggcagttttggtgccaaaccccaaatctccaaagagacataccaggcaagacaaacccccaaacacctcctttccggtggccttggaaacagattgctccgagctggagaatgtcgggtgaggtgtatgggagaggaggggagagttagaacttgtgcctttgggagtaaggggtaactgcctggagggctggtggcactgcccctccctgacccagacatcccaccaaagctaactttcccccacccctgatgcagtaaaacattgaaaaaaaaaaaaaaggagaggtagaagactgtagctatatatataaatatatagtaagttttttttttttaagagcaacagagagaagcagcctcctccctgctgcggtttcctatttatgtggccatgttcctcctggacggatctccctgtgtgtttcaagctgagagatgtgggctccggctggatttgggttttgtgggaggtgcaggggccaagagagacgtggtaggtctccaagagtcccacccgggggggaagaagcaaagccatctcccaccccctcccagccttctcatttctgctttcttactggactcatctttatatataatgttaataaaaaagacgaaaataa

SEQ ID NO: 127439 - DNA, 834 bp, Homo sapiens
  Payload ID: 4938
  Gene Symbol: DLX3
  Gene Name: distal-less homeobox 3
  ENST ID: ENST00000512495
  CDS Start-End: 149-652
cgcggcgagtcggtgggcggaagcgaggggcgtccggcggggccctggagggtcgcaggagtcgcaggccgaggctgaaccgccccctcttccgcccggtgcgttccccgcagtgtcggtgaaggaggagccggaagcagaggtgcgcatggtgaatgggaagcccaagaaggtccgaaagccgcgtacgatctactccagctaccagctggccgccctgcagcgccgcttccagaaggcccagtacctggcgctgcccgagcgcgccgagctggccgcgcagctgggcctcacgcagacacaggtgaaaatctggttccagaaccgccgttccaagttcaagaaactctacaagaacggggaggtgccgctggagcacagtcccaataacagtgattccatggcctgcaactcaccaccatcacccgccctctgggacacctcttcccactccactccggcccctgcccgcagtcagctgcccccgccgctcccatacagtgcctcccccagctacctggacgaccccaccaactcctggtatcacgcacagaacctgagtggaccccacttacagcagcagccgcctcagccagccaccctgcaccatgcctctcccgggcccccgcccaaccctggggctgtgtactgagcacccatctggcctgcacccttgacaaaggaccccaggaccaggcagaaggcgcctccgtcctagccactcaggaatcatcgaggagcacagggaaaaggaactccctttccccctcccttgccccttcctccagggacccaagcgcttccagatgacaattgcatggaccaaggatgccc

SEQ ID NO: 127440 - DNA, 2034 bp, Homo sapiens
  Payload ID: 4939
  Gene Symbol: DLX4
  Gene Name: distal-less homeobox 4
  Uniprot ID: Q92988
  ENST ID: ENST00000240306
  CDS Start-End: 296-1018
agagggcggggcccccgtcgggtcccgggaaccgaacccgatggagaggagggggcccccatggatttagggggggaggggaaagtcatggggggcacccccccggaacccctttcccaggcgcgcgttctccgctgaaagaggctcagagagacactttctccgggatcttaagtgtgggggctgctggctggggggcccgtccggcccaacgccggaggcttggaaaagagagttggcagcgggagcggactacgtgccgggccatggcccttctgcccgggccctggccacaatgacctctttgccctgccccctccccggccgggacgcctccaaagctgtcttcccagacctcgcccctgtcccgtcggtagcggctgcctacccgcttggcttgtcccctacaaccgcagcctcccccaatttgtcctactccaggccgtatggccacctcctgtcttacccctacaccgagccagcgaaccccggagactcctacctgtcctgccagcaacccgcggcgctctctcagcccctctgcggacctgcagagcaccctcaggaactcgaggcagactcggagaagccgcggctgtccccggaaccctccgagcggcgccctcaggcccccgccaaaaagctccgcaagccgaggaccatctactccagcctgcagctgcagcacctaaaccagcgtttccagcacacgcagtacctggcgctgcccgagagggcccagctggcagcgcagctcggcctcacccagacccaggtaaagatctggtttcagaacaaacgctccaagtataagaagctcctgaagcagaattctggggggcaggaaggggacttccctgggaggaccttctctgtgtctccctgctccccacccctcccctccctctgggatctacccaaggcagggaccctgcccaccagtggctatggcaacagctttggagcctggtatcagcatcactcctcagatgtcctggcttcgcctcagatgatgtgaatctggggaagggcgggtcaggcccacagccttcctgcaaagcccaggacccaggcagtccacctgcaccccttctgggctgggaggaaaccagctccagatgggttttctctggaggacaagcagttagaggagaaaaaggaatggagcagagcctgtacccctaaccctaacagctaaatcaaggacctcagccttatataatcattgtccccaccactaccatggactggacaccttcactccagctggacaaagactctggagagagagccattggctggagttgagactgtccccagaacccttggtcttgccactcccccactccttcttccctctctccctttctcctctccctgctttcttgaaaaggactgaatcgccactacagcctgggtgcaaaatcagcaagaaacattgagtatttttttttctttgtatgcctttggccttgcacaacccatttgtgagcaaaagcagaagtggaccaccatcagctcccacccacccagcgatttttccttggaggtcagcccgttacccccataactgatttacctacttaccatactgggaggtagaagagatgcagagaaatgtggaatttgtggacctatgggtaatttatgctttcctcctaaaaaaaaaaaaaaagccctctttcccaccccctccccatctcccctttttgaatagataatggatccaattatccatataattcaataggtatttattgagaggctcccttctattccccatccctaatccctaacgaacccacgggcacacacttttggaaacctggtaaagtaacacttagggggaaatggggacaaactggctctctggattagtgcgggtatagacacccccaaataggtgggtaggcccattgattcagctccttgcagctgtctctgttcaaaggaactgtgcagatttagaacgaattggagcttgagcttcacaccaccagcttccagagattaaagtttgtacaaaacattgca

SEQ ID NO: 127441 - DNA, 1404 bp, Homo sapiens
  Payload ID: 4939
  Gene Symbol: DLX4
  Gene Name: distal-less homeobox 4
  Uniprot ID: Q92988
  ENST ID: ENST00000411890
  CDS Start-End: 241-747
ccgcaggcgccgcggtaccctggctgtggccctcggcgctttcttcctagggtcacaggacccatacgagtgggagctccctgggagcagaactgcgtcttgtatcacctggcgcggtgaacgtgggggttgaaacgctccacgcggaaggtagagggcaggggccaagggggcgatcctggtggctgcgctttttgctatttgctgccgacggcatgcagacgagatgcaaataagcttatgaaactgtccgtcctaccccctcgctccctcctcgccccctacaccgtgttgtgctgcccaccagactcggagaagccgcggctgtccccggaaccctccgagcggcgccctcaggcccccgccaaaaagctccgcaagccgaggaccatctactccagcctgcagctgcagcacctaaaccagcgtttccagcacacgcagtacctggcgctgcccgagagggcccagctggcagcgcagctcggcctcacccagacccaggtaaagatctggtttcagaacaaacgctccaagtataagaagctcctgaagcagaattctggggggcaggaaggggacttccctgggaggaccttctctgtgtctccctgctccccacccctcccctccctctgggatctacccaaggcagggaccctgcccaccagtggctatggcaacagctttggagcctggtatcagcatcactcctcagatgtcctggcttcgcctcagatgatgtgaatctggggaagggcgggtcaggcccacagccttcctgcaaagcccaggacccaggcagtccacctgcaccccttctgggctgggaggaaaccagctccagatgggttttctctggaggacaagcagttagaggagaaaaaggaatggagcagagcctgtacccctaaccctaacagctaaatcaaggacctcagccttatataatcattgtccccaccactaccatggactggacaccttcactccagctggacaaagactctggagagagagccattggctggagttgagactgtccccagaacccttggtcttgccactcccccactccttcttccctctctccctttctcctctccctgctttcttgaaaaggactgaatcgccactacagcctgggtgcaaaatcagcaagaaacattgagtatttttttttctttgtatgcctttggccttgcacaacccatttgtgagcaaaagcagaagtggaccaccatcagctcccacccacccagcgatttttccttggaggtcagcccgttacccccataactgatttacctacttaccatactgggaggtagaagagatgcagagaaatgtggaatttgtggacctatgggtaatttatgctttcctcctaaaaaaaaaaaaaaa

SEQ ID NO: 127442 - DNA, 1662 bp, Homo sapiens
  Payload ID: 4939
  Gene Symbol: DLX4
  Gene Name: distal-less homeobox 4
  Uniprot ID: Q92988
  ENST ID: ENST00000611342
  CDS Start-End: 68-412
cgatcctggtggctgcgctttttgctatttgctgccgacggcatgcagacgagatgcaaataagcttatgaaactgtccgtcctaccccctcgctccctcctcgccccctacaccgtgttgtgctgcccaccagactcggagaagccgcggctgtccccggaaccctccgagcggcgccctcaggcccccgccaaaaagctccgcaagccgaggaccatctactccagcctgcagctgcagcacctaaaccagcgtttccagcacacgcagtacctggcgctgcccgagagggcccagctggcagcgcagctcggcctcacccagacccaggtggggccagtgtcgtccttccccatctctcaccttccctggttctctgggaactcatcccccagccccagctgtgaatgactgatggattggtgctgtggccctgttgtcacagttctccagggaatgttcatagctggctcttagtaagccttggggggaatgtgttgaaaggtgtgcatgtatgtgcgggtggggtggagtgggtcaggaagaggagggtaggtcagacagggagacatggatactagctcagaggcaggaactcagaaggctcctggggctgtgggggactgaagcaaatgttcccagcctagggaactgctggtctcccaggactgtgcctgcacctggatccctttcccttcctcgaaacttttcacacatatcttcctcctgatctttcattctttccccttttcttcccgaaggtaaagatctggtttcagaacaaacgctccaagtataagaagctcctgaagcagaattctggggggcaggaaggggacttccctgggaggaccttctctgtgtctccctgctccccacccctcccctccctctgggatctacccaaggcagggaccctgcccaccagtggctatggcaacagctttggagcctggtatcagcatcactcctcagatgtcctggcttcgcctcagatgatgtgaatctggggaagggcgggtcaggcccacagccttcctgcaaagcccaggacccaggcagtccacctgcaccccttctgggctgggaggaaaccagctccagatgggttttctctggaggacaagcagttagaggagaaaaaggaatggagcagagcctgtacccctaaccctaacagctaaatcaaggacctcagccttatataatcattgtccccaccactaccatggactggacaccttcactccagctggacaaagactctggagagagagccattggctggagttgagactgtccccagaacccttggtcttgccactcccccactccttcttccctctctccctttctcctctccctgctttcttgaaaaggactgaatcgccactacagcctgggtgcaaaatcagcaagaaacattgagtatttttttttctttgtatgcctttggccttgcacaacccatttgtgagcaaaagcagaagtggaccaccatcagctcccacccacccagcgatttttccttggaggtcagcccgttacccccataactgatttacctacttaccatactgggaggtagaagagatgcagagaaatgtggaatttgtggacctatgggtaatttatgctttcctcctaaaaaaaaaaaaaaa

SEQ ID NO: 127443 - DNA, 1688 bp, Homo sapiens
  Payload ID: 4940
  Gene Symbol: DLX5
  Gene Name: distal-less homeobox 5
  Uniprot ID: P56178
  ENST ID: ENST00000222598
  CDS Start-End: 475-1344
actaaaaacagatagactaagacccctccccactccacaacaagcaaaaacacacacaagcgcgcgggcgcgcacacacacaaacacacacaccccctcagtaccccccaccccctttttaagcaatgctttgttgtgctaaaactagttggacgagttagggtgttactgttgctcccgaggccctggccaatagaaccagatccaccccgctgtgcgtaagcgcgcaattaaggatttaaccaaggctgtgctgcgcctcagccagcagtcagccggccggagacagagacttcacgactcccagtctcctcctcgccgcggccgccgcctcctccttctctcctcctcctcttcctcctcctccctcgctcccacagccatgtctgcttagaccagagcagccccacagccaactagggcagctgccgccgccacaacagcaaggacagccgctgccgccgcccgtgagcgatgacaggagtgtttgacagaagggtccccagcatccgatccggcgacttccaagctccgttccagacgtccgcagctatgcaccatccgtctcaggaatcgccaactttgcccgagtcttcagctaccgattctgactactacagccctacggggggagccccgcacggctactgctctcctacctcggcttcctatggcaaagctctcaacccctaccagtatcagtatcacggcgtgaacggctccgccgggagctacccagccaaagcttatgccgactatagctacgctagctcctaccaccagtacggcggcgcctacaaccgcgtcccaagcgccaccaaccagccagagaaagaagtgaccgagcccgaggtgagaatggtgaatggcaaaccaaagaaagttcgtaaacccaggactatttattccagctttcagctggccgcattacagagaaggtttcagaagactcagtacctcgccttgccggaacgcgccgagctggccgcctcgctgggattgacacaaacacaggtgaaaatctggtttcagaacaaaagatccaagatcaagaagatcatgaaaaacggggagatgcccccggagcacagtcccagctccagcgacccaatggcgtgtaactcgccgcagtctccagcggtgtgggagccccagggctcgtcccgctcgctcagccaccaccctcatgcccaccctccgacctccaaccagtccccagcgtccagctacctggagaactctgcatcctggtacacaagtgcagccagctcaatcaattcccacctgccgccgccgggctccttacagcacccgctggcgctggcctccgggacactctattagatgggctgctctctcttactctcttttttgggactactgtgttttgctgttctagaaaatcataaagaaaggaattcatatggggaagttcggaaaactgaaaaagattcatgtgtaaagcttttttttgcatgtaagttattgcatttcaaaagaccccccctttttttacagaggactttttttgcgcaactgtggacactttcaatggtgccttgaaatctatgacctcaacttttcaaaagacttttttcaatgttattttagccatgtaaataagtgtagatagaggaattaaactgtatattctggataaataaaattatttcgaccatgaaaagcgg

SEQ ID NO: 127444 - DNA, 1074 bp, Homo sapiens
  Payload ID: 4940
  Gene Symbol: DLX5
  Gene Name: distal-less homeobox 5
  Uniprot ID: P56178
  ENST ID: ENST00000486603
  CDS Start-End: 328-903
gttggacgagttagggtgttactgttgctcccgaggccctggccaatagaaccagatccaccccgctgtgcgtaagcgcgcaattaaggatttaaccaaggctgtgctgcgcctcagccagcagtcagccggccggagacagagacttcacgactcccagtctcctcctcgccgcggccgccgcctcctccttctctcctcctcctcttcctcctcctccctcgctcccacagccatgtctgcttagaccagagcagccccacagccaactagggcagctgccgccgccacaacagcaaggacagccgctgccgccgcccgtgagcgatgacaggagtgtttgacagaagggtccccagcatccgatccggcgacttccaagctccgttccagacgtccgcagctatgcaccatccgtctcaggaatcgccaactttgcccgagtcttcagctaccgattctgactactacagccctacggggggagccccgcacggctactgctctcctacctcggcttcctatggcaaagctctcaacccctaccagtatcagtatcacggcgtgaacggctccgccgggagctacccagccaaagcttatgccgactatagctacgctagctcctaccaccagtacggcggcgcctacaaccgcgtcccaagcgccaccaaccagccagagaaagaagtgaccgagcccgaggtgagaatggtgaatggcaaaccaaagaaagttcgtaaacccaggactatttattccagctttcagctggccgcattacagagaaggtttcagaagactcagtacctcgccttgccggaacgcgccgagctggccgcctcgctgggattgacacaaacacaggtaaatacggcgctgccatgcactagacctgcctgagctgcacgtctggttgggtcgcgcggttcagtctcgatgggactggagctgttttgacagtacccgtgagaaactaacagacccaaagacatcagcccctatgctttaactcggtgagtcaggccttgagacggtggggatggtattcatcagcggtctggagatacctcc

SEQ ID NO: 127445 - DNA, 2304 bp, Homo sapiens
  Payload ID: 4941
  Gene Symbol: DLX6
  Gene Name: distal-less homeobox 6
  Uniprot ID: P56179
  ENST ID: ENST00000518156
  CDS Start-End: 431-1312
aaaccattcgactcgtggcgtctgcatcaagtctgaaagcagacgcgcaactttcgcagaatccaccttaaaatctctgccttaaactgcaccagcccccaaaaaatccaaggggggaaagcaggcggggggagagcagattcccccctccccctctcctctcccatccctcctccttcctcctccctttgagttaacaaggccccgctcactatatctctttatattaaatatatatatatattagagaagagcgagggagagggagaaccacctccacccccctctttaaattcttttttttttttttttttttttttgcaaggatccaaagagctaaggtggctgcagaggggagagcggcgcgagccaagtgggggagggtggaggaaacccgggagaaggctttctccagcccccaaagtttttgatgatgaccatgactacgatggctgacggcttggaaggccaggactcgtccaaatccgccttcatggagttcgggcagcagcagcagcagcagcagcaacagcagcagcagcagcagcagcaacagcaacagccgccgccgccgccgccgccgccgccgcagccgcactcgcagcagagctccccggccatggcaggcgcgcactaccctctgcactgcctgcactcggcggcggcggcggcagcggccggctcgcaccaccaccaccaccaccagcaccaccaccacggctcgccctacgcgtcgggcggagggaactcctacaaccaccgctcgctcgccgcctacccctacatgagccactcgcagcacagcccttacctccagtcctaccacaacagcagcgcagccgcccagacgcgaggggacgacacagatcaacaaaaaactacagtgattgaaaacggggaaatcaggttcaatggaaaagggaaaaagattcggaagcctcggaccatttattccagcctgcagctccaggctttaaaccatcgctttcagcagacacagtatctggcccttccagagagagccgaactggcagcttccttaggactgacacaaacacaggtgaagatatggtttcagaacaaacgctctaagtttaagaaactgctgaagcagggcagtaatcctcatgagagcgaccccctccagggctcggcggccctgtcgccacgctcgccagcgctgcctccagtctgggacgtttctgcctcggccaagggtgtcagtatgccccccaacagctacatgcctggctattctcactggtactcctctccacaccaggacacgatgcagagaccacagatgatgtgagttgcccaagggaacaccctagggaaacgtctgaacaaggaaaagaggatccgggacctgcttgtatctgcgaaaaggagccaaaggagcaggcttaggagagctcataagtgtggcaagaagccgactaggctcattctctctccctctctctctctctccctctcctttctttttacttcttcctttcctccattccttctttctttccttttcctttctacctttcttttctttttgcctttcaccttttttctcatttaccttctctcttgagcaacgtcagtaattgatcttgcatctcagagagagagaaagagcatgtgtgagagagaaactggtttctatgccagcactcctgaaaccccttactgtaaggatattttctcttaccccttgggatccaggctctgagtctcttctctttgggagtatccatcaaaatgactttttttaaaaacagattttcccccaaccagaagaatctgcacaaacttggcagcgtttttacttgtttaatgagtttaagacattacatggtgaaagagaagcattttggactcctgcatttttatttaccattcccagactgacgagaaaaagaaaattcctcacataacagcccttctctaaagaaaaaggaaaaagtggctgtaagattagaacattgctacaaagggaatgctgcatgttttatcaaaatgcaatgaccaggaatgatggttgattaaaaaaaaacaaaacaaaaaccactctttccccaccccacccccccaaaccctgaactggaatcaggaaagacggaggaaacaatcaaaatcaccattctattgctttgacacctttactaggtgaattggtggcattcacaaagctaatagggacgtttatatcaagaaacatttctgtatatattgttgaattttagttgtacatatactttgtatgtttttgtcttctttcatatatggagtaaaagccacaaaacgctg

SEQ ID NO: 127446 - DNA, 666 bp, Homo sapiens
  Payload ID: 4941
  Gene Symbol: DLX6
  Gene Name: distal-less homeobox 6
  ENST ID: ENST00000555308
  CDS Start-End: 162-659
cacattgttcgggccagggactgggtcaaggagattacgcagacgctgggagcacacgggcagagtggaccaagagaggtcggggcatcatagggatttttcgaggtaacccttattgggctttggggagactcgttgcatgccacgccaggagcagggagatggcagcagtagcctcccgggtgaccgctcctctgtattatttgcttacagatcaacaaaaaactacagtgattgaaaacggggaaatcaggttcaatggaaaagggaaaaagattcggaagcctcggaccatttattccagcctgcagctccaggctttaaaccatcgctttcagcagacacagtatctggcccttccagagagagccgaactggcagcttccttaggactgacacaaacacaggtgaagatatggtttcagaacaaacgctctaagtttaagaaactgctgaagcagggcagtaatcctcatgagagcgaccccctccagggctcggcggccctgtcgccacgctcgccagcgctgcctccagtctgggacgtttctgcctcggccaagggtgtcagtatgccccccaacagctacatgcctggctattctcactggtactcctctccacaccaggacacgatgcagagaccacagatgatgtgagttgccc

SEQ ID NO: 127447 - DNA, 648 bp, Homo sapiens
  Payload ID: 4942
  Gene Symbol: DPRX
  Gene Name: divergent-paired related homeobox
  Uniprot ID: A6NFQ7
  ENST ID: ENST00000376650
  CDS Start-End: 52-627
tgctagttcttatccctggacctgaacccaggcgcacatctggattagaagatgccaggctcagaggatcttcgtaaaggcaaggaccagatgcattcacacaggaaacgaaccatgttcactaagaagcaactggaagatctgaacatcttgttcaatgagaacccatacccaaaccccagccttcagaaagaaatggcctcgaaaatagacatacacccaacagtactgcaggtctggttcaagaatcacagagcaaaactcaagaaagcgaaatgcaagcatattcatcaaaaacaagaaactccacaaccgccaataccagagggtggggtctccaccagtgtcggcctgagaaatgcagacacactacccagattgcccaacgctgctcacccgatcggcctggtgtacacgggtcatcgagtcccctcattccagctcatcctgtaccccaacctcaaggtccctgcaaatgacttcattggccacagaatagtccattttggctgctgccgagatcctaatatatactgcctctaccccattttggaatcccaagtttgcgctccaagcttccattctggctctcctgcctgttcatctaaccaaagtcgagagagatgataaatacaaaaagtcacatgt

SEQ ID NO: 127448 - DNA, 5897 bp, Homo sapiens
  Payload ID: 4943
  Gene Symbol: DIXDC1
  Gene Name: DIX domain containing 1
  Uniprot ID: Q155Q3
  ENST ID: ENST00000440460
  CDS Start-End: 298-2349
tcccgcaggaaagcggggctgggggcagcccggcagcgccgctcaacctagtgcgcgcccagttgtttccataggaaccgcgaccgcgccgggcccctccagcggaggcccccgtgcgagcatgcccagtgcaagccgctagtttggctccagtctaggtttccagtaagtggcatgcgggactccggagggatcccaatgagctgagccgagagcctttgtgtgcagagggaggaggaggaggcggcggcggccgccgggctggagaccccgcccggggagcccccagcaggaacaatgctagcctgcctgacccgagggaacttactggacgtcctgcaggagggcttcaatgagcaacagctgcaggcctatgtggcctgggtgaatgcacagctgaagaagaggccagcagtgaagcctgtgcaggacctgcgacaagatctccgggatggggtgatcctggcatatctcatcgagattgttgcaggagaaaagctgagtggggtacagctgagtcccggtaaccaacaggagatgaagaataatgtggagaaagtgctacagtttgtggcctctaaaaagattcgtatgcaccagacttcggctaaagatattgtggatggaaacctgaagtctatcatgaggctggtccttgccttggcagctcatttcaaacctggctccagcaggacggtgaaccaaggacgggactccagagcccctctgcaaagtcaccgaccacactgtgccactgctgttgcccagggagcagctgctgctctggccgatgtgtgtcatgacatgtcccgatcaggacgggatgtctttcgatatagacagaggaacagcagcatggatgaggaaattgagaatccatactggagtgtgcgggccctagtgcagcagtacgaagggcaacaaaggtccccgtctgaatccagctgctccagcctgacttcacccagtccaatccacagtgcaaagagcgagtccattataacccagtcagaagagaaggcagattttgtgattattcccgctgaaggaatagagaacagaacagaagggacagattctccattatctcgagactggcggccagggagccctggaacctatctggagacctcatgggaagaacagctgttggaacaacaagaatatttagaaaaagaaatggaggaagcaaagaaaatgatatcaggactacaggccttactgctcaatggatccttacctgaagatgaacaggagaggcccttggccctctgtgaaccaggtgtcaatcccgaggaacaactgattataatccaaagtcgtctggatcagagtatggaggagaatcaggacttaaagaaggaactgctgaaatgtaaacaagaagccagaaacttacaggggataaaggatgccttgcagcagagattgactcagcaggacacatctgttcttcagctcaaacaagagctactgagggcaaatatggacaaagatgagctgcacaaccagaatgtggatctgcagaggaagctagatgagaggaaccggctcttgggagaatataaaaaagagctggggcagaaggatcgccttcttcagcagcaccaggccaagttagaagaagcactccggaaactctctgatgtcagttaccaccaggtggatctagagcgagagctagaacacaaagatgtcctcttggctcactgtatgaaaagagaggcagatgaggcgaccaactacaacagtcacaactctcaaagcaatggttttctccttccaacggcaggaaaaggagctacttcagtcagcaacagagggaccagcgacctgcagcttgttcgagatgctctccgcagcctgcgcaacagcttcagtggccacgatcctcagcaccacactattgacagcttggagcagggcatttctagcctcatggagcgcctgcatgttatggagacgcagaagaaacaagaaagaaaggttcgggtcaagtcacccagaactcaagtaggtagtgaataccgggagtcctggccccctaactcaaagttgcctcactcacagagctctccaactgtcagcagcacctgtactaaagtgctctatttcactgaccggtcacttacgcccttcatggtcaatataccaaagaggttggaggaggtgacgttaaaggattttaaagcagctattgatcgggaaggaaatcaccggtatcacttcaaagcactggatcctgagtttggcactgtcaaagaggagattttccatgatgatgatgccatccctggatgggaagggaaaattgtagcttgggtggaagaagaccatggagagaattaatgccaagtatcagattgagggcttatggaacctggtcactccctggctgcttcactcaggaaagggaactaaaaccagaatacactaagaagtttctagtttgtgtgccaaaacagaagcttctccaagcatgatggccacaggtcagtcctctttctgtgcctggcatatctggtacttaaaattctgtccaaatgtagaccatgggttcatctggagttccttgtccgtgggaacacagtgttctattctactctgaggacaacaaaccgaaggccttaaacgatggggatggatgatcccgcctctgtaggggcatggctgctattatctggaaattaggaattggatgcatcattcctgtgtgttacagtattattttaattggcctcaatggttgcagcaatcagagtcccagcgtttgtactcacagacaaggcaaaggtaccagcttttctgtttctttgaacctactgcaaaccaagaataactcatgaggtggtaccaaagatgaaagcccagacttcagtaatcttttgaaccagacgtggatggtgctgaattgttgcttggatggaaaaagggctgcccatgttgtgctacactatgctaaaactgtaatttagtaagaccttgggctgcctcttctgtcttaactggttctgcagcttgtccttttgcccacatagggcctatttcatgtactgttagttttctctggggactctttaactttagagccatttctttttcttcaaactgatgaacttttgtttgaaaggcataaggagtgaaaagctccttgaaaatccaggcgggtatggaaaggtgctgctacccatatctttttgactttctttgtttcatgactttaactcatggcatctcctttgtagtaaaaggagacagaccattaatttcagcatttctttgtgatttataagtactgagcatgaagtacttgtctgcccctcatttcaaggccagagttattttctatttatgtattagtctaggctgatcttttagggcacaatagaaaccatggggcgtggagcatgagttgtgaatggcagggatcattctgggtaaaaaaaacctagaatcatttctgatgtgcaacattgtcaagtgaagaagctaacagttcaactaccgagattatttgataacctgggttttctcattcatccatcaagcaccatcaaccagtcagccattattatttatatatgtattaccaaaagcagtctatctgcctgtgacctccaatgtacactgccaaacacaagagtaggacacatctgttctgggttcttgacctatctgtctccaattcatctccccttttcagccatttcaacaaactactctttggagctctgagatgacatcttgttgttttatatagatgtatcttttaaaaatagttcacgtttggagaattcttttgtactcatttgctttttgtctgagaaccatgtctatttttataactggagtgtgagttctgtatcttctcacattctgtatactgtatccattttctagagaacccagtagcttttatacagtctcttcttaccaccccttgtggtttcagaacaagctttattttattacgagtatattaatgacaactaattcctgttccaattctacctgttttagttgtgaaggtagttttgtgtaatccagttgattgctcctctggcagagagaaggagctcaaaagatacttgatgtctttcatgtaagtttacctggtcttttcctattgaagaatttttcatcagaaacgactgggaaagtttgggaaagtcagcaaaagaaagaatgcatttcgaaagcaaacagaagaaaaaagtatattctcacagtttttccccaggaagtctggagaaaaagtcctcatgtcaccaatttctctgttgcatgaattttagtgttttgctataagacagcatgagggctatcaggccaaaattcattattgtatttccaatacagtttgtcttgaatgtctgtctcttaaaccagtttttacttgtcagttttctctcagcaaacagtcttactattatgtggaatttaacttttcagagaaaatttccaaagtcctctaccttatttggcttttatctgtgtcttttggaaaaggagctgcatggcctcagtgcctccataaaaagcttaagttgagttcatgggagaacattaagatcgttttttttcccttttagctcggtaatctcatgtaccacaggtaatgaccaagcatctctgctagaggatgtaactctcataactcctgtgtaaaatgaggatcctgttggtgatcctcattccagtttccaaagcgagaggagccttctgagcagaagtatgcaagactgattctgtttggaacagtttcctatttggctgcattctaggaggcctcctgacttattcatagtattgtcgcctggtggcattggtgtggggtagcttgtcctgctacttgctaaagttctctttctttgagaaaactgaggaaccagaatgcttagagttcataaaataatctctaaaccatgttaggttaaaacaaaatgaccatctcacaaaaacgagtttagttgaatgctcaattccttacaaaatcttcatttaaggctgagtgtggtggctcatgcctgtaattccagcactttgggaggccgaggcaggaagactgcttgagcccaggagttcaagaccagcctgggcaacgtaggaagactccgtctctacatagaaattttattataaaagtagctggggatggtggcacacacctgtagtcccagctactcaggaggttgaggtgggaagattgcttgagcccaggagtttgaggttgcagtgagctgatcatgccactgcactctagcctaggctacagagcaggaccccatctccaaaaaaaaaaaaaaaaaagtcatttaaaaactgaagaatgttctcttcttgctcagttccctaaattagctggggggattgggatactttacaatttttacatttttaaatttgaagaatttgttttaaacttacttggtaatggcacttctacttactgaccaacttttcagctctttttgaccaggatggttgcaaattagggaaaatatctttatactatacatccaattcaagaggactttaattacttaaaagcatttaggtcataattaaaattattttcactgtttccataaaataagcattatgattgcacactccttctactgtctgaatttatgtaagaggtatagcttgcttaaaatacatatatatgtaaagttatattttcttagaaacatggatgtttacagccattgctttcaaagagattattactgtgtattctccctgttttacaatatgttttcatgaagactatgttacaccagaggcttctgattatcaaagtgataaccagttttaactgccggtatgtaccagatttgtgaactaatttaaaaaaccacaaactatgaataaaatggggtttgcaaactaaa

SEQ ID NO: 127449 - DNA, 1945 bp, Homo sapiens
  Payload ID: 4943
  Gene Symbol: DIXDC1
  Gene Name: DIX domain containing 1
  Uniprot ID: Q155Q3
  ENST ID: ENST00000529225
  CDS Start-End: 281-937
gttgggggggatctgggtccagggggcgcggtctgggcctgcaggaggcgggatccggcgggccagaggcgggaccaaggccggcaggggctggctctggctggctggagtcgggcggggcttgtggccggcccccgcatcaccatggcagcgggaaaccgcggcaaagccagagcactggcaggccgagctcaggagggctggggacagagatgctgaaccagacggacccatcatttaagagatggccctgattcgtctcttctagggactcttgaagatggggacccaagtggttatgagattcaataactccttgctgccaacagagccttctcaacagctgcaggcctatgtggcctgggtgaatgcacagctgaagaagaggccagcagtgaagcctgtgcaggacctgcgacaagatctccgggatggggtgatcctggcatatctcatcgagattgttgcaggagaaaagctgagtggggtacagctgagtcccggtaaccaacaggagatgaagaataatgtggagaaagtgctacagtttgtggcctctaaaaagattcgtatgcaccagacttcggctaaagatattgtggatggaaacctgaagtctatcatgaggctggtccttgccttggcagctcatttcaaacctggctccagcaggacggtgaaccaaggacgggactccagagcccctctgcaaagtcaccgaccacactgtgccactgctgttgcccagggagcagctgctgctctggccgatgtgtgtcatgacatgtcccgatcaggacgggatgtctttcgatatagacagaggaacagcagcatggatgaggaaattgagaatccatactggagtgtgcgggccctagtgcagcagtacgaagggcaacaaaggtccccgtctgaatccagctgctccaggtaactgtggcctctgaaacctgaattctggaggattctcggagttctcggcttcaagtaacaatacaacaagcaaaaaggcacctaagccctttttctcccctcagtttatgtttggctttaaagggataccccttagcagtgctttgtgggtttgtgctagtaggagggtaggaaggtagggtggggtgctggtttatttcccacaaatggaatctgtgcagtcccagtgccagtgcttaactgtgaccacatgggggcatggctggaacctgtcagggcccagtccagtggttctgacatttgcatatgaggtgccagtgtttatgatagccagttccattgtgctgtccttgagcctaagtgtaactcttaaggccggaaaagtctgtgtaaagctcatagaagagaagaaattgagcagagttgtcttagagcattagaatgtttccaactttcctctacaggaactgtggctgattagtatgtgtttgagcaaactaatgatgtttgcgactctagctaaaagttgtgtgtatcctttagagccaagtacagagaccaaaacaggatacagtgccctaataaaaaccttatcagtggcagaaaaaagattactttactggctcatgtaaattgtgcttctataaacactccccagatcatgtttttactaacttcattttgttgctgaatcataatttatgctctaatgaccttttctttcctatcccaaccctgtgtaatctgctctatttagggctaattgttccttgtcttgtatgtatgttatgtgtccttgttttcttcctcctatttttttctcataaaactccatcctattttaatgcacatttcctaatttattgaggtcatatggaactctttctagtattttaatatactggtaaacttgctaactttttaccttttttacatttaatagctgtgctctttcttacttataaaattcacataacataaaattaaccattaaacattataaagtgta

SEQ ID NO: 127450 - DNA, 559 bp, Homo sapiens
  Payload ID: 4943
  Gene Symbol: DIXDC1
  Gene Name: DIX domain containing 1
  ENST ID: ENST00000614104
  CDS Start-End: 329-559
gagcgtcagagtctccaccccgaggagcggccagagccccatgcgggcctgacctgtccgaccgacccctcgtccaccaagggagggctcagagtggagaagcctgacttcacccagtccaatccacagtgcaaagagcgagtccattataacccagtcagaagagaaggcagattttgtgattattcccgctgaaggaatagagaacagaacagaagggacagattctccattatctcgagactggcggccagggagccctggaacctatctggagacctcatgggaagaacagctgttggaacaacaagaatatttagaaaaagaaatggaggaagcaaagaaaatgatatcaggactacaggccttactgctcaatggatccttacctgaagatgaacaggagaggcccttggccctctgtgaaccaggtgtcaatcccgaggaacaactgattataatccaaagtcgtctggatcagagtatggaggagaatcaggacttaaagaaggaactgctgaaatgtaaacaagaagccagaaacttacaggggataaag

SEQ ID NO: 127451 - DNA, 4825 bp, Homo sapiens
  Payload ID: 4943
  Gene Symbol: DIXDC1
  Gene Name: DIX domain containing 1
  Uniprot ID: Q155Q3
  ENST ID: ENST00000615255
  CDS Start-End: 464-1882
atccggaaggtggcacggagtgggatcgccgctggggactcgaggcgcagcctgcgccgccgggagcctccctcccagtgggagatgggttgagatgcccccgccaggggggatgcccggcaccgtgcgtccgcggaggccaagatgcagcggccaggggccggcagcctgcgaggggaggcagcttccgccggggccgggctgctgcacagtctgagcggccgggactgcgcgcttcagagcctggagcatcccagtcgctggggccgagacgccgccgccgccgccgttcccgctttctcccgcgagccgggccagtagctttgctagctggccttcccgtggaggcgttttccagccccagcgcggggagacatgcctgaatttgggagcgatgtgactctcagcctcccacttcacccggggacgcaggcttgctgaagcccgagacaggagggggaccatgggagggacgcaagtcaaatgcctgacttcacccagtccaatccacagtgcaaagagcgagtccattataacccagtcagaagagaaggcagattttgtgattattcccgctgaaggaatagagaacagaacagaagggacagattctccattatctcgagactggcggccagggagccctggaacctatctggagacctcatgggaagaacagctgttggaacaacaagaatatttagaaaaagaaatggaggaagcaaagaaaatgatatcaggactacaggccttactgctcaatggatccttacctgaagatgaacaggagaggcccttggccctctgtgaaccaggtgtcaatcccgaggaacaactgattataatccaaagtcgtctggatcagagtatggaggagaatcaggacttaaagaaggaactgctgaaatgtaaacaagaagccagaaacttacaggggataaaggatgccttgcagcagagattgactcagcaggacacatctgttcttcagctcaaacaagagctactgagggcaaatatggacaaagatgagctgcacaaccagaatgtggatctgcagaggaagctagatgagaggaaccggctcttgggagaatataaaaaagagctggggcagaaggatcgccttcttcagcagcaccaggccaagttagaagaagcactccggaaactctctgatgtcagttaccaccaggtggatctagagcgagagctagaacacaaagatgtcctcttggctcactgtatgaaaagagaggcagatgaggcgaccaactacaacagtcacaactctcaaagcaatggttttctccttccaacggcaggaaaaggagctacttcagtcagcaacagagggaccagcgacctgcagcttgttcgagatgctctccgcagcctgcgcaacagcttcagtggccacgatcctcagcaccacactattgacagcttggagcagggcatttctagcctcatggagcgcctgcatgttatggagacgcagaagaaacaagaaagaaaggttcgggtcaagtcacccagaactcaagtaggtagtgaataccgggagtcctggccccctaactcaaagttgcctcactcacagagctctccaactgtcagcagcacctgtactaaagtgctctatttcactgaccggtcacttacgcccttcatggtcaatataccaaagaggttggaggaggtgacgttaaaggattttaaagcagctattgatcgggaaggaaatcaccggtatcacttcaaagcactggatcctgagtttggcactgtcaaagaggagattttccatgatgatgatgccatccctggatgggaagggaaaattgtagcttgggtggaagaagaccatggagagaattaatgccaagtatcagattgagggcttatggaacctggtcactccctggctgcttcactcaggaaagggaactaaaaccagaatacactaagaagtttctagtttgtgtgccaaaacagaagcttctccaagcatgatggccacaggtcagtcctctttctgtgcctggcatatctggtacttaaaattctgtccaaatgtagaccatgggttcatctggagttccttgtccgtgggaacacagtgttctattctactctgaggacaacaaaccgaaggccttaaacgatggggatggatgatcccgcctctgtaggggcatggctgctattatctggaaattaggaattggatgcatcattcctgtgtgttacagtattattttaattggcctcaatggttgcagcaatcagagtcccagcgtttgtactcacagacaaggcaaaggtaccagcttttctgtttctttgaacctactgcaaaccaagaataactcatgaggtggtaccaaagatgaaagcccagacttcagtaatcttttgaaccagacgtggatggtgctgaattgttgcttggatggaaaaagggctgcccatgttgtgctacactatgctaaaactgtaatttagtaagaccttgggctgcctcttctgtcttaactggttctgcagcttgtccttttgcccacatagggcctatttcatgtactgttagttttctctggggactctttaactttagagccatttctttttcttcaaactgatgaacttttgtttgaaaggcataaggagtgaaaagctccttgaaaatccaggcgggtatggaaaggtgctgctacccatatctttttgactttctttgtttcatgactttaactcatggcatctcctttgtagtaaaaggagacagaccattaatttcagcatttctttgtgatttataagtactgagcatgaagtacttgtctgcccctcatttcaaggccagagttattttctatttatgtattagtctaggctgatcttttagggcacaatagaaaccatggggcgtggagcatgagttgtgaatggcagggatcattctgggtaaaaaaaacctagaatcatttctgatgtgcaacattgtcaagtgaagaagctaacagttcaactaccgagattatttgataacctgggttttctcattcatccatcaagcaccatcaaccagtcagccattattatttatatatgtattaccaaaagcagtctatctgcctgtgacctccaatgtacactgccaaacacaagagtaggacacatctgttctgggttcttgacctatctgtctccaattcatctccccttttcagccatttcaacaaactactctttggagctctgagatgacatcttgttgttttatatagatgtatcttttaaaaatagttcacgtttggagaattcttttgtactcatttgctttttgtctgagaaccatgtctatttttataactggagtgtgagttctgtatcttctcacattctgtatactgtatccattttctagagaacccagtagcttttatacagtctcttcttaccaccccttgtggtttcagaacaagctttattttattacgagtatattaatgacaactaattcctgttccaattctacctgttttagttgtgaaggtagttttgtgtaatccagttgattgctcctctggcagagagaaggagctcaaaagatacttgatgtctttcatgtaagtttacctggtcttttcctattgaagaatttttcatcagaaacgactgggaaagtttgggaaagtcagcaaaagaaagaatgcatttcgaaagcaaacagaagaaaaaagtatattctcacagtttttccccaggaagtctggagaaaaagtcctcatgtcaccaatttctctgttgcatgaattttagtgttttgctataagacagcatgagggctatcaggccaaaattcattattgtatttccaatacagtttgtcttgaatgtctgtctcttaaaccagtttttacttgtcagttttctctcagcaaacagtcttactattatgtggaatttaacttttcagagaaaatttccaaagtcctctaccttatttggcttttatctgtgtcttttggaaaaggagctgcatggcctcagtgcctccataaaaagcttaagttgagttcatgggagaacattaagatcgttttttttcccttttagctcggtaatctcatgtaccacaggtaatgaccaagcatctctgctagaggatgtaactctcataactcctgtgtaaaatgaggatcctgttggtgatcctcattccagtttccaaagcgagaggagccttctgagcagaagtatgcaagactgattctgtttggaacagtttcctatttggctgcattctaggaggcctcctgacttattcatagtattgtcgcctggtggcattggtgtggggtagcttgtcctgctacttgctaaagttctctttctttgagaaaactgaggaaccagaatgcttagagttcataaaataatctctaaaccatgttaggttaaaacaaaatgaccatctcacaaaaacgagtttagttgaatgctcaattccttacaaaatcttcatttaaggctgagtgtggtggctcatgcctgtaattccagcactttgggaggccgaggcaggaagactgcttgagcccaggagttcaagaccagcctgggcaacgtaggaagactccgtctctacatagaaattttattataaaagtagctggggatggtggcacacacctgtagtcccagctactcaggaggttgaggtgggaagattgcttgagcccaggagtttgaggttgcagtgagctgatcatgccactgcactctagcctaggctacagagcaggaccccatctcc

SEQ ID NO: 127452 - DNA, 7447 bp, Homo sapiens
  Payload ID: 4944
  Gene Symbol: DLC1
  Gene Name: DLC1 Rho GTPase activating protein
  Uniprot ID: Q96QB1
  ENST ID: ENST00000276297
  CDS Start-End: 411-4997
gggcctggttgtggaggccccttttgcaaaacctcagtctgaatttagtagacagaagtcactaggaatgccttgacaggatcctgccttagctaaggctccctccagctgcagagggtgtttttgttagactcacacactgcgtgaaactgctcagaatagagccatgatctcaaccacgaaatgggaacttagattttggagaaactaacggggacggacttctttcctagcctgagtgttgagcagtgtcatgccttggcgtttcagctcctcgttgtctaggtggtgaaatgacagaactcattcgcttctttgattggtgattttgaaataatctttcatcaagttccatctcctttaccctcatatggaatatatctctctgtctgttgttaaactacgatgacatgtctgtagctatcagaaagagaagctgggaagaacatgtgacccactggatgggacagccttttaattctgatgatcgtaacacagcatgtcatcatggactagtagctgacagcttgcaggcaagtatggaaaaagatgcaactctaaatgtggaccgcaaagagaagtgtgtttcactacctgactgctgtcatggatcagagctgagagattttcctgggaggccaatgggtcatctttcaaaggatgtggacgaaaatgacagccatgaaggtgaagatcagtttctttctctggaagccagcacagaaacactagtgcatgtttctgatgaggataacaatgctgatttatgccttacagatgataaacaggttttaaatacccaagggcagaaaacatcaggccaacatatgatccaaggagcaggctccttagaaaaggcactgcccatcatacaaagtaaccaagtttcttctaactcctggggaatagctggtgaaactgaattagcactggtaaaagaaagtggggagagaaaagttactgactctataagtaaaagcctggagctttgcaatgaaataagcttaagtgaaataaaagatgcacccaaagtaaatgcagtggatactttgaacgtgaaagatattgcacctgagaaacaattgcttaactctgctgtaattgctcagcaacgaaggaaacctgacccccctaaagatgaaaatgaaagaagcacctgcaatgtagtacaaaatgagttcttggatactccttgcacaaacagaggactgccattattaaaaacagattttggaagctgccttctgcagcctccttcctgccccaatggaatgtcagctgaaaatggcctggagaagagtggtttttcacaacatcaaaacaaaagtccaccaaaggtcaaggcagaagatggcatgcagtgtttacaattaaaggagaccctggccacccaggaacccacagataaccaagtcagacttcgtaagagaaaggaaataagagaagatcgagatagggcgcggctggactccatggtgctgctgattatgaaactggaccagcttgatcaggacatagaaaatgccctcagcaccagctcctctccatcaggcacaccaacaaacctgcggcggcacgttcctgatctggaatcaggatctgaaagtggagcagataccatttcagtaaatcagacacgagtaaatttgtcttctgacactgagtccacggacctcccatcttccactccagtagccaattctggaaccaaacccaagactacggctattcaaggtatttcagagaaggaaaaggctgaaattgaagccaaggaagcttgtgattggctacgggcaactggtttcccccagtatgcacagctttatgaagatttcctgttccccatcgatatttccttggtcaagagagagcatgattttttggacagagatgccattgaggctctatgcaggcgtctaaatactttaaacaaatgtgcggtgatgaagctagaaattagtcctcatcggaaacgaagtgacgattcagacgaggatgagccttgtgccatcagtggcaaatggactttccaaagggacagcaagaggtggtcccggcttgaagagtttgatgtcttttctccaaaacaagacctggtccctgggtccccagacgactcccacccgaaggacggccccagccccggaggcacgctgatggacctcagcgagcgccaggaggtgtcttccgtccgcagcctcagcagcactggcagcctccccagccacgcgccccccagcgaggatgctgccaccccccggactaactccgtcatcagcgtttgctcctccagcaacttggcaggcaatgacgactctttcggcagcctgccctctcccaaggaactgtccagcttcagcttcagcatgaaaggccacgaaaaaactgccaagtccaagacgcgcagtctgctgaaacggatggagagcctgaagctcaagagctcccatcacagcaagcacaaagcgccctcaaagctggggttgatcatcagcgggcccatcttgcaagaggggatggatgaggagaagctgaagcagctcaactgcgtggagatctccgccctcaatggcaaccgcatcaacgtccccatggtacgaaagaggagcgtttccaactccacgcagaccagcagcagcagcagccagtcggagaccagcagcgcggtcagcacgcccagccctgttacgaggacccggagcctcagtgcgtgcaacaagcgggtgggcatgtacttagagggcttcgatcctttcaatcagtcaacatttaacaacgtggtggagcagaactttaagaaccgcgagagctacccagaggacacggtgttctacatccctgaagatcacaagcctggcactttccccaaagctctcaccaatggcagtttctccccctcggggaataacggctctgtgaactggaggacgggaagcttccacggccctggccacatcagcctcaggagggaaaacagtagcgacagccccaaggaactgaagagacgcaattcttccagctccatgagcagccgcctgagcatctacgacaacgtgccgggctccatcctctactccagttcaggggacctggcggatctggagaacgaggacatcttccccgagctggacgacatcctctaccacgtgaaggggatgcagcggatagtcaatcagtggtcggagaagttttctgatgagggagattcggactcagccctggactcggtctctccctgcccgtcctctccaaaacagatacacctggatgtggacaacgaccgaaccacacccagcgacctggacagcacaggcaactccctgaatgaaccggaagagccctccgagatcccggaaagaagggattctggggttggggcttccctaaccaggtccaacaggcaccgactgagatggcacagtttccagagctcacatcggccaagcctcaactctgtatcactacagattaactgccagtctgtggcccagatgaacctgctgcagaaatactcactcctaaagctaacggccctgctggagaaatacacaccttctaacaagcatggttttagctgggccgtgcccaagttcatgaagaggatcaaggttccagactacaaggaccggagtgtgtttggggtcccactgacggtcaacgtgcagcgcacaggacaaccgttgcctcagagcatccagcaggccatgcgatacctccggaaccattgtttggatcaggttgggctcttcagaaaatcgggggtcaagtcccggattcaggctctgcgccagatgaatgaaggtgccatagactgtgtcaactacgaaggacagtctgcttatgacgtggcagacatgctgaagcagtattttcgagatcttcctgagccactaatgacgaacaaactctcggaaacctttctacagatctaccaatatgtgcccaaggaccagcgcctgcaggccatcaaggctgccatcatgctgctgcctgacgagaaccgggaggttctgcagaccctgctttatttcctgagcgatgtcacagcagccgtaaaagaaaaccagatgaccccaaccaacctggccgtgtgcttagcgccttccctcttccatctcaacaccctgaagagagagaattcctctcccagggtaatgcaaagaaaacaaagtttgggcaaaccagatcagaaagatttgaatgaaaacctagctgccactcaagggctggcccatatgatcgccgagtgcaagaagcttttccaggttcccgaggaaatgagccgatgtcgtaattcctataccgaacaagagctgaagcccctcactctggaagcactcgggcacctgggtaatgatgactcagctgactaccaacacttcctccaggactgtgtggatggcctgtttaaagaagtcaaagagaagtttaaaggctgggtcagctactccacttcggagcaggctgagctgtcctataagaaggtgagcgaaggaccccctctgaggctttggaggtcagtcattgaagtccctgctgtgccagaggaaatcttaaagcgcctacttaaagaacagcacctctgggatgtagacctgttggattcaaaagtgatcgaaattctggacagccaaactgaaatttaccagtatgtccaaaacagtatggcacctcatcctgctcgagactacgttgttttaagaacctggaggactaatttacccaaaggagcctgtgcccttttactaacctctgtggatcacgatcgcgcacctgtggtgggtgtgagggttaatgtgctcttgtccaggtatttgattgaaccctgtgggccaggaaaatccaaactcacctacatgtgcagagttgacttaaggggccacatgccagaatggtacacaaaatcttttggacatttgtgtgcagctgaagttgtaaagatccgggattccttcagtaaccagaacactgaaaccaaagacaccaaatctaggtgatcactgaagcaacgcaaccgcttccaccaccatggtgtttgtttctagaacttttgccagtccttgaagaatgggttctgtgtctaatcctgaaacaaagaaaactacaagctggagtgtaggaattgactatagcaatttgatacatttttaaagctgcttcctgtttgttgagggtctgtattcatagaccttgactggaatatgtaagactgtgcaaaaaaaaaaaaaaaatttatgtgtattcttattcaaattgcttctgagaagcaaaactctttaaatacattatggaagataatgaagatacttcattctcttgtgatatcagtgtatgcgtacctgtgtcgctttatttgcagtgtgttgagggactggtgtatccactggaatagttggtactcttggatgtgttttctcaccaagatgagcaaagaaaggtttgcacagaggagtgtgaatgtgtgtttgttgctggctgaatggcaatagatgtctaaggtggattcagtgtctggcacactgagacacctccaagaaggagattgatgcatcaggttcagtttaacctggaatatctgactacccctgaatccacccagaaagggggcccaacacccttgtccatttatgggtattttttttcgaagttattaagcatattccttttccacgaacctcttctgtactttgattgtaataggttggctcttacacccattccaaatgcagtttatttttagacccgattgcaaatagtgatgtagttttaaccagtatggattagttcagggatgaactgctccctctagccttactggctctgatccacagggttttgttttgttttgttttgttttttgtttaagtcgagatataaaaactgaacacgataacacttactcttaaatcaagcatcaacactttttccctgttagaattctttgcatttttgtgtttgtaacagaaacgccttaagacactatgtttgggaatataggaaactatgtgtgtcccaaggaaatccctgtaaatttaactcacctacaaaaggctttttccccgcctttggttgttaacggcattcctgaaagccacatgtgtttattcattgggcttgttcttatcagcaaataggttttctggttttatgactttttgtcttattttatttttcctacatttctttttttttttttttcctttagaatgccctggaaatatatttaagtggtaatgaaaaatagtaatcatagtaaaacgcaacaagaagaaaaccaacccaaaccagtgaagttttttagaacctttagaagggtggtctttattcaggttttactgtaatggtaaggattgactcaagagacagtattagtaaatttattgtgtatggatcaaaagtgaataatgtatgaatgagagctgtaagaaggatttttattttgttataatttagttaccattttcagtgttatttcaaaggttctttgaagaattttggggcagggcatcagattagagttttaaaatttgagtattttggatatcagtgttcctcatgaagatatacatggatattcaattttgatggcttccagatttgtaagattgtatgttgtatataccattctattaagaaacatgtccactgtgctttcaaacatagataaagcatgataaagattattatttaagatatacttgtatttatacctcagatattcttttgggttttgtacctcaaggcttttttcttcttattgtaaatacactttacgtgaatacagtctaagtgaagaaaataaataaaaggaagaggtttataacttgctctatatctgtacagattataatcaataagtgcactattattaaatgtttaaagtaagggaaaagtctgggctgccttccttaatattgcatctcactcccacccttaaaaccacagattgcaaagcatagcattttagcatcaactacaatcaaaagagcgatttgctgaaggaaaaatcggactgcaaatcattccaaggccaaactgcaactgagccacccactcccaaacaggaaaccctggtgaaggttcaggaagcacggagattctctccaacaaaggtccagttaggaaacgacgctgagaggatgacgacaacgtgcaacagcagaaagatgcttgcaagcagagtcagggtcaccagtgaatgccacaaaagttctctttcccactgtttaatttgacaagagaagaatttgaaggatatgaacattttcaagaactctgctgaggtcacttagagcgccatcacaacttatttgtgtgactaattgcctagattgtaagctctttgagggcagggcttgtctcttacacatctttataatcccctgcagcggctttcagtattttgtacttgtaggcacctaataaatttattatttgctatactgaa

SEQ ID NO: 127453 - DNA, 1837 bp, Homo sapiens
  Payload ID: 4944
  Gene Symbol: DLC1
  Gene Name: DLC1 Rho GTPase activating protein
  Uniprot ID: Q96QB1
  ENST ID: ENST00000316609
  CDS Start-End: 290-1786
ttttgttagactcacacactgcgtgaaactgctcagaatagagccatgatctcaaccacgaaatgggaacttagattttggagaaactaacggggacggacttctttcctagcctgagtgttgagcagtgtcatgccttggcgtttcagctcctcgttgtctaggtggtgaaatgacagaactcattcgcttctttgattggtgattttgaaataatctttcatcaagttccatctcctttaccctcatatggaatatatctctctgtctgttgttaaactacgatgacatgtctgtagctatcagaaagagaagctgggaagaacatgtgacccactggatgggacagccttttaattctgatgatcgtaacacagcatgtcatcatggactagtagctgacagcttgcaggcaagtatggaaaaagatgcaactctaaatgtggaccgcaaagagaagtgtgtttcactacctgactgctgtcatggatcagagctgagagattttcctgggaggccaatgggtcatctttcaaaggatgtggacgaaaatgacagccatgaaggtgaagatcagtttctttctctggaagccagcacagaaacactagtgcatgtttctgatgaggataacaatgctgatttatgccttacagatgataaacaggttttaaatacccaagggcagaaaacatcaggccaacatatgatccaaggagcaggctccttagaaaaggcactgcccatcatacaaagtaaccaagtttcttctaactcctggggaatagctggtgaaactgaattagcactggtaaaagaaagtggggagagaaaagttactgactctataagtaaaagcctggagctttgcaatgaaataagcttaagtgaaataaaagatgcacccaaagtaaatgcagtggatactttgaacgtgaaagatattgcacctgagaaacaattgcttaactctgctgtaattgctcagcaacgaaggaaacctgacccccctaaagatgaaaatgaaagaagcacctgcaatgtagtacaaaatgagttcttggatactccttgcacaaacagaggactgccattattaaaaacagattttggaagctgccttctgcagcctccttcctgccccaatggaatgtcagctgaaaatggcctggagaagagtggtttttcacaacatcaaaacaaaagtccaccaaaggtcaaggcagaagatggcatgcagtgtttacaattaaaggagaccctggccacccaggaacccacagataaccaagtcagacttcgtaagagaaaggaaataagagaagatcgagatagggcgcggctggactccatggtgctgctgattatgaaactggaccagcttgatcaggacatagaaaatgccctcagcaccagctcctctccatcaggcacaccaacaaacctgcggcggcacgttcctgatctggaatcaggatctgaaagtggagcagataccatttcagtaaatcagacacgagtaaatttgtcttctgacactgagtccacggacctcccatcttccactccagtagccaattctggaaccaaacccaagactacggctattcaaggtatttcagagaaggaaaaggctgcggtaaaatcagtaaagttggaagtggatgaagataagagcacaaagggatccaatttttccaactcggaagtggcaattggtttgtctccttacacctttccccagaagaggcttttccatgttgctggagaagaaaacatcacctaggccggtgtgtgcctggcagaacactgcactccaatttcctcgggcagccac

SEQ ID NO: 127454 - DNA, 4392 bp, Homo sapiens
  Payload ID: 4944
  Gene Symbol: DLC1
  Gene Name: DLC1 Rho GTPase activating protein
  Uniprot ID: Q96QB1
  ENST ID: ENST00000358919
  CDS Start-End: 495-3770
gaggctgcggccacgaggaagaggggcggggggcggagcctgggaatggggcggggccggagaacagcccgtcgctaaggcctgcgacccagacagcggggaggaggcggtgccgcccgctctggccccgcccctcggggggtgggcccagcgggagggcccggctggcggagcgcgcgggagacagttcgctccgactgcccgagcgagggcgcttcgctcccagccaggacatggccgcacctctccgcatcaggagcgccggctcacggacttctcgcccaactccctgagcgctccctcgtttcgatctttagaaaaccccgctttctttctggggccgtgacgaggggcagggagcggcgagcaaggatgcgttgaggaccgcgagggcgcgcgtctcgggtgccgccgtgggtcccgacgcggaagccgagccgcctccgcctgcctcgacttccccacagcgcttccgccgccgcctgccgtgcttgatgtgcagaaagaagccggacaccatgatcctaacacaaattgaagccaaggaagcttgtgattggctacgggcaactggtttcccccagtatgcacagctttatgaagatttcctgttccccatcgatatttccttggtcaagagagagcatgattttttggacagagatgccattgaggctctatgcaggcgtctaaatactttaaacaaatgtgcggtgatgaagctagaaattagtcctcatcggaaacgaagtgacgattcagacgaggatgagccttgtgccatcagtggcaaatggactttccaaagggacagcaagaggtggtcccggcttgaagagtttgatgtcttttctccaaaacaagacctggtccctgggtccccagacgactcccacccgaaggacggccccagccccggaggcacgctgatggacctcagcgagcgccaggaggtgtcttccgtccgcagcctcagcagcactggcagcctccccagccacgcgccccccagcgaggatgctgccaccccccggactaactccgtcatcagcgtttgctcctccagcaacttggcaggcaatgacgactctttcggcagcctgccctctcccaaggaactgtccagcttcagcttcagcatgaaaggccacgaaaaaactgccaagtccaagacgcgcagtctgctgaaacggatggagagcctgaagctcaagagctcccatcacagcaagcacaaagcgccctcaaagctggggttgatcatcagcgggcccatcttgcaagaggggatggatgaggagaagctgaagcagctcaactgcgtggagatctccgccctcaatggcaaccgcatcaacgtccccatggtacgaaagaggagcgtttccaactccacgcagaccagcagcagcagcagccagtcggagaccagcagcgcggtcagcacgcccagccctgttacgaggacccggagcctcagtgcgtgcaacaagcgggtgggcatgtacttagagggcttcgatcctttcaatcagtcaacatttaacaacgtggtggagcagaactttaagaaccgcgagagctacccagaggacacggtgttctacatccctgaagatcacaagcctggcactttccccaaagctctcaccaatggcagtttctccccctcggggaataacggctctgtgaactggaggacgggaagcttccacggccctggccacatcagcctcaggagggaaaacagtagcgacagccccaaggaactgaagagacgcaattcttccagctccatgagcagccgcctgagcatctacgacaacgtgccgggctccatcctctactccagttcaggggacctggcggatctggagaacgaggacatcttccccgagctggacgacatcctctaccacgtgaaggggatgcagcggatagtcaatcagtggtcggagaagttttctgatgagggagattcggactcagccctggactcggtctctccctgcccgtcctctccaaaacagatacacctggatgtggacaacgaccgaaccacacccagcgacctggacagcacaggcaactccctgaatgaaccggaagagccctccgagatcccggaaagaagggattctggggttggggcttccctaaccaggtccaacaggcaccgactgagatggcacagtttccagagctcacatcggccaagcctcaactctgtatcactacagattaactgccagtctgtggcccagatgaacctgctgcagaaatactcactcctaaagctaacggccctgctggagaaatacacaccttctaacaagcatggttttagctgggccgtgcccaagttcatgaagaggatcaaggttccagactacaaggaccggagtgtgtttggggtcccactgacggtcaacgtgcagcgcacaggacaaccgttgcctcagagcatccagcaggccatgcgatacctccggaaccattgtttggatcaggttgggctcttcagaaaatcgggggtcaagtcccggattcaggctctgcgccagatgaatgaaggtgccatagactgtgtcaactacgaaggacagtctgcttatgacgtggcagacatgctgaagcagtattttcgagatcttcctgagccactaatgacgaacaaactctcggaaacctttctacagatctaccaatatgtgcccaaggaccagcgcctgcaggccatcaaggctgccatcatgctgctgcctgacgagaaccgggaggttctgcagaccctgctttatttcctgagcgatgtcacagcagccgtaaaagaaaaccagatgaccccaaccaacctggccgtgtgcttagcgccttccctcttccatctcaacaccctgaagagagagaattcctctcccagggtaatgcaaagaaaacaaagtttgggcaaaccagatcagaaagatttgaatgaaaacctagctgccactcaagggctggcccatatgatcgccgagtgcaagaagcttttccaggttcccgaggaaatgagccgatgtcgtaattcctataccgaacaagagctgaagcccctcactctggaagcactcgggcacctgggtaatgatgactcagctgactaccaacacttcctccaggactgtgtggatggcctgtttaaagaagtcaaagagaagtttaaaggctgggtcagctactccacttcggagcaggctgagctgtcctataagaaggtgagcgaaggaccccctctgaggctttggaggtcagtcattgaagtccctgctgtgccagaggaaatcttaaagcgcctacttaaagaacagcacctctgggatgtagacctgttggattcaaaagtgatcgaaattctggacagccaaactgaaatttaccagtatgtccaaaacagtatggcacctcatcctgctcgagactacgttgttttaagaacctggaggactaatttacccaaaggagcctgtgcccttttactaacctctgtggatcacgatcgcgcacctgtggtgggtgtgagggttaatgtgctcttgtccaggtatttgattgaaccctgtgggccaggaaaatccaaactcacctacatgtgcagagttgacttaaggggccacatgccagaatggtacacaaaatcttttggacatttgtgtgcagctgaagttgtaaagatccgggattccttcagtaaccagaacactgaaaccaaagacaccaaatctaggtgatcactgaagcaacgcaaccgcttccaccaccatggtgtttgtttctagaacttttgccagtccttgaagaatgggttctgtgtctaatcctgaaacaaagaaaactacaagctggagtgtaggaattgactatagcaatttgatacatttttaaagctgcttcctgtttgttgagggtctgtattcatagaccttgactggaatatgtaagactgtgcaaaaaaaaaaaaaaaatttatgtgtattcttattcaaattgcttctgagaagcaaaactctttaaatacattatggaagataatgaagatacttcattctcttgtgatatcagtgtatgcgtacctgtgtcgctttatttgcagtgtgttgagggactggtgtatccactggaatagttggtactcttggatgtgttttctcaccaagatgagcaaagaaaggtttgcacagaggagtgtgaatgtgtgtttgttgctggctgaatggcaatagatgtctaaggtggattcagtgtctggcacactgagacacctccaagaaggagattgatgcatcaggttcagtttaacctggaatatctgactacccctgaatccacccagaaagggggcccaacaccctt

SEQ ID NO: 127455 - DNA, 3758 bp, Homo sapiens
  Payload ID: 4944
  Gene Symbol: DLC1
  Gene Name: DLC1 Rho GTPase activating protein
  Uniprot ID: Q96QB1
  ENST ID: ENST00000512044
  CDS Start-End: 147-3524
agttggcgcttcccggggccgcagtgccagccgcaatgccggcctcctgaaggcaggcgacagcctgcggccgggagcacagcgcggggcggagtaccgaggcatggtcgcggcgcccgggctgcgctgaaggcgtctgcgagcggatgggggaccccaaggcccacgtgatggcgcgccccctgcgagcccctctccggaggtcctttagcgatcacatcagggactccacggccagagccctggatgtcatttggaaaaacactagagacagacggctggcagaaattgaagccaaggaagcttgtgattggctacgggcaactggtttcccccagtatgcacagctttatgaagatttcctgttccccatcgatatttccttggtcaagagagagcatgattttttggacagagatgccattgaggctctatgcaggcgtctaaatactttaaacaaatgtgcggtgatgaagctagaaattagtcctcatcggaaacgaagtgacgattcagacgaggatgagccttgtgccatcagtggcaaatggactttccaaagggacagcaagaggtggtcccggcttgaagagtttgatgtcttttctccaaaacaagacctggtccctgggtccccagacgactcccacccgaaggacggccccagccccggaggcacgctgatggacctcagcgagcgccaggaggtgtcttccgtccgcagcctcagcagcactggcagcctccccagccacgcgccccccagcgaggatgctgccaccccccggactaactccgtcatcagcgtttgctcctccagcaacttggcaggcaatgacgactctttcggcagcctgccctctcccaaggaactgtccagcttcagcttcagcatgaaaggccacgaaaaaactgccaagtccaagacgcgcagtctgctgaaacggatggagagcctgaagctcaagagctcccatcacagcaagcacaaagcgccctcaaagctggggttgatcatcagcgggcccatcttgcaagaggggatggatgaggagaagctgaagcagctcaactgcgtggagatctccgccctcaatggcaaccgcatcaacgtccccatggtacgaaagaggagcgtttccaactccacgcagaccagcagcagcagcagccagtcggagaccagcagcgcggtcagcacgcccagccctgttacgaggacccggagcctcagtgcgtgcaacaagcgggtgggcatgtacttagagggcttcgatcctttcaatcagtcaacatttaacaacgtggtggagcagaactttaagaaccgcgagagctacccagaggacacggtgttctacatccctgaagatcacaagcctggcactttccccaaagctctcaccaatggcagtttctccccctcggggaataacggctctgtgaactggaggacgggaagcttccacggccctggccacatcagcctcaggagggaaaacagtagcgacagccccaaggaactgaagagacgcaattcttccagctccatgagcagccgcctgagcatctacgacaacgtgccgggctccatcctctactccagttcaggggacctggcggatctggagaacgaggacatcttccccgagctggacgacatcctctaccacgtgaaggggatgcagcggatagtcaatcagtggtcggagaagttttctgatgagggagattcggactcagccctggactcggtctctccctgcccgtcctctccaaaacagatacacctggatgtggacaacgaccgaaccacacccagcgacctggacagcacaggcaactccctgaatgaaccggaagagccctccgagatcccggaaagaagggattctggggttggggcttccctaaccaggtccaacaggcaccgactgagatggcacagtttccagagctcacatcggccaagcctcaactctgtatcactacagattaactgccagtctgtggcccagatgaacctgctgcagaaatactcactcctaaagctaacggccctgctggagaaatacacaccttctaacaagcatggttttagctgggccgtgcccaagttcatgaagaggatcaaggttccagactacaaggaccggagtgtgtttggggtcccactgacggtcaacgtgcagcgcacaggacaaccgttgcctcagagcatccagcaggccatgcgatacctccggaaccattgtttggatcaggttgggctcttcagaaaatcgggggtcaagtcccggattcaggctctgcgccagatgaatgaaggtgccatagactgtgtcaactacgaaggacagtctgcttatgacgtggcagacatgctgaagcagtattttcgagatcttcctgagccactaatgacgaacaaactctcggaaacctttctacagatctaccaatatgtgcccaaggaccagcgcctgcaggccatcaaggctgccatcatgctgctgcctgacgagaaccgggaggttctgcagaccctgctttatttcctgagcgatgtcacagcagccgtaaaagaaaaccagatgaccccaaccaacctggccgtgtgcttagcgccttccctcttccatctcaacaccctgaagagagagaattcctctcccagggtaatgcaaagaaaacaaagtttgggcaaaccagatcagaaagatttgaatgaaaacctagctgccactcaagggctggcccatatgatcgccgagtgcaagaagcttttccaggttcccgaggaaatgagccgatgtcgtaattcctataccgaacaagagctgaagcccctcactctggaagcactcgggcacctgggtaatgatgactcagctgactaccaacacttcctccaggactgtgtggatggcctgtttaaagaagtcaaagagaagtttaaaggctgggtcagctactccacttcggagcaggctgagctgtcctataagaaggtgagcgaaggaccccctctgaggctttggaggtcagtcattgaagtccctgctgtgccagaggaaatcttaaagcgcctacttaaagaacagcacctctgggatgtagacctgttggattcaaaagtgatcgaaattctggacagccaaactgaaatttaccagtatgtccaaaacagtatggcacctcatcctgctcgagactacgttgttttaagaacctggaggactaatttacccaaaggagcctgtgcccttttactaacctctgtggatcacgatcgcgcacctgtggtgggtgtgagggttaatgtgctcttgtccaggtatttgattgaaccctgtgggccaggaaaatccaaactcacctacatgtgcagagttgacttaaggggccacatgccagaatggtacacaaaatcttttggacatttgtgtgcagctgaagttgtaaagatccgggattccttcagtaaccagaacactgaaaccaaagacaccaaatctaggtgatcactgaagcaacgcaaccgcttccaccaccatggtgtttgtttctagaacttttgccagtccttgaagaatgggttctgtgtctaatcctgaaacaaagaaaactacaagctggagtgtaggaattgactatagcaatttgatacatttttaaagctgcttcctgtttgttgagggtctgtattcatagaccttgactggaatatgtaagactgtgcaaaaaaaaaaaaaaaa

SEQ ID NO: 127456 - DNA, 2451 bp, Homo sapiens
  Payload ID: 4944
  Gene Symbol: DLC1
  Gene Name: DLC1 Rho GTPase activating protein
  Uniprot ID: Q96QB1
  ENST ID: ENST00000511869
  CDS Start-End: 412-1803
tgggcctggttgtggaggccccttttgcaaaacctcagtctgaatttagtagacagaagtcactaggaatgccttgacaggatcctgccttagctaaggctccctccagctgcagagggtgtttttgttagactcacacactgcgtgaaactgctcagaatagagccatgatctcaaccacgaaatgggaacttagattttggagaaactaacggggacggacttctttcctagcctgagtgttgagcagtgtcatgccttggcgtttcagctcctcgttgtctaggtggtgaaatgacagaactcattcgcttctttgattggtgattttgaaataatctttcatcaagttccatctcctttaccctcatatggaatatatctctctgtctgttgttaaactacgatgacatgtctgtagctatcagaaagagaagctgggaagaacatgtgacccactggatgggacagccttttaattctgatgatcgtaacacagcatgtcatcatggactagtagctgacagcttgcaggcaagtatggaaaaagatgcaactctaaatgtggaccgcaaagagaagtgtgtttcactacctgactgctgtcatggatcagagctgagagattttcctgggaggccaatgggtcatctttcaaaggatgtggacgaaaatgacagccatgaaggtgaagatcagtttctttctctggaagccagcacagaaacactagtgcatgtttctgatgaggataacaatgctgatttatgccttacagatgataaacaggttttaaatacccaagggcagaaaacatcaggccaacatatgatccaaggagcaggctccttagaaaaggcactgcccatcatacaaagtaaccaagtttcttctaactcctggggaatagctggtgaaactgaattagcactggtaaaagaaagtggggagagaaaagttactgactctataagtaaaagcctggagctttgcaatgaaataagcttaagtgaaataaaagatgcacccaaagtaaatgcagtggatactttgaacgtgaaagatattgcacctgagaaacaattgcttaactctgctgtaattgctcagcaacgaaggaaacctgacccccctaaagatgaaaatgaaagaagcacctgcaatgtagtacaaaatgagttcttggatactccttgcacaaacagaggactgccattattaaaaacagattttggaagctgccttctgcagcctccttcctgccccaatggaatgtcagctgaaaatggcctggagaagagtggtttttcacaacatcaaaacaaaagtccaccaaaggtcaaggcagaagatggcatgcagtgtttacaattaaaggagaccctggccacccaggaacccacagataaccaagtcagacttcgtaagagaaaggaaataagagaagatcgagatagggcgcggctggactccatggtgctgctgattatgaaactggaccagcttgatcaggacatagaaaatgccctcagcaccagctcctctccatcaggcacaccaacaaacctgcggcggcacgttcctgatctggaatcaggatctgaaagtggagcagataccatttcagtaaatcagacacgagtaaatttgtcttctgacactgagtccacggacctcccatcttccactccagtagccaattctggaaccaaacccaagactacggctattcaaggtatttcagagaaggaaaaggctggtaagttgacattttggttctgttttctcgccaatctattttagaataaatttcaccttaaaataggcattttattaaatatataaaatgtatacatctcatgaatatatgggaaaatgttgtttaaattctgtaaaagaaatttgttttgctcaatatgtaagaaaaatatacgtggttttctgacataatgacattgtgttagaataagatatgtgtttcttggggtcttccttgtaactgcaaccacaatttttttttcttaagcaaaagaattaaatgttgatcaaggttctggggaatgaatttggaaattagttattaataattaccaaggtttatttttactcttaatgacttagtagccacagaaaaagatgtaattgatgcttaaagctgatgccatactatcaaaaatatagtgatgaagcaatgtgaataattgtattgaagaaaaaaattatagtatttttctgtgttctgtgctttaattataattatttaacagtattatgggaaatggacaaggactgatgagaaatgaaaatatgaaaaattagacatggattggtagatctatgtgtttttaaaaaatcatactatcttatgtgttctgtgtaataaaaacgaaaacagattaaaggtatattatctaacttgaagtacatcacttagtttgtagacatttgtga

SEQ ID NO: 127457 - DNA, 3556 bp, Homo sapiens
  Payload ID: 4944
  Gene Symbol: DLC1
  Gene Name: DLC1 Rho GTPase activating protein
  Uniprot ID: Q96QB1
  ENST ID: ENST00000520226
  CDS Start-End: 285-3338
actgacttcgtgccctccatgttccttgacagcctgggcctctcctactggattaatacctgatgagtacctgatcacgcaacagtgaaacaacacaagaaattgaagccaaggaagcttgtgattggctacgggcaactggtttcccccagtatgcacagctttatgaagatttcctgttccccatcgatatttccttggtcaagagagagcatgattttttggacagagatgccattgaggctctatgcaggcgtctaaatactttaaacaaatgtgcggtgatgaagctagaaattagtcctcatcggaaacgaagtgacgattcagacgaggatgagccttgtgccatcagtggcaaatggactttccaaagggacagcaagaggtggtcccggcttgaagagtttgatgtcttttctccaaaacaagacctggtccctgggtccccagacgactcccacccgaaggacggccccagccccggaggcacgctgatggacctcagcgagcgccaggaggtgtcttccgtccgcagcctcagcagcactggcagcctccccagccacgcgccccccagcgaggatgctgccaccccccggactaactccgtcatcagcgtttgctcctccagcaacttggcaggcaatgacgactctttcggcagcctgccctctcccaaggaactgtccagcttcagcttcagcatgaaaggccacgaaaaaactgccaagtccaagacgcgcagtctgctgaaacggatggagagcctgaagctcaagagctcccatcacagcaagcacaaagcgccctcaaagctggggttgatcatcagcgggcccatcttgcaagaggggatggatgaggagaagctgaagcagctcaactgcgtggagatctccgccctcaatggcaaccgcatcaacgtccccatggtacgaaagaggagcgtttccaactccacgcagaccagcagcagcagcagccagtcggagaccagcagcgcggtcagcacgcccagccctgttacgaggacccggagcctcagtgcgtgcaacaagcgggtgggcatgtacttagagggcttcgatcctttcaatcagtcaacatttaacaacgtggtggagcagaactttaagaaccgcgagagctacccagaggacacggtgttctacatccctgaagatcacaagcctggcactttccccaaagctctcaccaatggcagtttctccccctcggggaataacggctctgtgaactggaggacgggaagcttccacggccctggccacatcagcctcaggagggaaaacagtagcgacagccccaaggaactgaagagacgcaattcttccagctccatgagcagccgcctgagcatctacgacaacgtgccgggctccatcctctactccagttcaggggacctggcggatctggagaacgaggacatcttccccgagctggacgacatcctctaccacgtgaaggggatgcagcggatagtcaatcagtggtcggagaagttttctgatgagggagattcggactcagccctggactcggtctctccctgcccgtcctctccaaaacagatacacctggatgtggacaacgaccgaaccacacccagcgacctggacagcacaggcaactccctgaatgaaccggaagagccctccgagatcccggaaagaagggattctggggttggggcttccctaaccaggtccaacaggcaccgactgagatggcacagtttccagagctcacatcggccaagcctcaactctgtatcactacagattaactgccagtctgtggcccagatgaacctgctgcagaaatactcactcctaaagctaacggccctgctggagaaatacacaccttctaacaagcatggttttagctgggccgtgcccaagttcatgaagaggatcaaggttccagactacaaggaccggagtgtgtttggggtcccactgacggtcaacgtgcagcgcacaggacaaccgttgcctcagagcatccagcaggccatgcgatacctccggaaccattgtttggatcaggttgggctcttcagaaaatcgggggtcaagtcccggattcaggctctgcgccagatgaatgaaggtgccatagactgtgtcaactacgaaggacagtctgcttatgacgtggcagacatgctgaagcagtattttcgagatcttcctgagccactaatgacgaacaaactctcggaaacctttctacagatctaccaatatgtgcccaaggaccagcgcctgcaggccatcaaggctgccatcatgctgctgcctgacgagaaccgggaggttctgcagaccctgctttatttcctgagcgatgtcacagcagccgtaaaagaaaaccagatgaccccaaccaacctggccgtgtgcttagcgccttccctcttccatctcaacaccctgaagagagagaattcctctcccagggtaatgcaaagaaaacaaagtttgggcaaaccagatcagaaagatttgaatgaaaacctagctgccactcaagggctggcccatatgatcgccgagtgcaagaagcttttccaggttcccgaggaaatgagccgatgtcgtaattcctataccgaacaagagctgaagcccctcactctggaagcactcgggcacctgggtaatgatgactcagctgactaccaacacttcctccaggactgtgtggatggcctgtttaaagaagtcaaagagaagtttaaaggctgggtcagctactccacttcggagcaggctgagctgtcctataagaaggtgagcgaaggaccccctctgaggctttggaggtcagtcattgaagtccctgctgtgccagaggaaatcttaaagcgcctacttaaagaacagcacctctgggatgtagacctgttggattcaaaagtgatcgaaattctggacagccaaactgaaatttaccagtatgtccaaaacagtatggcacctcatcctgctcgagactacgttgttttaagaacctggaggactaatttacccaaaggagcctgtgcccttttactaacctctgtggatcacgatcgcgcacctgtggtgggtgtgagggttaatgtgctcttgtccaggtatttgattgaaccctgtgggccaggaaaatccaaactcacctacatgtgcagagttgacttaaggggccacatgccagaatggtacacaaaatcttttggacatttgtgtgcagctgaagttgtaaagatccgggattccttcagtaaccagaacactgaaaccaaagacaccaaatctaggtgatcactgaagcaacgcaaccgcttccaccaccatggtgtttgtttctagaacttttgccagtccttgaagaatgggttctgtgtctaatcctgaaacaaagaaaactacaagctggagtgtaggaattgactatagcaatttgatacatttttaaagctgcttcctgtttgttgagggtctgtattcatagaccttgactggaatatgtaagactgtgc

SEQ ID NO: 127458 - DNA, 562 bp, Homo sapiens
  Payload ID: 4944
  Gene Symbol: DLC1
  Gene Name: DLC1 Rho GTPase activating protein
  ENST ID: ENST00000503161
  CDS Start-End: 417-562
cgttcttgagaatcaaccttgaaagttaaagacaaggccacctgccagccccaccctcccacctcccctgcgtgcttgcctgcggcgctgcgtttccctttgaaaacgcgaggtcacctggactgcccctgaagggaagacctgctatgtgacccaggagcagcccggcgcggacccagaaattgaagccaaggaagcttgtgattggctacgggcaactggtttcccccagtatgcacagctttatgaagatttcctgttccccatcgatatttccttggtcaagagagagcatgattttttggacagagatgccattgaggctctatgcaggcgtctaaatactttaaacaaatgtgcggtgatgaagctagaaattagtcctcatcggaaacgaagtgacgattcagacgaggatgagccttgtgccatcagtggcaaatggactttccaaagggacagcaagaggtggtcccggcttgaagagtttgatgtcttttctccaaaacaagacctggtccctgggtccccagacgactcccacccgaaggacggccccagc

SEQ ID NO: 127459 - DNA, 383 bp, Homo sapiens
  Payload ID: 4944
  Gene Symbol: DLC1
  Gene Name: DLC1 Rho GTPase activating protein
  ENST ID: ENST00000517868
  CDS Start-End: 1-226
ccttctgcagcctccttcctgccccaatggaatgtcagctgaaaatggcctggagaagagtggtttttcacaacatcaaaacaaaagtccaccaaaggtcaaggcagaagatggcatgcagtgtttacaattaaaggagaccctggccacccaggaacccacagataaccaagtcagacttcgtaagagaaaggtaagacatatgcacagattctctggcttttgaaattttgtaaatatccttggatttatcagttatcattttgcttggattaaaaagatatgaagatggttcttttgccctgttatgcagatgtgtaattcaacgactacccacttggtcaaaccatcaaaatatgtaaaaattaaagaataataatcta

SEQ ID NO: 127460 - DNA, 562 bp, Homo sapiens
  Payload ID: 4944
  Gene Symbol: DLC1
  Gene Name: DLC1 Rho GTPase activating protein
  ENST ID: ENST00000631382
  CDS Start-End: 196-562
atcagacaacacattggcagtgagttcatctgctctactctgctttggaataacacatgtgattaaccaggtggtgaaatgacagaactcattcgcttctttgattggtgattttgaaataatctttcatcaagttccatctcctttaccctcatatggaatatatctctctgtctgttgttaaactacgatgacatgtctgtagctatcagaaagagaagctgggaagaacatgtgacccactggatgggacagccttttaattctgatgatcgtaacacagcatgtcatcatggactagtagctgacagcttgcaggcaagtatggaaaaagatgcaactctaaatgtggaccgcaaagagaagtgtgtttcactacctgactgctgtcatggatcagagctgagagattttcctgggaggccaatgggtcatctttcaaaggatgtggacgaaaatgacagccatgaaggtgaagatcagtttctttctctggaagccagcacagaaacactagtgcatgtttctgatgaggataacaatgctgatttatgccttacag

SEQ ID NO: 127461 - DNA, 5569 bp, Homo sapiens
  Payload ID: 4945
  Gene Symbol: DMRTA1
  Gene Name: DMRT-like family A1
  Uniprot ID: Q5VZB9
  ENST ID: ENST00000325870
  CDS Start-End: 226-1740
ctctgccaggctcacgggacagctgcacctctcagcgtctccagctccaggacgcggtcgtcccaactccttccgagtggaaagagtgtaaaacttttgtccgtgcgcgggtggagctcagtaggaccacggcgcgtcctgccccggcttccccagcctcccagcagggttagctgcggtcagcgcactttccacttgggactcccggccagaaatttctcgggaatggagcggtcacagtgtggcagcagagaccgaggcgttagcggccgacctcacttggcccctgggctagtggtggctgcccctccgcccccgtccccggcgttgccggtaccatcggggatgcaggttcccccagcgttcctgcggccgcccagcctctttctgcgagcagcggccgcggccgccgccgccgctgccgccacctcgggaagcggaggctgcccgccggctcccgggctggagagcggggtaggcgcggtgggctgcggctacccgcggacgcccaagtgcgcccgctgtcgtaaccatggtgtggtgtcagcgctcaagggccacaagcgcttctgccgctggcgggactgcgcgtgtgccaagtgcaccctgatcgccgagcgccagcgcgtcatggccgcccaggtggcgctgcgcaggcagcaggcgcaggaggagagcgaagcccgggggctacagaggctcctgtgctcggggctctcctggccccccggtggtcgggcatccgggggcggcggcagagccgagaatccacagtccacgggcggccctgcggcgggggctgcgctgggactgggtgccttgagacaggccagtggttccgcgacccccgctttcgaagttttccagcaagattatcctgaggaaaaacaagaacaaaaagagagtaaatgtgagtcatgccagaatggacaagaagaactgatctccaaatcccatcagctttacctaggatcatcttctaggtctaatggtgtcattgggaaacaaagtatcgggtcatctatttcagaatactccaacaagcctgatagtatcctgtctcctcatcctggagagcaatcaggaggtgaagagagtcccaggtccttatcatcctctgatctggaatcaggaaatgaaagtgaatgggtcaaagacttgactgcgaccaaggcaagccttccgacagtgtcctcaagaccaagagatcctcttgatatccttactaagattttcccaaattacaggcgcagccggctagaaggcattctacggttctgcaaaggggatgtggtccaagccattgaacaggttttaaatggcaaagaacacaagccagacaacaggaacctagcaaactcagaagaactggaaaacacagcctttcagagagcttcaagttttagtcttgctggaattggttttggaactctaggtaataaatcagctttctctcctcttcaaactacttctgcttcttatggaggtgattcaagtctctacggcgtaaatcctagagtaggtatcagtccattaaggctggcatattcttctgcaggaagagggttatctggttttatgtcaccctacctaacacctgggttagtaccaaccttaccttttcggccagctttggattatgccttttcagggatgattagagattcttcctacctttccagtaaagactcaataacttgtggcagactgtacttcagaccaaatcaggacaatccgtaatgtatatgcccattctctctttctggagtttttccagcatacaatacatgcacgtgcacacacatacacacacatccattaatatacttcagtaagtatgtgagtggattatgaggtcttaaaatgctgggttttttttttttcaagcaatataataggtcttagatctgaaaactcttcattaggatttatcaagtgaaagaagtaaatctgaacattatatgtgccttgaataaagctatttcaggaaatatttaatgaattttctccctaaattatcatttgtaaacatttttattttaaaactagtttttattttattgaaaagtggaatttttagtgataaaatacatttgtaagtgtaaagcaatacagcataatagaatagaatataaaccgaaaggaagaactgaacaattaaggcaattctaaataattaccatttcaaaactgtttcttctattcctggttcataggaaagaaaaaagttattcaaagtatttttaaagcatttgatttgcagatgggtgattcgtaataaataaaacatttgagcattttgaatttatatttcctgagtattttatttttcaatcttagcttccatgagtgaaaacaagtgccattaaaaaacatttctctttaaagttgacactgtgtctatgaagtaaattttaggaaataagactgcgccatctcctggccactatcgccaattgcaactgagctctgtagagtatatgaattagaaacattgattccggagaataaccatttttttttcaaatagtcattttggattatactacattaaaatttccatactgtaaagtgcacatctactgtggatgagagttgcagtctttaagtgtgcttatgtctgtatctggggaaatatccttaaaagtttgggacaagaatatatggcagccattctcaaaggtaagaataattttattcagaaaactaaaatagctgctcaaataaatatttattaactgcagatagttgatgcttaatgcactgaggagagatataagatttccaaaggggaaaaactgccatgaagtttcagaggtattcttgcaattttaaaaataatttttgtcctccctctggcgcatttgaaaactatttatttcagtcagtggaaagtccctgaggaaactgcttacaaaacagtttctaggacattttctttgtatgtcatcatttttcttttttgaaggacagtagcttcattgttattattaggaataaatggaagcccactggtggtaaaagatagttgatgaattagagattgtttaaactatttaagcagcatgactcactaaagattttttaaattatatgtatatacgtatgtgtgtatgcatctatatgcacatatataagtctatgtagacatacattaaacccctataggttatattatcatggaggcgtttttcatgaagccagtaagaatgtatttccaaggaatattttgccagcaaatgtgatattaaattacttcagagtatctgatgctgatttaggatgtaaatgtgtttattaggttatgcattaattttaatggtgtgaatataagaaagcagatcttgaaaaatttcgatgtactcaatattcatttattataaaaaagttttatattctaagcctaaaccgtagtacaatgtctagcaagtagttgaaattcaattcatatatactgagtaagaaactcttatatataatagatctctttgagactctgataaaactgaagaactctacaaaatggcgtacagacacacagttttgcatacaatttcactgggttcttgaatctcctaaatggtattcaggttagattccttggtgattcttcagttgtttctattgcattaatccacttattgaatgctatttttctgaaaagtgctagatcctgtagaggatactgaatgtaaaatattgtgctctaaaggaagttacattatacaatagagatatggtttaaaaaaaaatcctagagttactgcattatgtatgtggttttataatgatgtgcttgtatctgagaaactgaattgcttttgaccttgggagaacatccattttgggcagtattcgaatttataaaatagttttataatcataaaacttaatttatataatgccttacacattccatactctttataataatttaaggacttaatcttatcaaataggtcatttgtctaacaactcagtagtatatgaggaaattggggctcagcagtagggttttttctccctaaggttagtaatatgagtcatctgcagtggaattactgtgctcacttcagcaatttcagactccaatgtctgaggaaggattcatgtctgtttttttcattcatggccttgaacagtgtctgatataggttctcaacctatacactagatttccactgactgaaaaaaaataaaagcaagtattagcttaataatttcttcattcaacacctatttaatatttttaataatctatttgtgccatgcactgtgttagacacaagagataaagaaatgattaagatacaagactttgcctcaagttgctcacggtctatattgtgtgtacaaaaacaaccaatcaaccaatgttggtattatttgacagtgttggtacatcaatgagttctttgtaatcttgatatttatatccatggatgctgcttgaagcctgaactcctaagccactaattagtggtgggaagaaagagggggtaaatgctttaagagctagcatataacaaaaatgaattgggtttattctgtatcatatagagggcctaagaggcaaacatttcatagagtattcagaagaacataaggaatgacttttttcacagttaacagctgtccaagagtgtagtggctgcctcgtatgataaagcatctggaactcattgaaaaatgcatgtagaaaataccaatcagagcctgattgatgggatttttaattactgctttaatattgggactgaatcattttgtagctcattagaaacatggaaagtatttgttaaataaataagtcatggaatttcaattctaaggccatgaaaattaaaacaccctaccattatttatcaataaaacacagtgcagttttgctcatcagaattttgcctatgtgatagcctcctgagagtaggcagaaaagaaagacatagaacgcagtgcgtgacttacaagggaataaaactgacagaggttagtgtaaggtatataggcatgagtggggcttaaagaggatatgggagaacactgaagacaaatattagtacaattcctataaggtaaataccaatatgtctttctagaagaagcaattgttttggaattgaggaaacctagaatggatttatctatatgacttggacaggttacttatactctttggacatttatttcttctcagcaaaacaagggtaataatatttaacttgcaagattcgtggagataaaagcttaaataaacggcagagtacagtaatgcttatatacgggatgctaaataaataactctcactgttattactttgtattaagatattatctttgccccctcgtggcagtctctcaacaaagagtactgtaattgcatttaatccacttagtggatgtggagcccaaagggcagccatcactagagcagcgtacaggcttagttccagacttcgtgtttggttgttcatttcataggcgagccacgtgttttgtaacatattctcgtatatgttatttggattattttcagggctttctgaagaaaataaacatcgaaatcata

SEQ ID NO: 127462 - DNA, 3137 bp, Homo sapiens
  Payload ID: 4946
  Gene Symbol: DMRTA2
  Gene Name: DMRT-like family A2
  Uniprot ID: Q96SC8
  ENST ID: ENST00000404795
  CDS Start-End: 394-2022
tgtccaattctgtctaatggagccctaaggaccaacaatagagcgggcgagcggctcattgagagtctggcagcgccgggcaactgggccccggctgcgcgcagcgtccggcgcgcaccgcgaggggacccggcacggcgagagtcaggtcgcgggttccaaccacgcggcccgcagacgagcctccgacccggatttctgaagggagggttggactgcgctgcgttctgaggggtccggaagttcggacatggtgactgaaggagggtgacgtggtcagataaggggccgggggcaaagggaagcggccaagagctccagcgtcgccagtggagccgggaggcgcgtgcagcgccagcggaggaggaggatcccggagcccaaggtcctgtcatggagctgcgctcggagctgcccagcgtgcccggcgcggcgacggcggcggcggcaacagcgacggggccgcctgtggcgtcggtggcgtcggtggcggcagccgcggcggccgctgcatcgctaccggtgagcgtggcaggcggcttgctgcgggggccgccactgttgctgcgggcagccgagaagtacccgcggacccccaagtgcgcgcgctgtcgcaaccatggcgtggtgtcggccctcaagggccacaaacgctactgtcgctggaaggactgcctgtgcgccaagtgcacgctcatcgcggagcgccagcgtgtcatggcggcgcaggtggcgctgcgcaggcagcaggcgcaggaggagaacgaggcgcgcgagctgcagctgctctacggcactgccgaggggctggcgctggccgccgccaacggcatcatccccccgaggcccgcctacgaggtcttcggttcagtgtgcgccgccgacggcgggggacctggagcgggagcgcccgcggggaccggaggcggagcagctggcgcagggggctcagaggccaagttgcagaagtttgacctgtttcctaagacgctgctgcaggcaggccgcccgggcagcccgctgccgccgccggtgaagcccttatcacccgacggcgcagactcggggcccgggacgtcgtccccagaggtgcggcccggctcaggctcggagaacggcgatggcgagtccttttctggttcgcccctagctcgggcctccaaagaggcaggtggcagctgcccaggcagcgctggccctggcggcggcggcgaggaggacagcccgggctccgctagccctctgggctctgaatccggttcagaggctgacaaagaagagggtgaggccgcgccggcgccagggctgggcggaggctcgggtccacggcagcggacgccgctggatatcttgacacgcgtgttcccaggccaccggcgaggcgtcctggagctggtgttgcagggctgcggcggcgacgtggtgcaggccatcgagcaggtgctgaaccaccaccgtgggggcctggcggccggcctgggccctgcggcgcccccagataaggccgccgtgggtgctgcagcagctgcagacgacgcgtggcccagccgcgtcgacgccgccgccgccgccgccgccgccgccggggggcctgggctgcctgcgccgctgcaggcggggcccgccgcacctccgcaccacagacccttgctggccggcgccatggcgcctggggcgctgggctcgctgagcagccgctcggccttctcgccgctgcagcccaacgccagtcacttcggtgccgacgcgggcgcctacccgctgggcgcgccgctcggcctcagccccctgcgcctggcctactccgcggcggcggcgcacagccgcggtctggccttcatggcgccctactccactgccggcttggtgcccacgctcggcttccgcccacccatggactacgcctttagcgatctcatgcgtgaccgctcggccgccgctgctgcggcggtgcacaaggagccgacctacggcggcggcctgtacgggcctatggtcaacggcgctccggagaagcagtagggcgaggggcctggcagccggccggtccccaaacaggaaccccagccctgttcccgcgggccatcgacccctcttcgcccagcgctctctctgcgccctggctgggcgtcttctcactctaaggtggtttttgggttttgtttaggagggtgggtggggaaggctgagcaaagggggagcagctacagacaggtgcaggtgttctcggagggggtgcgcggcctgggtcctcatctcctacctccggatccctcttccagcctcacccggccccctttccaaaaggctgggaattcatgagaattcagaggctgcgacagcagcgcaggctcctgcggctccttagctgtgctcatccggctctcagtggatggcaggataatccgagagtcttttctgtgtctccccagccctcacttttaaaaaatttaaatattcgctctaacaaatataaatttaggatgtataaatctcttggcactgagtctttgggacacacatatatatcgatacaattgtaaaaaaaaaaaaaggaaacaagttttaaggtgcactttcctcgttgcggtatttgtcgctctctttgttgcttatgccgataagcatgggtttccttggtgcagtgtgtttttatatatgtataaatctatatataatctatacatatatatatacaagccagtgtataatgttataaaatggaattctaagttattaattgtaatctgtaggtgacctcggtattaacgtgaaaaacattcaaaacaagcaaaaaaagggacaaaatggaaaaaaattagactatgcgcgcattgtacttatcaggtttagagattaaatatattggaaactcgggatgaatcctgcccacctgcccctcttgcctgcggctggtctgtccctaaggagccgtcaaggtgcgcactgaagcaggaacagagcgacgtgtgactgagccagaaccgcccgctcgcgggcccatcctcgcctcccgggactcgccaaacgccctgactgaagggcccgcagcggaaaacgctgctgcagagcagcactttgtgctttcctttgcatagatatgagctagaaataaatgttattttctaagaaaacaa

SEQ ID NO: 127463 - DNA, 2840 bp, Homo sapiens
  Payload ID: 4946
  Gene Symbol: DMRTA2
  Gene Name: DMRT-like family A2
  Uniprot ID: Q96SC8
  ENST ID: ENST00000418121
  CDS Start-End: 97-1725
gcttgggttcctcaaggcggcgctttggcctagcgcgcggtgtgctcctcaccaggtctctcccctctcccaccttctttcccgtcaggtcctgtcatggagctgcgctcggagctgcccagcgtgcccggcgcggcgacggcggcggcggcaacagcgacggggccgcctgtggcgtcggtggcgtcggtggcggcagccgcggcggccgctgcatcgctaccggtgagcgtggcaggcggcttgctgcgggggccgccactgttgctgcgggcagccgagaagtacccgcggacccccaagtgcgcgcgctgtcgcaaccatggcgtggtgtcggccctcaagggccacaaacgctactgtcgctggaaggactgcctgtgcgccaagtgcacgctcatcgcggagcgccagcgtgtcatggcggcgcaggtggcgctgcgcaggcagcaggcgcaggaggagaacgaggcgcgcgagctgcagctgctctacggcactgccgaggggctggcgctggccgccgccaacggcatcatccccccgaggcccgcctacgaggtcttcggttcagtgtgcgccgccgacggcgggggacctggagcgggagcgcccgcggggaccggaggcggagcagctggcgcagggggctcagaggccaagttgcagaagtttgacctgtttcctaagacgctgctgcaggcaggccgcccgggcagcccgctgccgccgccggtgaagcccttatcacccgacggcgcagactcggggcccgggacgtcgtccccagaggtgcggcccggctcaggctcggagaacggcgatggcgagtccttttctggttcgcccctagctcgggcctccaaagaggcaggtggcagctgcccaggcagcgctggccctggcggcggcggcgaggaggacagcccgggctccgctagccctctgggctctgaatccggttcagaggctgacaaagaagagggtgaggccgcgccggcgccagggctgggcggaggctcgggtccacggcagcggacgccgctggatatcttgacacgcgtgttcccaggccaccggcgaggcgtcctggagctggtgttgcagggctgcggcggcgacgtggtgcaggccatcgagcaggtgctgaaccaccaccgtgggggcctggcggccggcctgggccctgcggcgcccccagataaggccgccgtgggtgctgcagcagctgcagacgacgcgtggcccagccgcgtcgacgccgccgccgccgccgccgccgccgccggggggcctgggctgcctgcgccgctgcaggcggggcccgccgcacctccgcaccacagacccttgctggccggcgccatggcgcctggggcgctgggctcgctgagcagccgctcggccttctcgccgctgcagcccaacgccagtcacttcggtgccgacgcgggcgcctacccgctgggcgcgccgctcggcctcagccccctgcgcctggcctactccgcggcggcggcgcacagccgcggtctggccttcatggcgccctactccactgccggcttggtgcccacgctcggcttccgcccacccatggactacgcctttagcgatctcatgcgtgaccgctcggccgccgctgctgcggcggtgcacaaggagccgacctacggcggcggcctgtacgggcctatggtcaacggcgctccggagaagcagtagggcgaggggcctggcagccggccggtccccaaacaggaaccccagccctgttcccgcgggccatcgacccctcttcgcccagcgctctctctgcgccctggctgggcgtcttctcactctaaggtggtttttgggttttgtttaggagggtgggtggggaaggctgagcaaagggggagcagctacagacaggtgcaggtgttctcggagggggtgcgcggcctgggtcctcatctcctacctccggatccctcttccagcctcacccggccccctttccaaaaggctgggaattcatgagaattcagaggctgcgacagcagcgcaggctcctgcggctccttagctgtgctcatccggctctcagtggatggcaggataatccgagagtcttttctgtgtctccccagccctcacttttaaaaaatttaaatattcgctctaacaaatataaatttaggatgtataaatctcttggcactgagtctttgggacacacatatatatcgatacaattgtaaaaaaaaaaaaaggaaacaagttttaaggtgcactttcctcgttgcggtatttgtcgctctctttgttgcttatgccgataagcatgggtttccttggtgcagtgtgtttttatatatgtataaatctatatataatctatacatatatatatacaagccagtgtataatgttataaaatggaattctaagttattaattgtaatctgtaggtgacctcggtattaacgtgaaaaacattcaaaacaagcaaaaaaagggacaaaatggaaaaaaattagactatgcgcgcattgtacttatcaggtttagagattaaatatattggaaactcgggatgaatcctgcccacctgcccctcttgcctgcggctggtctgtccctaaggagccgtcaaggtgcgcactgaagcaggaacagagcgacgtgtgactgagccagaaccgcccgctcgcgggcccatcctcgcctcccgggactcgccaaacgccctgactgaagggcccgcagcggaaaacgctgctgcagagcagcactttgtgctttcctttgcatagatatgagctagaaataaatgttattttctaagaaaacaa

SEQ ID NO: 127464 - DNA, 1910 bp, Homo sapiens
  Payload ID: 4947
  Gene Symbol: DMRTB1
  Gene Name: DMRT-like family B with proline-rich C-terminal, 1
  Uniprot ID: Q96MA1
  ENST ID: ENST00000371445
  CDS Start-End: 56-1084
acttgctctgcagctcccagaggtggtggttgtgttacgaaggctgaccctgccaatggccgacaaaatggtgcgcacccccaagtgctcgagatgcaggaaccatggcttcctggtgcccgtcaagggacacgcgggcaaatgccgctggaagcagtgcctctgcgagaagtgctacctgatctccgagcgccagaagatcatggccgcgcagaaggtgctcaagacgcaggccgccgaggaggagcaggaggcggccctgtgtgcgcaggggcccaagcaggcctccggggctgcggccgccgcccccgcccccgtccccgtcccggccgcgagcctccgcccgctgtccccggggactccctccggagacgccgacccgggacccgagggccgcgcggccgcttgcttcttcgagcagcccccgcggggccggaaccccggcccgagagccctccagccggttctgggcggccgcagccacgtggagccgagcgagcgagccgccgtggcgatgcccagccttgcgggacccccttttggggcggaggccgcaggcagtggctaccctggccccctagacctgcgcaggccgatgcggaccgtgcccggcccactgttcaccgactttgtgcgccctctgaacatcaacccggaccgtgcactgggccctgagtaccctggtggctccagcatgcacccctactgcccgttcccgctgggctacctggacgcccctcctggcgtccccctgcagcagggcttccggcatgtgtcccgcagccagtaccaaggcggaggcttggtgtcagaaccaggaggagacttccagccaagctactacctgccgccgccgccgccgccactgccgccccttccaccgcttccaccgcagccccagttcctcccgccaggctacctctctgcgctccacttcctccccccgccaccgccaccaccacctccatcatctttctcactgaccgtcctgtttgatactgacaaggagaacactgatgaccaggatgcagaggtactgtcgggtgagcccagccagccatcgtctcaggagcagtccgactaggccccaggcccgccctcctggccagcagagtggggcactggggggcaacagcaacagttttcttgtcttcattcagtgatatgtagggaggaaggaggttgatagcatagatggcaactgattcccagtttaagataggaggaaggagagcaatttctaagtttcaatcctgcgctgtacagttgaagaagagtgtggaggaagctattaccaggggagggccagggctctgaggagtgggcgctgggagaagctcccatttaggaatgaatttaactgtccttgggttacactaccatttattggaacaagccccagaggcagtatttgatttcctcaggccccactctaggacaggaggcaccatctatttcagccttctgctgcctttgcctggtcctccaggttgctgggggcaccacagacatcaagattccagttcatccaggtggctggagccagcagccaggaccagggtcgttgacagcaggttctgcagcatcctgccttgctgctctgtcccccacatcttcctggccacagccccttgcccctcctctaaggggttttactagcaagcatcctggctgctggggctacttcattccccctccataaagtttcagccattatgggcactggttttaaaaaatttattagtttgactatttgatgtttttatagtgattgccaactttaaaaagtaggctgttcataagcactgatgcagtccctagggaatagaatggtgcttctgatcacctgtgacatgaacagtttcttctgtgaggacagttggctattgaaataaaatgagcaatggaaa

SEQ ID NO: 127465 - DNA, 1044 bp, Homo sapiens
  Payload ID: 4948
  Gene Symbol: DMRTC1
  Gene Name: DMRT-like family C1
  Uniprot ID: Q5HYR2
  ENST ID: ENST00000596389
  CDS Start-End: 238-621
agctctcccggaatccctttcgggaggactccttgctccagccccctgagccctggcctttggccaatgaggcagggctcatgggattgcttttgattcggaggtccgggagggagtggatgattgggcttcctgaggaagtgagaacgcctcagggtcttgcctgctgtgagtgccttgaagagggagcagcgggcacgatcaaagagacacctggctcaaggaccaataaggagtatggctgcccctcccaaagctcccatccgtgtcaggaatttgaccatcagagcaggagccctcactgggaaggagaacaacatgctgcagcccgagacccacatcttcacagcccccgaggaggtccccaaagtctctgaccaggctttggtttctgcccactcagagtggcagcggaagctggaggccgctgaggctctgctgactctgagaaactctgcccaggcccctcctgactccatctccctgcaccagccttgcaacccaccagctcctgctggagataaaggattccagcctcccagcccctctctccgccccaggccagccagctccatctcgctgcctattggacatctgggatgcatctccctcttgagctaggaacccagaggaggaggcctcaatagagcactgcctatttggtatccagtttctgaatgtgcaaaatggttaacgtccaaaacgcttaacgtctttttttaaagccttcaggtgttttataagctttttattatatggggcaactccttggctgagggtggatattcttgtacctctgtcccttactcttttggatgctggggcctttttctgtctcataaagacaggattgtgcaatctaagttgatcagtctctcagtggggttctgtgtgagttcatatgccagagtttttattcgtcttgtgattgctgacatacctgtgcactcatgtgtatacccctgcatgtggaaacatgaagatgttttcactttgtgtctaggtttatgtacgtgaacaaataataaaccgttgttgttataa

SEQ ID NO: 127466 - DNA, 1190 bp, Homo sapiens
  Payload ID: 4948
  Gene Symbol: DMRTC1
  Gene Name: DMRT-like family C1
  Uniprot ID: Q5HYR2
  ENST ID: ENST00000595412
  CDS Start-End: 281-859
ctgtgaccgctgccacaaccatttgggtatcactgcccaaatcaggggccacaagcatttctgcctcttccaggcctgcgagtgtcacaattgtgccctcttctcatgagtatggtgtctgagatgcggaggggccagacctcctctaaatgggactaatcttagccctgctatcctttgcttcagagaacgcctcagggtcttgcctgctgtgagtgccttgaagagggagcagcgggcacgatcaaagagacacctggctcaaggaccaataaggagtatggctgcccctcccaaagctcccatccgtgtcaggaatttgaccatcagagcaggagccctcactgggaaggagaacaacatgctgcagcccgagacccacatcttcacagcccccgaggaggggagctcccaaggggctctgctgcttggccaggccccagaacctttgtctctgccctgtactccagtgaccttggagcagcaactggtttctccttctggggatccccacagggcccctgccctgcccagcatatgctcaactctgatcctccagccctgtgccacccttgaccctcttctactgcagccacaggtccccaaagtctctgaccaggctttggtttctgcccactcagagtggcagcggaagctggaggccgctgaggctctgctgactctgagaaactctgcccaggcccctcctgactccatctccctgcaccagccttgcaacccaccagctcctgctggagataaaggattccagcctcccagcccctctctccgccccaggccagccagctccatctcgctgcctattggacatctgggatgcatctccctcttgagctaggaacccagaggaggaggcctcaatagagcactgcctatttggtatccagtttctgaatgtgcaaaatggttaacgtccaaaacgcttaacgtctttttttaaagccttcaggtgttttataagctttttattatatggggcaactccttggctgagggtggatattcttgtacctctgtcccttactcttttggatgctggggcctttttctgtctcataaagacaggattgtgcaatctaagttgatcagtctctcagtggggttctgtgtgagttcatatgccagagtttttattcgtcttgtgattgctgacatacctgtgcactcat

SEQ ID NO: 127467 - DNA, 1524 bp, Homo sapiens
  Payload ID: 4948
  Gene Symbol: DMRTC1
  Gene Name: DMRT-like family C1
  ENST ID: ENST00000622727
  CDS Start-End: 335-667
cctcctcctgctcctcctcctcctcctcctcctcctcctccttctcctcctcctcccggtctgagggcggcggtctccgactcaagaccctggggctccgggtcttcttagcagccgccgcagcagccgcggcgacgtcactgtcctctcggcctggcacacagcgctccggccgccgaatgcccgtggacgcgcatctcttcccagagttcctgcttcctgggccagccaaagccgcagagaacgcctcagggtcttgcctgctgtgagtgccttgaagagggagcagcgggcacgatcaaagagacacctggctcaaggaccaataaggagtatggctgcccctcccaaagctcccatccgtgtcaggaatttgaccatcagagcaggagccctcactgggaaggagaacaacatgctgcagcccgagacccacatcttcacagcccccgaggaggggagctcccaaggggctctgctgcttggccaggccccagaacctttgtctctgccctgtactccagtgaccttggagcagcaactggtttctccttctggggatccccacagggcccctgccctgcccagcatatgctcaactctgatcctccagccctgtgccacccttgaccctcttctactgcagccacaggtcctgggaaagtagtggggtccagaaccctgggaggggcggagtttagtggatgggaagagcagaaggccttggtgggggtgggggaggaggttgagggaacagggggctgaaggggcacttgtcgtattgggaagaggtgtagtttcccagtgcctattctctcatgcactttcctttccaggtccccaaagtctctgaccaggctttggtttctgcccactcagagtggcagcggaagctggaggccgctgaggctctgctgactctgagaaactctgcccaggcccctcctgactccatctccctgcaccagccttgcaacccaccagctcctgctggagataaaggattccagcctcccagcccctctctccgccccaggccagccagctccatctcgctgcctattggacatctgggatgcatctccctcttgagctaggaacccagaggaggaggcctcaatagagcactgcctatttggtatccagtttctgaatgtgcaaaatggttaacgtccaaaacgcttaacgtctttttttaaagccttcaggtgttttataagctttttattatatggggcaactccttggctgagggtggatattcttgtacctctgtcccttactcttttggatgctggggcctttttctgtctcataaagacaggattgtgcaatctaagttgatcagtctctcagtggggttctgtgtgagttcatatgccagagtttttattcgtcttgtgattgctgacatacctgtgcactcatgtgtatacccctgcatgtggaaacatgaagatgttttcactttgtgtctaggtttatgtacgtgaacaaataataaaccgttgttgttataaggca

SEQ ID NO: 127468 - DNA, 611 bp, Homo sapiens
  Payload ID: 4948
  Gene Symbol: DMRTC1
  Gene Name: DMRT-like family C1
  ENST ID: ENST00000615063
  CDS Start-End: 196-611
actgtcctctcggcctggcacacagcgctccggccgccgaatgcccgtggacgcgcatctcttcccagagttcctgcttcctgggccagccaaagccgcagagaacgcctcagggtcttgcctgctgtgagtgccttgaagagggagcagcgggcacgatcaaagagacacctggctcaaggaccaataaggagtatggctgcccctcccaaagctcccatccgtgtcaggaatttgaccatcagagcaggagccctcactgggaaggagaacaacatgctgcagcccgagacccacatcttcacagcccccgaggaggggagctcccaaggggctctgctgcttggccaggccccagaacctttgtctctgccctgtactccagtgaccttggagcagcaactggtttctccttctggggatccccacagggcccctgccctgcccagcatatgctcaactctgatcctccagccctgtgccacccttgaccctcttctactgcagccacaggtccccaaagtctctgaccaggctttggtttctgcccactcagagtggcagcggaagctggaggccgctgaggctctgctgactctgagaaactctgc

SEQ ID NO: 127469 - DNA, 1197 bp, Homo sapiens
  Payload ID: 4949
  Gene Symbol: DMRTC1B
  Gene Name: DMRT-like family C1B
  Uniprot ID: Q5HYR2
  ENST ID: ENST00000334036
  CDS Start-End: 196-774
actgtcctctcggcctggcacacagcgctccggccgccgaatgcccgtggacgcgcatctcttcccagagttcctgcttcctgggccagccaaagccgcagagaacgcctcagggtcttgcctgctgtgagtgccttgaagagggagcagcgggcacgatcaaagagacacctggctcaaggaccaataaggagtatggctgcccctcccaaagctcccatccgtgtcaggaatttgaccatcagagcaggagccctcactgggaaggagaacaacatgctgcagcccgagacccacatcttcacagcccccgaggaggggagctcccaaggggctctgctgcttggccaggccccagaacctttgtctctgccctgtactccagtgaccttggagcagcaactggtttctccttctggggatccccacagggcccctgccctgcccagcatatgctcaactctgatcctccagccctgtgccacccttgaccctcttctactgcagccacaggtccccaaagtctctgaccaggctttggtttctgcccactcagagtggcagcggaagctggaggccgctgaggctctgctgactctgagaaactctgcccaggcccctcctgactccatctccctgcaccagccttgcaacccaccagctcctgctggagataaaggattccagcctcccagcccctctctccgccccaggccagccagctccatctcgctgcctattggacatctgggatgcatctccctcttgagctaggaacccagaggaggaggcctcaatagagcactgcctatttggtatccagtttctgaatgtgcaaaatggttaacgtccaaaacgcttaacgtctttttttaaagccttcaggtgttttataagctttttattatatggggcaactccttggctgagggtggatattcttgtacctctgtcccttactcttttggatgctggggcctttttctgtctcataaagacaggattgtgcaatctaagttgatcagtctctcagtggggttctgtgtgagttcatatgccagagtttttattcgtcttgtgattgctgacatacctgtgcactcatgtgtatacccctgcatgtggaaacatgaagatgttttcactttgtgtctaggtttatgtacgtgaacaaataataaaccgttgttgttataa

SEQ ID NO: 127470 - DNA, 1100 bp, Homo sapiens
  Payload ID: 4949
  Gene Symbol: DMRTC1B
  Gene Name: DMRT-like family C1B
  Uniprot ID: Q5HYR2
  ENST ID: ENST00000373532
  CDS Start-End: 95-673
agaacgcctcagggtcttgcctgctgtgagtgccttgaagagggagcagcgggcacgatcaaagagacacctggctcaaggaccaataaggagtatggctgcccctcccaaagctcccatccgtgtcaggaatttgaccatcagagcaggagccctcactgggaaggagaacaacatgctgcagcccgagacccacatcttcacagcccccgaggaggggagctcccaaggggctctgctgcttggccaggccccagaacctttgtctctgccctgtactccagtgaccttggagcagcaactggtttctccttctggggatccccacagggcccctgccctgcccagcatatgctcaactctgatcctccagccctgtgccacccttgaccctcttctactgcagccacaggtccccaaagtctctgaccaggctttggtttctgcccactcagagtggcagcggaagctggaggccgctgaggctctgctgactctgagaaactctgcccaggcccctcctgactccatctccctgcaccagccttgcaacccaccagctcctgctggagataaaggattccagcctcccagcccctctctccgccccaggccagccagctccatctcgctgcctattggacatctgggatgcatctccctcttgagctaggaacccagaggaggaggcctcaatagagcactgcctatttggtatccagtttctgaatgtgcaaaatggttaacgtccaaaacgcttaacgtctttttttaaagccttcaggtgttttataagctttttattatatggggcaactccttggctgagggtggatattcttgtacctctgtcccttactcttttggatgctggggcctttttctgtctcataaagacaggattgtgcaatctaagttgatcagtctctcagtggggttctgtgtgagttcatatgccagagtttttattcgtcttgtgattgctgacatacctgtgcactcatgtgtatacccctgcatgtggaaacatgaagatgttttcactttgtgtctaggtttatgtacgtgaacaaataataaaccgttgttgttataaggca

SEQ ID NO: 127471 - DNA, 1042 bp, Homo sapiens
  Payload ID: 4949
  Gene Symbol: DMRTC1B
  Gene Name: DMRT-like family C1B
  Uniprot ID: Q5HYR2
  ENST ID: ENST00000373533
  CDS Start-End: 236-619
ctctcccggaatccctttcgggaggactccttgctccagccccctgagccctggcctttggccaatgaggcagggctcatgggattgcttttgattcggaggtccgggagggagtggatgattgggcttcctgaggaagtgagaacgcctcagggtcttgcctgctgtgagtgccttgaagagggagcagcgggcacgatcaaagagacacctggctcaaggaccaataaggagtatggctgcccctcccaaagctcccatccgtgtcaggaatttgaccatcagagcaggagccctcactgggaaggagaacaacatgctgcagcccgagacccacatcttcacagcccccgaggaggtccccaaagtctctgaccaggctttggtttctgcccactcagagtggcagcggaagctggaggccgctgaggctctgctgactctgagaaactctgcccaggcccctcctgactccatctccctgcaccagccttgcaacccaccagctcctgctggagataaaggattccagcctcccagcccctctctccgccccaggccagccagctccatctcgctgcctattggacatctgggatgcatctccctcttgagctaggaacccagaggaggaggcctcaatagagcactgcctatttggtatccagtttctgaatgtgcaaaatggttaacgtccaaaacgcttaacgtctttttttaaagccttcaggtgttttataagctttttattatatggggcaactccttggctgagggtggatattcttgtacctctgtcccttactcttttggatgctggggcctttttctgtctcataaagacaggattgtgcaatctaagttgatcagtctctcagtggggttctgtgtgagttcatatgccagagtttttattcgtcttgtgattgctgacatacctgtgcactcatgtgtatacccctgcatgtggaaacatgaagatgttttcactttgtgtctaggtttatgtacgtgaacaaataataaaccgttgttgttataa

SEQ ID NO: 127472 - DNA, 458 bp, Homo sapiens
  Payload ID: 4949
  Gene Symbol: DMRTC1B
  Gene Name: DMRT-like family C1B
  ENST ID: ENST00000440247
  CDS Start-End: 157-458
accgtctgactggttctgacttgccggaggctgaggcaaccacaggctgacatcagaattagagaacgcctcagggtcttgcctgctgtgagtgccttgaagagggagcagcgggcacgatcaaagagacacctggctcaaggaccaataaggagtatggctgcccctcccaaagctcccatccgtgtcaggaatttgaccatcagagcaggagccctcactgggaaggagaacaacatgctgcagcccgagacccacatcttcacagcccccgaggaggggagctcccaaggggctctgctgcttggccaggccccagaacctttgtctctgccctgtactccagtgaccttggagcagcaactggtttctccttctggggatccccacagggcccctgccctgcccagcatatgctcaactctgatcctccagccctgtgccacccttgaccctct

SEQ ID NO: 127473 - DNA, 472 bp, Homo sapiens
  Payload ID: 4949
  Gene Symbol: DMRTC1B
  Gene Name: DMRT-like family C1B
  ENST ID: ENST00000438696
  CDS Start-End: 281-472
ctgtgaccgctgccacaaccatttgggtatcactgcccaaatcaggggccacaagcatttctgcctcttccaggcctgcgagtgtcacaattgtgccctcttctcatgagtatggtgtctgagatgcggaggggccagacctcctctaaatgggactaatcttagccctgctatcctttgcttcagagaacgcctcagggtcttgcctgctgtgagtgccttgaagagggagcagcgggcacgatcaaagagacacctggctcaaggaccaataaggagtatggctgcccctcccaaagctcccatccgtgtcaggaatttgaccatcagagcaggagccctcactgggaaggagaacaacatgctgcagcccgagacccacatcttcacagcccccgaggaggggagctcccaaggggctctgctgcttggccaggccccagaacctttgtctctgccctgtactccagtg

SEQ ID NO: 127474 - DNA, 613 bp, Homo sapiens
  Payload ID: 4949
  Gene Symbol: DMRTC1B
  Gene Name: DMRT-like family C1B
  ENST ID: ENST00000481112
  CDS Start-End: 1-336
gctgcccctcccaaagctcccatccgtgtcaggaatttgaccatcagagcaggagccctcactgggaaggagaacaacatgctgcagcccgagacccacatcttcacagcccccgaggaggggagctcccaaggggctctgctgcttggccaggccccagaacctttgtctctgccctgtactccagtgaccttggagcagcaactggtttctccttctggggatccccacagggcccctgccctgcccagcatgtccccaaagtctctgaccaggctttggtttctgcccactcagagtggcagcggaagctggaggccgctgaggctctgctgactctgagaaactctgcccaggcccctcctgactccatctccctgcaccagccttgcaacccaccagctcctgctggagataaaggattccagcctcccagcccctctctccgccccaggccagccagctccatctcgctgcctattggacatctgggatgcatctccctcttgagctaggaacccagaggaggaggcctcaatagagcactgcctatttggtatccagtttctgaatgtgcaaaatggttaacgtccaaaacgcttaacgtcttttt

SEQ ID NO: 127475 - DNA, 1524 bp, Homo sapiens; identical to SEQ ID NO: 127467
  Payload ID: 4949
  Gene Symbol: DMRTC1B
  Gene Name: DMRT-like family C1B
  ENST ID: ENST00000472595
  CDS Start-End: 335-667

SEQ ID NO: 127476 - DNA, 1792 bp, Homo sapiens
  Payload ID: 4950
  Gene Symbol: DMRTC2
  Gene Name: DMRT-like family C2
  Uniprot ID: Q8IXT2
  ENST ID: ENST00000269945
  CDS Start-End: 52-1155
gtctttgggcgtcttcttgactgaatctgactccattggaggctgtgatccatggaacccagtgacatgcctgctggctaccactgccccttagactctgccccctgggatgagaccagagacccccagagcacagagctgatccccaggagagccatcagccgctctccaacctgcgcccgctgccgcaaccatggtgtcaccgcccatctcaagggccacaagcgcctctgcctcttccaggcttgcgagtgtcacaaatgtgtcctcatcctggagcgccgcagggtcatggctgcccaggtggccttgcgtaggcagcaggaggcgcagctaaagaagcacctgatgaggagaggggaagcctctcccaaagctcccaaccacttcagaaagggaaccactcagccacaggtcccctctggaaaggagaacatagcaccccagcctcagaccccccatggggcagtcctgctggcaccgacaccccccgggaagaactcctgtgggcctctgctgctcagccatcccccggaagcctcgcccttgtcctggactccggtgcctcctggcccttgggtccctggacactggctgcctccaggcttctccatgccaccaccagtggtgtgccgcctgctgtaccaagaacctgctgtctctctgcctcccttccctggctttgaccctggcacctccctccagctgcccactcatgggcccttcaccacctgcccaggatctcacccagtactgacagctcctctttctggagagccccaagggccccctagccagccccgcacacactcaactctgatactccagccctgtggcaccccagaccctcttcagctacagccacaggcctctggagcctcgtgcctggcccggacatctggcccctcagagtggcagctgcagcaagaggcagctgaagccctcgtggggctgaaagattcatcccaggctcctcgtgtgaccccttctgtgccccccaaccctgcctggatctccctgcttcacccctgtggcccaccagctcctgctggaggaagaggattccagcctgttggcccctgtcttcgacccagcccagccccctctgttgctctgcatattggccgtctggggtccatctccctcctgagctagaaacccagagatggaggctgtcttgctatggcagggaggtgacagcctgctggcactgtatatttagtgtcttacttaaggatttatgcatggaatttaatgtagtacaagcttcgggcttttttgtttgtttgtttgtttgtttgtttaagctttcaggtgcttcattagctttcagttcctttggtagtgtgggcatttccttggctgacagtggatattcttgtacccttcttgggtcctgggatctcttgaaatccccaataaagagagagttgtgctatttaagctgaccagtatctataaacgtgtttgcatgagtttacatcccaggattccatgattctgtaaatgcctatgcattcatgtctgtctccatgcatgtgaaaacaggagagtgttttcattttgtgtctaggtttgtgtgagtaagcaagaaataaacctttgttgttgtaagccactgagatttggagagtgttaccacagcctaacctagtctatcctgactgacagaaaggacttgttcatttcgcttctcaaagtgaaaaatctgttatccaatagctaccatagatgaaaacaaacttggatttttttctttgtccaaataaaaaaaaatgatgtaaagaaataa

SEQ ID NO: 127477 - DNA, 1675 bp, Homo sapiens
  Payload ID: 4950
  Gene Symbol: DMRTC2
  Gene Name: DMRT-like family C2
  ENST ID: ENST00000596827
  CDS Start-End: 87-1343
gagcttggcggttcctctggccactttctcacagtgtctttgggcgtcttcttgactgaatctgactccattggaggctgtgatccatggaacccagtgacatgcctgctggctaccactgccccttagactctgccccctgggatgagaccagagacccccagagcacagagctgatccccaggagagccatcagccgctctccaacctgcgcccgctgccgcaaccatggtgtcaccgcccatctcaagggccacaagcgcctctgcctcttccaggcttgcgagtgtcacaaatgtgtcctcatcctggagcgccgcagggtcatggctgcccaggtggccttgcgtaggcagcaggaggcgcagctaaagaagcacctgatgaggagaggggaagcctctcccaaagctcccaaccacttcagaaagggaaccactcagccacaggtcccctctggaaaggagaacatagcaccccagcctcagaccccccatggggcagtcctgctggcaccgacaccccccgggaagaactcctgtgggcctctgctgctcagccatcccccggaagcctcgcccttgtcctggactccggtgcctcctggcccttgggtccctggacactggctgcctccaggcttctccatgccaccaccagtggtgtgccgcctgctgtaccaagaacctgctgtctctctgcctcccttccctggctttgaccctggcacctccctccagctgcccactcatgggcccttcaccacctgcccaggatctcacccagtactgacagctcctctttctggagagccccaagggccccctagccagccccgcacacactcaactctgatactccagccctgtggcaccccagaccctcttcagctacagccacaggtcctgggaaagaagtgggatctagggccctgggaggaggttgagcctggggaaggaaaaagcaggaaactgaaggaagcaggggctgaggaacacttagagggtgggcagaagcgggggttcccagtctgcttgtctccctttcccttgcaggcctctggagcctcgtgcctggcccggacatctggcccctcagagtggcagctgcagcaagaggcagctgaagccctcgtggggctgaaagattcatcccaggctcctcgtgtgaccccttctgtgccccccaaccctgcctggatctccctgcttcacccctgtggcccaccagctcctgctggaggaagaggattccagcctgttggcccctgtcttcgacccagcccagccccctctgttgctctgcatattggccgtctggggtccatctccctcctgagctagaaacccagagatggaggctgtcttgctatggcagggaggtgacagcctgctggcactgtatatttagtgtcttacttaaggatttatgcatggaatttaatgtagtacaagcttcgggcttttttgtttgtttgtttgtttgtttgtttaagctttcaggtgcttcattagctttcagttcctttggtagtgtgggcatttccttggctgacagtggatattcttgtacccttcttgggtcctgggatctcttgaaatccccaataaagagagagttgtgctatttaagctgaccagtatctataaacgtgtttgcatgagtttacatccca

SEQ ID NO: 127478 - DNA, 566 bp, Homo sapiens
  Payload ID: 4950
  Gene Symbol: DMRTC2
  Gene Name: DMRT-like family C2
  ENST ID: ENST00000596660
  CDS Start-End: 82-566
aattgttggtagtggccacaggagcaggaagcgctggacacagtgacttcacatgtttacacaaaaacctgaataagatccatggaacccagtgacatgcctgctggctaccactgccccttagactctgccccctgggatgagaccagagacccccagagcacagagctgatccccaggagagccatcagccgctctccaacctgcgcccgctgccgcaaccatggtgtcaccgcccatctcaagggccacaagcgcctctgcctcttccaggcttgcgagtgtcacaaatgtgtcctcatcctggagcgccgcagggtcatggctgcccaggtggccttgcgtaggcagcaggaggcgcagctaaagaagcacctgatgaggagaggggaagcctctcccaaagctcccaaccacttcagaaagggaaccactcagccacaggtcccctctggaaaggagaacatagcaccccagcctcagaccccccatggggcagtcctgctggcaccgacaccccccgggaagaactcctgtgggcctctgctgctcagccatcccccgga

SEQ ID NO: 127479 - DNA, 3076 bp, Homo sapiens
  Payload ID: 4950
  Gene Symbol: DMRTC2
  Gene Name: DMRT-like family C2
  Uniprot ID: Q8IXT2
  ENST ID: ENST00000601660
  CDS Start-End: 266-940
aataaggggtactcgacgccccattggccacctgcctcgaaagggggaagacagtctgggcgggcaggacgtgcggagggagaggcagcggtggcgcgaggctcaactcgaagcgctattggtgggactgatagtcttgtgcgccaagaagctggcagaagggaaggggcgggacatcagttcaggatctcaaaccgcattggtcgtctgcctcggctgagagaggcgatgcttgaagttcattggtctttgtgagacaggatccatggaacccagtgacatgcctgctggctaccactgccccttagactctgccccctgggatgagaccagagacccccagagcacagagctgatccccaggagagccatcagccgctctccaacctgcgcccgctgccgcaaccatggtgtcaccgcccatctcaagggccacaagcgcctctgcctcttccaggcttgcgagtgtcacaaatgtgtcctcatcctggagcgccgcagggtcatggctgcccaggtggccttgcgtaggcagcaggaggcgcagctaaagaagcacctgatgaggagaggggaagcctctcccaaagctcccaaccacttcagaaagggaaccactcagccacaggtcccctctggaaaggagaacatagcaccccagcctcagaccccccatggggcagtcctgctggcaccgacaccccccgggaagccttgtacccaactccagcctgtgccctctgcccctgcagaactcctgtgggcctctgctgctcagccatcccccggaagcctcgcccttgtcctggactccggtgcctcctggcccttgggtccctggacactggctgcctccaggcttctccatgccaccaccagtggtgtgccgcctgctgtaccaagaacctgctgtctctctgcctcccttccctggctttgaccctggcacctccctccagctgcccactcatgggcccttcaccacctgcccaggatctcacccagtactgacagctcctctttctggagagccccaagggccccctagccagccccgcacacactcaactctgatactccagccctgtggcaccccagaccctcttcagctacagccacaggtcctgggaaagaagtgggatctagggccctgggaggaggttgagcctggggaaggaaaaagcaggaaactgaaggaagcaggggctgaggaacacttagagggtgggcagaagcgggggttcccagtctgcttgtctccctttcccttgcaggcctctggagcctcgtgcctggcccggacatctggcccctcagagtggcagctgcagcaagaggcagctgaagccctcgtggggctgaaagattcatcccaggctcctcgtgtgaccccttctgtgccccccaaccctgcctggatctccctgcttcacccctgtggcccaccaggtgggccatgaaaggagaggatggatagggatggctgggaaatggagatcactgaagtacacagggactaaccaaggagatgagggggtcgacaggttgaacgtcttcaggcccaggaccccaagctcctcagcctggcccctgggattgcagttgagagttattcagtgaatcctttttatcagtttggcactcgacagcaaatttcttgatatcaaggaaagtggggcactgagaaaggcagggacttgcccaagggcatatagtgagacagtggcagggaacccaatgctctgtctctggacccaggctgcctgctgaagtctgaagtggggtctggcctgggaggaggtctgataagtgccttcaaggagcttacgttctagttagggaaattggatgccttcacaaggctcagtgacaaacctgaagaagattggaggaaccttgaagagtgagaaacacctagggggacagacagggaaagctgcgaattctcttgtccaaatagtggattgggcagactggcctggaggaaatgctagaacagagggaaaggaggctggagaggcttctgatggtggagatctggcatgccaggcttaggtgtctagaacagcaactgtatgtgaaggggagccagggaacgtttctgaactaagcaaggacaaattcagagaccctgagctttagaaagacaagtgggtggctttgatggacggtttggaggaggcaagactggaggtgggaaaattagcaaggaggtctgtgaaataatccaggagaacaatgatgaggcctggattggattcggtaaaaagagggggttgctagaaggaaaaacaggtgtgacctgatcctgccccttccttcttgcctgtagctcctgctggaggaagaggattccagcctgttggcccctgtcttcgacccagcccagccccctctgttgctctgcatattggccgtctggggtccatctccctcctgagctagaaacccagagatggaggctgtcttgctatggcagggaggtgacagcctgctggcactgtatatttagtgtcttacttaaggatttatgcatggaatttaatgtagtacaagcttcgggcttttttgtttgtttgtttgtttgtttgtttaagctttcaggtgcttcattagctttcagttcctttggtagtgtgggcatttccttggctgacagtggatattcttgtacccttcttgggtcctgggatctcttgaaatccccaataaagagagagttgtgctatttaagctgaccagtatctataaacgtgtttgcatgagtttacatcccaggattccatgattctgtaaatgcctatgcattcatgtctgtctccatgcatgtgaaaacaggagagtgttttcattttgtgtctaggtttgtgtgagtaagcaagaaataaacctttgttgttgtaagccactgagatttggagagtgttaccacagcctaacctagtctatcctgactgacagaaaggacttgttcatttcgcttctcaaagtgaaaaatctgttatccaatagctaccatagatgaaaacaaacttggatttttttctttgtccaaataaaaaaaaatgatgtaaag

SEQ ID NO: 127480 - DNA, 556 bp, Homo sapiens
  Payload ID: 4950
  Gene Symbol: DMRTC2
  Gene Name: DMRT-like family C2
  ENST ID: ENST00000596258
  CDS Start-End: 153-556
ttggaggctgtggtaaccgtgaactagctgcacgaacacggtccctcctgcctttccgtcctcctccctcttagccggactccctaacccaggagcaggaagcgctggacacagtgacttcacatgtttacacaaaaacctgaataagatccatggaacccagtgacatgcctgctggctaccactgccccttagactctgccccctgggatgagaccagagacccccagagcacagagctgatccccaggagagccatcagccgctctccaacctgcgcccgctgccgcaaccatggtgtcaccgcccatctcaagggccacaagcgcctctgcctcttccaggcttgcgagtgtcacaaatgtgtcctcatcctggagcgccgcagggtcatggctgcccaggtggccttgcgtaggcagcaggaggcgcagctaaagaagcacctgatgaggagaggggaagcctctcccaaagctcccaaccacttcagaaagggaaccactcagccacaggtcccctctggaaaggagaacatagcaccccagcctcagac

SEQ ID NO: 127481 - DNA, 559 bp, Homo sapiens
  Payload ID: 4950
  Gene Symbol: DMRTC2
  Gene Name: DMRT-like family C2
  ENST ID: ENST00000600017
  CDS Start-End: 63-559
tcgtctgcctcggctgagagaggcgatgcttgaagttcattggtctttgtgagacaggatccatggaacccagtgacatgcctgctggctaccactgccccttagactctgccccctgggatgagaccagagacccccagagcacagagctgatccccaggagagccatcagccgctctccaacctgcgcccgctgccgcaaccatggtgtcaccgcccatctcaagggccacaagcgcctctgcctcttccaggcttgcgagtgtcacaaatgtgtcctcatcctggagcgccgcagggtcatggctgcccaggtggccttgcgtaggcagcaggaggcgcagctaaagaagcacctgatgaggagaggggaagcctctcccaaagctcccaaccacttcagaaagggaaccactcagccacaggtcccctctggaaaggagaacatagcaccccagcctcagaccccccatggggcagtcctgctggcaccgacaccccccgggaagaactcctgtgggcctctgctgctcagccatcccccggaagcctcgccctt

SEQ ID NO: 127482 - DNA, 11072 bp, Homo sapiens
  Payload ID: 4951
  Gene Symbol: DMXL1
  Gene Name: Dmx-like 1
  Uniprot ID: Q9Y485
  ENST ID: ENST00000311085
  CDS Start-End: 81-9164
gagggaaggagggagggaagcagccgctgacccgtggcatgagctggatgcggtgtccgttgcaggactagggcgccgacatgaacctgcaccaggtgctgaccggggctgtgaaccctggcgaccactgcttctccgtgggcagcattggcgaccagcgcttcacggcttatgcatctggatgtgacattgtaatactgggaagcgattttgaaagattacagataatcccaggagctaaacatggaaatattcaagtgggatgtgtagactgttcaatgcaacaaggcaagattgcagcgtcttatggaaatgttatctccatttttgaaccagttaacctaccaaaacaaaagaaaaatttggaattatatagtcagtggcagaaaagtggccaattttttctggaatcaatagcacacaatataacctgggatcccacaggcagtcgtcttttaactggttccagctatttgcaactctggtccaatactaacttggagaagccaactgaagatgaaaatttaaataaaacagatcttaactttggagattggaaatgcatttggcattgcaaaactgcttcccaagttcatttaatgaaattttcaccagatggagaattttttgccactgctgggaaggatgactgtcttttgaaggtttggtataatgtagaaaactggcggacagctgttacttctccagatggaagttcagaaaaacaatcccaaggagaaattgacttttcttttgtgtatctggcccatcctcgagcagtaaatggattttcctggcgtaaaacaagcaaatatatgcctagggcttctgtatgtaatgtactgttgacttgctgcaaagataatgtgtgtcgtctttgggtagagacatttttaccaaatgattgtttgctatacggaggtgactgcagccattggactgaatcaattaatttaacaaataacttcaagagaaatgcttccagtaaagaacgagttcaaaatgctttagaagtaaatctgagacattttcgtagaggtcggaggagatcacttgctcttgtagcacatacgggatatctaccacatcagcaggatcctcatcatgttcacaggaacactccactgcatgccaatgcactttgccactttcatattgcagccagcatcaacccagccacagacattccacttcttccatctattacatctctgagtctaaatgaaaatgaagagaagaccggaccttttgttgtacactggctaaacaataaagaactgcattttactttgtccatggaagtttttttacagcaacttagaaaaagttttgaacaaccatcttctgaggccagtgtagaagattctaatcaggcagatgtaaaatctgatgaagaaactgatgatggtgttgatgatctgaaaataaatcccgaaaagaaggaattaggctgtgataaaatggtaccaaactcaagttttacatcattatcgtcagctgccattgatcatcagattgaagtacttctgtctgaatggagtaaaaatgcagatatgctatttagtattcatcccatggatggttctttgctagtttggcatgtggattggctggatgaataccagcctggtatgtttcgtcaagtacaggtgtcctttgtttccagaattccagtagctttccccacaggtgatgcaaactctctctgtaaaagcataatgatgtatgcctgtaccaagaatgttgacttggctattcagcaggggaaacaaaaaccttctggcctcacccgttccacatcaatgcttatttcttctggtcacaataaatcatctaatagtttaaaattaagtatttttacgcctaatgttatgatgatatcaaaacatgctgatggttctctgaatcagtggctggtcagttttgccgaggaatctgctttttctactgttctcagtatttcccacaaatccagatattgtggtcatcgttttcatcttaatgatttagcttgccactcagtattaccattattgctgacaacatcacaccataatgcattaaggacaccagatgttgataacccagagcaaccttttgatgctctaaatattgaagaatgctctttgacacaacaaaataaaagcactgttgacgtggcatttcaggatcccagtgcagtttacagtgagcttattctgtggagggttgacccagttgggccattgtctttttctggaggagtttctgagcttgcccggattaattctcttcatgtttctgccttttccaatgtggcatggctgcccactcttatacccagttattgtctgggtgcatactgcaactctcctagtgcatgctttgtagccagtgatggacaatatctgagattatatgaagcagttattgatgctaagaaacttttatctgagctttctaaccctgaaatttctaaatatgttggtgaagtctttaacatcgtcagtcaacaatcaacagccaggccaggatgcattattgcattagatcccattaccaaacttcatggcagaaaaacccaactgcttcatgtttttgaagaagacttcattttgaataaccttgagaagaaaagccttggcaaagacagcattttatctaatgcaggcagctcacctaatggattttctgagaagttctacctaattgtaatagaatgcactcaagacaaccgttcactgttacacatgtggaatttacatctaaagtcaattcctgtctcattagatgaaaaagtagatacaaaattatccgaagcggtttggcagccagaagaacattattcttcttctccagagaagatcctatctcctttttcacaaaagtatcaggcttgcagagcaaatctccagagtaccagcaggttgactctgttttcagaaatggtttatagccaagaattgcatttaccagaaggagttgagataataagtattaagccatcagcaggacatctgagttcatcttctatatatcctgcatgcagtgctccttatttattggcaacttcatgttcagatgagaaagtaagattctggagatgcagagtaacagatggagaatctgccacgtcaaagaatggaaaaattgatcttgcatacatttgggaagaatggccattacttattgaagatggacttcagagcaatagtagtataactgtacctggtaggcctgtagaagttagctgtgcacatacaaatcgtttagcagtagcttataagcagcctgcatctaatagtagatcttcccaggactttgtgatgcatgtaagtatttttgaatgtgagtcaacaggaggttcatgttgggtccttgagcagacaattcatttagatgagttaagcacagtattggattctggcattagtgttgatagcaatttagtggcctataataaacaagacatgtatttatctagtaaagagaatatcacatcaaacacaaagcatttagttcacttagattggatgtctagagaagacggttctcatatcctgactgtaggaattggatcaaaactttttatgtatggacccctggctggcaaggtacaagaccaaactggtaaggaaaccctggcatttcctctctgggagagtaccaaagttgtgcccctttctaaatttgtactattacgaagtgtggacctagtttcttctgtagatggctccccaccttttcctgtttctttatcgtgggtccgggatggcatccttgtggtaggaatggactgtgaaatgcatgtgtattgccaatggcaaccatcttctaaacaagaacctgttataacagattcgtacagtgggagcactccatctataacaagtttaataaaacagagtaactccagttctgggttacatcctccaaagaaaactctgactcgatccatgaccagtcttgcacagaaaatctgtggaaagaaaactgcattcgatccttcagtggatatggaagattcaggtctttttgaagcagctcatgtactttccccgactctacctcagtatcatcccttgcagcttttggaactcatggatcttggtaaagttcggagagccaaggccatcttgtcccatcttgttaagtgcattgctggggaagttgtggctctgaatgaagctgaatctaatcatgaacgccgccttaggtctctcacaatcagtgctagtggaagcactaccagagacccccaggcattcaacaaggctgaaaatacagattacacagaaatagattctgttcctccacttcctttatatgccttacttgcagcagatgatgatagctgttactcatctttggagaaatctagtaatgagagtacgttaagtaaatcaaaccaattatctaaagaaagttatgatgagctttttcagactcaacttctaatgactgatactcatatgttagagacagatgaagaaaatacaaagcctagagttattgacctttcacagtacagtccgacttactttggacctgagcatgctcaggttctttctggccacttacttcattctagtttaccaggactcagccggatggagcagatgtctttgatggccttagcagatacaattgcaactacaagcactgatattggagaaagccgagacagaagccaaggtggagaaactcttgatgaatgtgggttaaaatttcttttggctgttcgactccatacctttcttacaacttcccttccagcctatcgagctcaactccttcaccaaggcctgtctacaagtcattttgcttgggcatttcactcagtagcagaagaagaactgctgaacatgttgccagccatgcagaaagatgatcccacttggtctgaactaagagctatgggtgtggggtggtgggtccggaatacccgcatcttacgcaaatgcatagaaaaagtagctaaagcagccttttatagaaagaatgatcctttagatgctgccattttttaccttgcaatgaaaaagaaagctgtgatttggggattatatagagctgaaaaaaacaccaggatgacacagttttttggacacaattttgaggatgagaggtggcgtaaagcagctttaaagaatgctttttctttgctaggcaaacaaagatttgaacattctgcagcattttttcttttagctggttgcctcagagatgcaattgaggtatgtcttgagaaattgaatgacattcagttggctcttgtaatagcaagactctatgagtctgaatttgatacatctgcagcatataaatctattttacgtaaaaaagttttgggaatcgattctcctgtcagtgaactgtgttcattgaacataaatatgcatcatgatccttttcttcggagcatggcatattggattttggaagattatagtggtgctctggaaacattaataaagcaacctatcagagagaatgatgatcaagttttatcagccagtaatcctacagtttttaatttctacaattatctaagaacacatcctcttttgctgagacgtcattttggatcatctgatacattttccacacatatgagcctaacaggaaaaagtggactggcaggaacaattaatttaagtgaaagacgtttattttttaccactgccagtgctcatttaaaagctggctgcccaatgttggctttggaagtattatcaaagatgcctaaagtcatcaagaaaacaagacctttttatagggcttctagttttctggatactagtaaagactgttctccttcttctccattaaagttggatgcaagggaagataagtcttctgctgttgattggtcacagtcactgataaatggttttggatcttcttcagagggttcctcagagaagcaatcaaactccactctttcttttgactggagccaaccaagtgttgtgtttcaggatgactctttagagttaaaatgggacagtgataatgatgaagaaaatgaggatgtccctatttcaatgaaagaactaaaacctttacagagaaaaacagataaaaagttggatgacataagttctaactacacagaatctttcagcacactagatgaaaatgaccttttaaatccatcagaagatataattgcagttcagttaaaatttagagcatgtttaaagattctcacagtagaacttcgtactttatctactggctatgaaatagatggtggaaaattgcgttaccaactataccactggcttgaaaaagaggtgatagctcttcagaggacttgtgacttttgctcagatgctgaagaactacagtctgcatttggcagaaatgaagatgaatttggattaaatgaggatgctgaagatttgcctcaccaaacaaaagtgaaacaactgagagaaaattttcaggaaaaaagacagtggctcttgaagtatcagtcacttttgagaatgtttcttagttactgcatacttcatggatcccatggtgggggtcttgcatctgtaagaatggaattgattttgcttttgcaagaatctcagcaggaaacatcagaaccactattttctagccctctgtcagagcaaacctcagtgcctctcctctttgcttgtacagccaatgccaaaacagtagttgccaatccattattgcaccttagtaatctgacacatgatattctccatgccataataaactttgattcaccaccccaccctgatatccaaagcaataaagtgtatgtaatgcatactttagcagcttcactttctgcttgtatttatcagtgcctttgtggtagtcataactacagttcatttcagacgaatcagtttactggaatggtatatcagacagtactgcttcctcatcgaccttctttgaaaacaggaagcttagatgaagcattaactcccaatacgtcaccagctcaatggccaggaataacttgtctaattcgacttttgaattcttctggcgaggaagcccagtcagggcttacagtcttgctctgtgagattctcacagcagtgtatcttagtctcttcatccatggcctggccacacattcaagtaatgagctatttcggattgtggcccatcctctaaatgagaaaatgtggtctgctgtgtttggtggaggtgcacatgttcctagcaaagaacagacacattcaaaaactttacctgtttcttcactagttgaagaaggagaaaaacagaacaaacgttttaggccgtcaaaaatgtcttgcagagaatctgccccactgaccccttcctcggcaccagtaagccaggagtcactggcggttaaagaaaagttcatcccacctgagctcagtatctgggactatttcatagctaagccttttctaccctcttctcaaagtagagccgaatatgattcagaggagagtctgggaagtgatgatgatgacaatgatgatgatgatgatgttttagcatcagatttccatctccaggaacattctaattcaaattcatatagttggtccttgatgcggttggcgatggtgcaattggtgctcaacaatttgaagactttttatcccttcgcaggtcatgatcttgcagagcttccagttagttcacctctttgtcatgcggttctaaaaactcttcaatgttgggaacaagttcttctccgacgacttgaaatccatggtgggccacctcaaaattatatcgcaagtcataccgccgaagagagtttgtctgcaggtcctgcaattcttcgccacaaagctttactggaacctacaaacactcctttcaaatccaaacaccatctggcactgtctgtgaagaggctttggcagtatttggtgaagcaggaagaaattcaggaaacctttatcaaaaatatattcacaaagaaacggtgtctaaatgagatagaagcagatttgggatatcctggaggtaaagcaagaattattcataaggaatctgatatcattactgcgtttgctgttaataaggcaaatagaaactgcatagcaatcgcttccagtcatgatgttcaagaactggatgtttctggaattctggccacacaggtctacacttgggtagatgatgatatagaagtggaaaccaaaggatcagaagatttcttggttatacatgctcgtgatgatttaacagctgttcaaggtacaactccatatacacatagcaatcctggcactccaatcaacatgccatggcttggtagtacacagactggcagaggagcatctgtgatgattaagaaagccattaataatgttagaagaatgacttctcatccaactcttccttactatctgacaggagctcaagatggaagtgtcagaatgtttgaatggggccattctcaacaaataacctgttttcgatctggtggcaattcaagagttacaagaatgagatttaactatcagggaaataagtttggaatagttgatgctgatggatatttaagtttgtatcaaacaaactggaaatgttgtccagttactggaagcatgcctaagccatacctgacttggcagtgtcataacaaaacagccaatgattttgtcttcgttagttcctcctctctgatagctacagctggtctttcaactgacaatagaaacgtatgtttgtgggatactcttgtagcacctgccaatagtttagtccatgcatttacctgccatgacagtggagccacagttttagcatatgctccaaaacatcagctactaatatcaggtggcagaaaaggttttacatatgtatttgacctttgtcaacgacaacagaggcagcttttccagagccatgattctcctgttaaagccgttgctgttgatccaactgaagagtactttgttacaggatctgccgaaggcaatataaagatttggagtctctctacctttggtcttctccatacttttgtcagtgaacatgctcggcagtccatttttagaaatattggaactggagtgatgcaaattgagacagggcctgcaaatcacattttctcctgtggagctgatggaacaatgaaaatgagaatactgccagatcagtttagccctttaaatgaagtgttgaaaaatgatgtgaaatttatgctataacatttttacaataagatgtacaatttattacctatatggaagtggccaacagatataatatacagtgatcattctctatgccacaaattagctaatgctttcttgtttttatatttattttatggagctttgcccttgatgcactgatgccttaaaaattaacaaggtcattcagaagtagattacattgcctaaagtagaatgtgtaagtaatgctgtaataatacatatcatagtatattataatcagtatgtcatagtgttaaaggtgttttgttttcttattgatacttttccacaggcatctctgcatgaatttcttccacagtaaaaatacgttttttgtaaaggcaattgtacataatactcatcacttaattcaccacactctcacttcctttattagccttatacatctcaaactcttctcttaattaatgataggtatttgagtaagaatgaaaaaaataatgaacatcttcattaaaattgtcattgagacgtcagtgataaatgagctagatggctcaatatgtaaggttttcagtagtttaccctccggaacccaagttgtatgtatgtatacgtgtgtgtgtgtgtgtgtgtgtgtatcttacacatcttatttgaacttagttgtatatattagcgaaaactggtttttcatgtgtttttgtgccataacaactattgccaccagaataactttttttttgcaactgtgcttttcatttttaaaaaatttttgaattcccatcctaattttcaaataagtttcaaggagactatcaggattattattttaaagattagatttagtcaaataagtcttagcaggcaataaagtttctgtggtggcatatatcatgtaagacacttaaagtaagtttgtgaatttgtcaactttcgagcatcaaacaaatattttacttaaattttattttatcttatttttaggtgcttttaatctcaaaattctgaaaagcgaatagcagtgttttcagaaacaaatgtgaaagcagtcaaattaagtagatactatttagaaatgtaaaatactctccagatctaccattaatagaaaataaactaaaccttatattttatttttgccaaaatattttattataaaatatgaccaaaatatttaaaatgcacaatgcttttaacttaaatgtgctaaccctgtttctgtctgttttgtgctgtaccttttctgattcagaattatagaaaacttgataaatacttgattttaaccaatgagactacaggcagatgggactaagtgtttatgggacaattatgtactatttaacttaaatatattttgtttaataggaaatatataataatagcattttatgtaataaaatatgggcaacgattatcttggaaattaaagagtcaaagcaaagaaatgaagggctggtaaaatgaattttgtaatatcctcaggatacttttatcttaaaagtatgttgttaaagattttgtaaattgtatttcaacaattttaaatgtgttgagcaagttgcagtgcaaacactgtcattatgtagagagtttatatgcacataataacctgtacctataaatcgtgcaataaccatatgcgactattttgccatggagaaatctgacagcattgcaaacaatagtattgtttgatgtagttaaccttaagttatttttcagtaatttcttcacaaatcaagattcaaacagctttaaacacttccaatgagataaaatatttactattatgcttattagaacaaaaggtgtttaaggatgaactaaatattttaattgagcatttatatggataatcatacattatgtaagcccatatgtatttacatccagagtcataatattttaaataaacaatcatgcagaaacttt

SEQ ID NO: 127483 - DNA, 1835 bp, Homo sapiens
  Payload ID: 4951
  Gene Symbol: DMXL1
  Gene Name: Dmx-like 1
  ENST ID: ENST00000503802
  CDS Start-End: 69-1835
gcggctgcccgaggtccagaggaagtgtgtggacagcgcggccttcctggccggactagggcgccgacatgaacctgcaccaggtgctgaccggggctgtgaaccctggcgaccactgcttctccgtgggcagcattggcgaccagcgcttcacggcttatgcatctggatgtgacattgtaatactgggaagcgattttgaaagattacagataatcccaggagctaaacatggaaatattcaagtgggatgtgtagactgttcaatgcaacaaggcaagattgcagcgtcttatggaaatgttatctccatttttgaaccagttaacctaccaaaacaaaagaaaaatttggaattatatagtcagtggcagaaaagtggccaattttttctggaatcaatagcacacaatataacctgggatcccacaggcagtcgtcttttaactggttccagctatttgcaactctggtccaatactaacttggagaagccaactgaagatgaaaatttaaataaaacagatcttaactttggagattggaaatgcatttggcattgcaaaactgcttcccaagttcatttaatgaaattttcaccagatggagaattttttgccactgctgggaaggatgactgtcttttgaaggtttggtataatgtagaaaactggcggacagctgttacttctccagatggaagttcagaaaaacaatcccaaggagaaattgacttttcttttgtgtatctggcccatcctcgagcagtaaatggattttcctggcgtaaaacaagcaaatatatgcctagggcttctgtatgtaatgtactgttgacttgctgcaaagataatgtgtgtcgtctttgggtagagacatttttaccaaatgattgtttgctatacggaggtgactgcagccattggactgaatcaattaatttaacaaataacttcaagagaaatgcttccagtaaagaacgagttcaaaatgctttagaagtaaatctgagacattttcgtagaggtcggaggagatcacttgctcttgtagcacatacgggatatctaccacatcagcaggatcctcatcatgttcacaggaacactccactgcatgccaatgcactttgccactttcatattgcagccagcatcaacccagccacagacattccacttcttccatctattacatctctgagtctaaatgaaaatgaagagaagaccggaccttttgttgtacactggctaaacaataaagaactgcattttactttgtccatggaagtttttttacagcaacttagaaaaagttttgaacaaccatcttctgaggccagtgtagaagattctaatcaggcagatgtaaaatctgatgaagaaactgatgatggtgttgatgatctgaaaataaatcccgaaaagaaggaattaggctgtgataaaatggtaccaaactcaagttttacatcattatcgtcagctgccattgatcatcagattgaagtacttctgtctgaatggagtaaaaatgcagatatgctatttagtattcatcccatggatggttctttgctagtttggcatgtggattggctggatgaataccagcctggtatgtttcgtcaagtacaggtgtcctttgtttccagaattccagtagctttccccacaggtgatgcaaactctctctgtaaaagcataatgatgtatgcctgtaccaagaatgttgacttggctattcagcaggggaaacaaaaaccttctggcctcacccgttccacatcaatgcttatttcttctggtcacaataaatcatctaatagtttaaaa

SEQ ID NO: 127484 - DNA, 11236 bp, Homo sapiens
  Payload ID: 4951
  Gene Symbol: DMXL1
  Gene Name: Dmx-like 1
  ENST ID: ENST00000539542
  CDS Start-End: 182-9328
tccggggctcgggatgagtcgcgggccccagctgagcggctccggctccaggcgcctgtcgctgcttctgccgtcgccaccgaagagcggccgccgcccctgagggaaggagggagggaagcagccgctgacccgtggcatgagctggatgcggtgtccgttgcaggactagggcgccgacatgaacctgcaccaggtgctgaccggggctgtgaaccctggcgaccactgcttctccgtgggcagcattggcgaccagcgcttcacggcttatgcatctggatgtgacattgtaatactgggaagcgattttgaaagattacagataatcccaggagctaaacatggaaatattcaagtgggatgtgtagactgttcaatgcaacaaggcaagattgcagcgtcttatggaaatgttatctccatttttgaaccagttaacctaccaaaacaaaagaaaaatttggaattatatagtcagtggcagaaaagtggccaattttttctggaatcaatagcacacaatataacctgggatcccacaggcagtcgtcttttaactggttccagctatttgcaactctggtccaatactaacttggagaagccaactgaagatgaaaatttaaataaaacagatcttaactttggagattggaaatgcatttggcattgcaaaactgcttcccaagttcatttaatgaaattttcaccagatggagaattttttgccactgctgggaaggatgactgtcttttgaaggtttggtataatgtagaaaactggcggacagctgttacttctccagatggaagttcagaaaaacaatcccaaggagaaattgacttttcttttgtgtatctggcccatcctcgagcagtaaatggattttcctggcgtaaaacaagcaaatatatgcctagggcttctgtatgtaatgtactgttgacttgctgcaaagataatgtgtgtcgtctttgggtagagacatttttaccaaatgattgtttgctatacggaggtgactgcagccattggactgaatcaattaatttaacaaataacttcaagagaaatgcttccagtaaagaacgagttcaaaatgctttagaagtaaatctgagacattttcgtagaggtcggaggagatcacttgctcttgtagcacatacgggatatctaccacatcagcaggatcctcatcatgttcacaggaacactccactgcatgccaatgcactttgccactttcatattgcagccagcatcaacccagccacagacattccacttcttccatctattacatctctgagtctaaatgaaaatgaagagaagaccggaccttttgttgtacactggctaaacaataaagaactgcattttactttgtccatggaagtttttttacagcaacttagaaaaagttttgaacaaccatcttctgaggccagtgtagaagattctaatcaggcagatgtaaaatctgatgaagaaactgatgatggtgttgatgatctgaaaataaatcccgaaaagaaggaattaggctgtgataaaatggtaccaaactcaagttttacatcattatcgtcagctgccattgatcatcagattgaagtacttctgtctgaatggagtaaaaatgcagatatgctatttagtattcatcccatggatggttctttgctagtttggcatgtggattggctggatgaataccagcctggtatgtttcgtcaagtacaggtgtcctttgtttccagaattccagtagctttccccacaggtgatgcaaactctctctgtaaaagcataatgatgtatgcctgtaccaagaatgttgacttggctattcagcaggggaaacaaaaaccttctggcctcacccgttccacatcaatgcttatttcttctggtcacaataaatcatctaatagtttaaaattaagtatttttacgcctaatgttatgatgatatcaaaacatgctgatggttctctgaatcagtggctggtcagttttgccgaggaatctgctttttctactgttctcagtatttcccacaaatccagatattgtggtcatcgttttcatcttaatgatttagcttgccactcagtattaccattattgctgacaacatcacaccataatgcattaaggacaccagatgttgataacccagagcaaccttttgatgctctaaatattgaagaatgctctttgacacaacaaaataaaagcactgttgacgtggcatttcaggatcccagtgcagtttacagtgagcttattctgtggagggttgacccagttgggccattgtctttttctggaggagtttctgagcttgcccggattaattctcttcatgtttctgccttttccaatgtggcatggctgcccactcttatacccagttattgtctgggtgcatactgcaactctcctagtgcatgctttgtagccagtgatggacaatatctgagattatatgaagcagttattgatgctaagaaacttttatctgagctttctaaccctgaaatttctaaatatgttggtgaagtctttaacatcgtcagtcaacaatcaacagccaggccaggatgcattattgcattagatcccattaccaaacttcatggcagaaaaacccaactgcttcatgtttttgaagaagacttcattttgaataaccttgagaagaaaagccttggcaaagacagcattttatctaatgcaggcagctcacctaatggattttctgagaagttctacctaattgtaatagaatgcactcaagacaaccgttcactgttacacatgtggaatttacatctaaagtcaattcctgtctcattagatgaaaaagtagatacaaaattatccgaagcggtttggcagccagaagaacattattcttcttctccagagaagatcctatctcctttttcacaaaagtatcaggcttgcagagcaaatctccagagtaccagcaggttgactctgttttcagaaatggtttatagccaagaattgcatttaccagaaggagttgagataataagtattaagccatcagcaggacatctgagttcatcttctatatatcctgcatgcagtgctccttatttattggcaacttcatgttcagatgagaaagtaagattctggagatgcagagtaacagatggagaatctgccacgtcaaagaatggaaaaattgatcttgcatacatttgggaagaatggccattacttattgaagatggacttcagagcaatagtagtataactgtacctggtaggcctgtagaagttagctgtgcacatacaaatcgtttagcagtagcttataagcagcctgcatctaatagtagatcttcccaggactttgtgatgcatgtaagtatttttgaatgtgagtcaacaggaggttcatgttgggtccttgagcagacaattcatttagatgagttaagcacagtattggattctggcattagtgttgatagcaatttagtggcctataataaacaagacatgtatttatctagtaaagagaatatcacatcaaacacaaagcatttagttcacttagattggatgtctagagaagacggttctcatatcctgactgtaggaattggatcaaaactttttatgtatggacccctggctggcaaggtacaagaccaaactggtaaggaaaccctggcatttcctctctgggagagtaccaaagttgtgcccctttctaaatttgtactattacgaagtgtggacctagtttcttctgtagatggctccccaccttttcctgtttctttatcgtgggtccgggatggcatccttgtggtaggaatggactgtgaaatgcatgtgtattgccaatggcaaccatcttctaaacaagaacctgttataacagattcgtacagtgggagcactccatctataacaagtttaataaaacagagtaactccagttctgggttacatcctccaaagaaaactctgactcgatccatgaccagtcttgcacagaaaatctgtggaaagaaaactgcattcgatccttcagtggatatggaagattcaggtctttttgaagcagctcatgtactttccccgactctacctcagtatcatcccttgcagcttttggaactcatggatcttggtaaagttcggagagccaaggccatcttgtcccatcttgttaagtgcattgctggggaagttgtggctctgaatgaagctgaatctaatcatgaacgccgccttaggtctctcacaatcagtgctagtggaagcactaccagagacccccaggcattcaacaaggctgaaaatacagattacacagaaatagattctgttcctccacttcctttatatgccttacttgcagcagatgatgatagctgttactcatctttggagaaatctagtaatgagagtacgttaagtaaatcaaaccaattatctaaagaaagttatgatgagctttttcagactcaacttctaatgactgatactcatatgttagagacagatgaagaaaatacaaagcctagagttattgacctttcacagtacagtccgacttactttggacctgagcatgctcaggttctttctggccacttacttcattctagtttaccaggactcagccggatggagcagatgtctttgatggccttagcagatacaattgcaactacaagcactgatattggagaaagccgagacagaagccaaggtggagaaactcttgatgaatgtgggttaaaatttcttttggctgttcgactccatacctttcttacaacttcccttccagcctatcgagctcaactccttcaccaaggcctgtctacaagtcattttgcttgggcatttcactcagtagcagaagaagaactgctgaacatgttgccagccatgcagaaagatgatcccacttggtctgaactaagagctatgggtgtggggtggtgggtccggaatacccgcatcttacgcaaatgcatagaaaaagtagctaaagcagccttttatagaaagaatgatcctttagatgctgccattttttaccttgcaatgaaaaagaaagctgtgatttggggattatatagagctgaaaaaaacaccaggatgacacagttttttggacacaattttgaggatgagaggtggcgtaaagcagctttaaagaatgctttttctttgctaggcaaacaaagatttgaacattctgcagcattttttcttttagctggttgcctcagagatgcaattgaggtatgtcttgagaaattgaatgacattcagttggctcttgtaatagcaagactctatgagtctgaatttgatacatctgcagcatataaatctattttacgtaaaaaagttttgggaatcgattctcctgtcagtgaactgtgttcattgaacataaatatgcatcatgatccttttcttcggagcatggcatattggattttggaagattatagtggtgctctggaaacattaataaagcaacctatcagagagaatgatgatcaagttttatcagccagtaatcctacagtttttaatttctacaattatctaagaacacatcctcttttgctgagacgtcattttggatcatctgatacattttccacacatatgagcctaacaggaaaaagtggactggcaggaacaattaatttaagtgaaagacgtttattttttaccactgccagtgctcatttaaaagctggctgcccaatgttggctttggaagtattatcaaagatgcctaaagtcatcaagaaaacaagacctttttatagggcttctagttttctggatactagtaaagactgttctccttcttctccattaaagttggatgcaagggaagataagtcttctgctgttgattggtcacagtcactgataaatggttttggatcttcttcagagggttcctcagagaagcaatcaaactccactctttcttttgactggagccaaccaagtgttgtgtttcaggatgactctttagagttaaaatgggacagtgataatgatgaagaaaatgaggatgtccctatttcaatgaaagaactaaaacctttacagagaaaaacagataaaaagttggatgacataagttctaactacacagaatctttcagcacactagatgaaaatgaccttttaaatccatcagaagatataattgcagttcagttaaaatttagagcatgtttaaagattctcacagtagaacttcgtactttatctactggctatgaaatagatggtggaaaattgcgttaccaactataccactggcttgaaaaagaggtgatagctcttcagaggacttgtgacttttgctcagatgctgaagaactacagtctgcatttggcagaaatgaagatgaatttggattaaatgaggatgctgaagatttgcctcaccaaacaaaagtgaaacaactgagagaaaattttcaggaaaaaagacagtggctcttgaagtatcagtcacttttgagaatgtttcttagttactgcatacttcatggatcccatggtgggggtcttgcatctgtaagaatggaattgattttgcttttgcaagaatctcagcaggaaacatcagaaccactattttctagccctctgtcagagcaaacctcagtgcctctcctctttgcttgtacagccaatgccaaaacagtagttgccaatccattattgcaccttagtaatctgacacatgatattctccatgccataataaactttgattcaccaccccaccctgatatccaaagcaataaagtgtatgtaatgcatactttagcagcttcactttctgcttgtatttatcagtgcctttgtggtagtcataactacagttcatttcagacgaatcagtttactggaatggtatatcagacagtactgcttcctcatcgaccttctttgaaaacaggaagcttagatgaagcattaactcccaatacgtcaccagctcaatggccaggaataacttgtctaattcgacttttgaattcttctggcgaggaagcccagtcagggcttacagtcttgctctgtgagattctcacagcagtgtatcttagtctcttcatccatggcctggccacacattcaagtaatgagctatttcggattgtggcccatcctctaaatgagaaaatgtggtctgctgtgtttggtggaggtgcacatgttcctagcaaagaacagacacattcaaaaactttacctgtttcttcactagttgaagaaggagaaaaacagaacaaacgttttaggccgtcaaaaatgtcttgcagagaatctgccccactgaccccttcctcggcaccagtaagccaggagtcactggcggttaaagaaaagttcatcccacctgagctcagtatctgggactatttcatagctaagccttttctaccctcttctcaaagtagagccgaatatgattcagaggagagtctgggaagtgatgatgatgacaatgatgatgatgatgatgttttagcatcagatttccatctccaggaacattctaattcaaattcatatagttggtccttgatgcggttggcgatggtgcaattggtgctcaacaatttgaagactttttatcccttcgcaggtcatgatcttgcagagcttccagttagttcacctctttgtcatgcggttctaaaaactcttcaatgttgggaacaagttcttctccgacgacttgaaatccatggtgggccacctcaaaattatatcgcaagtcataccgccgaagagagtttgtctgcaggtcctgcaattcttcgccacaaagctttactggaacctacaaacactcctttcaaatccaaacaccatctggcactgtctgtgaagaggctttggcagtatttggtgaagcaggaagaaattcaggaaacctttatcaaaaatatattcacaaagaaacggtgtctaaatgagtcattagaggacaacagtgaaaccatcaaaaattctatgatggaggagccaaacatcaataagatagaagcagatttgggatatcctggaggtaaagcaagaattattcataaggaatctgatatcattactgcgtttgctgttaataaggcaaatagaaactgcatagcaatcgcttccagtcatgatgttcaagaactggatgtttctggaattctggccacacaggtctacacttgggtagatgatgatatagaagtggaaaccaaaggatcagaagatttcttggttatacatgctcgtgatgatttaacagctgttcaaggtacaactccatatacacatagcaatcctggcactccaatcaacatgccatggcttggtagtacacagactggcagaggagcatctgtgatgattaagaaagccattaataatgttagaagaatgacttctcatccaactcttccttactatctgacaggagctcaagatggaagtgtcagaatgtttgaatggggccattctcaacaaataacctgttttcgatctggtggcaattcaagagttacaagaatgagatttaactatcagggaaataagtttggaatagttgatgctgatggatatttaagtttgtatcaaacaaactggaaatgttgtccagttactggaagcatgcctaagccatacctgacttggcagtgtcataacaaaacagccaatgattttgtcttcgttagttcctcctctctgatagctacagctggtctttcaactgacaatagaaacgtatgtttgtgggatactcttgtagcacctgccaatagtttagtccatgcatttacctgccatgacagtggagccacagttttagcatatgctccaaaacatcagctactaatatcaggtggcagaaaaggttttacatatgtatttgacctttgtcaacgacaacagaggcagcttttccagagccatgattctcctgttaaagccgttgctgttgatccaactgaagagtactttgttacaggatctgccgaaggcaatataaagatttggagtctctctacctttggtcttctccatacttttgtcagtgaacatgctcggcagtccatttttagaaatattggaactggagtgatgcaaattgagacagggcctgcaaatcacattttctcctgtggagctgatggaacaatgaaaatgagaatactgccagatcagtttagccctttaaatgaagtgttgaaaaatgatgtgaaatttatgctataacatttttacaataagatgtacaatttattacctatatggaagtggccaacagatataatatacagtgatcattctctatgccacaaattagctaatgctttcttgtttttatatttattttatggagctttgcccttgatgcactgatgccttaaaaattaacaaggtcattcagaagtagattacattgcctaaagtagaatgtgtaagtaatgctgtaataatacatatcatagtatattataatcagtatgtcatagtgttaaaggtgttttgttttcttattgatacttttccacaggcatctctgcatgaatttcttccacagtaaaaatacgttttttgtaaaggcaattgtacataatactcatcacttaattcaccacactctcacttcctttattagccttatacatctcaaactcttctcttaattaatgataggtatttgagtaagaatgaaaaaaataatgaacatcttcattaaaattgtcattgagacgtcagtgataaatgagctagatggctcaatatgtaaggttttcagtagtttaccctccggaacccaagttgtatgtatgtatacgtgtgtgtgtgtgtgtgtgtgtgtatcttacacatcttatttgaacttagttgtatatattagcgaaaactggtttttcatgtgtttttgtgccataacaactattgccaccagaataactttttttttgcaactgtgcttttcatttttaaaaaatttttgaattcccatcctaattttcaaataagtttcaaggagactatcaggattattattttaaagattagatttagtcaaataagtcttagcaggcaataaagtttctgtggtggcatatatcatgtaagacacttaaagtaagtttgtgaatttgtcaactttcgagcatcaaacaaatattttacttaaattttattttatcttatttttaggtgcttttaatctcaaaattctgaaaagcgaatagcagtgttttcagaaacaaatgtgaaagcagtcaaattaagtagatactatttagaaatgtaaaatactctccagatctaccattaatagaaaataaactaaaccttatattttatttttgccaaaatattttattataaaatatgaccaaaatatttaaaatgcacaatgcttttaacttaaatgtgctaaccctgtttctgtctgttttgtgctgtaccttttctgattcagaattatagaaaacttgataaatacttgattttaaccaatgagactacaggcagatgggactaagtgtttatgggacaattatgtactatttaacttaaatatattttgtttaataggaaatatataataatagcattttatgtaataaaatatgggcaacgattatcttggaaattaaagagtcaaagcaaagaaatgaagggctggtaaaatgaattttgtaatatcctcaggatacttttatcttaaaagtatgttgttaaagattttgtaaattgtatttcaacaattttaaatgtgttgagcaagttgcagtgcaaacactgtcattatgtagagagtttatatgcacataataacctgtacctataaatcgtgcaataaccatatgcgactattttgccatggagaaatctgacagcattgcaaacaatagtattgtttgatgtagttaaccttaagttatttttcagtaatttcttcacaaatcaagattcaaacagctttaaacacttccaatgagataaaatatttactattatgcttattagaacaaaaggtgtttaaggatgaactaaatattttaattgagcatttatatggataatcatacattatgtaagcccatatgtatttacatccagagtcataatattttaaataaacaatcatgcagaaacttt

SEQ ID NO: 127485 - DNA, 10672 bp, Homo sapiens
  Payload ID: 4952
  Gene Symbol: DMXL2
  Gene Name: Dmx-like 2
  Uniprot ID: Q8TDJ6
  ENST ID: ENST00000251076
  CDS Start-End: 289-9399
acaagcacccttgccctcccgcatttgtgcgccggtgcagcaggcagtgggaacatccgggcatttccgcagctgagcggcgacccgggcggcggcggcggtcgaggagctcccatggcagggacgaggcggagggaaggcgaaaggggggcgaggagttaagccagagcctccgcggggcgggtttccgagggaggcacagagggaaacggctctcgcagcccgaggagggtcaggcgcggagcttgtcgcacctcccgcgcattctgtccagcccgggctccggagatgcatctgcatcaggtcctcaccggagctgtcaaccctggagacaactgctactccgtgggcagcgtcggggatgtccccttcacggcatatggatcaggctgtgatattgttattttggcaaatgactttgaatgtgtacagatcattcctggtgctaagcatggaaacatccaagtcagctgtgtggagtgttctaaccaacaaggaagaattgcagcttcatatggtaatgctgtttgtatatttgagcccttgggcataaattctcataaaagaaattgtcaactcaagtgccagtggcttaaaactgggcagttttttttgagttctgtgacatacaacttagcatgggatcctcaagataatagattgttgacagcaactgattctattcagttgtgggctcctccaggagatgatattctggaagaggaggaagaaattgataatacagttcctcctgttttaaatgattggaagtgtgtctggcagtgcaaaacctcagtatctgtacatttgatggaatggtctcctgatggtgaatattttgctactgctggaaaggatgattgtcttttgaaagtgtggtatcctatgactggttggaagtcttcaattatacctcaggatcatcatgaagtaaaaaggagacagtcctctactcaattttcttttgtttacttggcacatccccgagctgtgacaggtttttcgtggcgcaaaactagcaagtatatgcccaggggttctgtctgtaatgtgttgttaacttcatgtcatgatggtgtgtgccggctctgggcagaaactttattaccagaagactgtcttttgggtgagcagatttgtgagactaccacttccagcattgccagcagcctttctcatgctggaagacacaaagacagaatacagcatgctcttgagacaatacaccatttgaaaaatttaaggaaaggacagaggaggtcatctgttcttgtaactcatgctgaattaatgcccgaccagacagcaatgcatgaagttcaaagacacatttcccaccatgcaaatgcactctgtcattttcatattgcagcaagcatcaaccctgccacagatattccaaatgtcttggttggcactgcatttaatgttgatgatggaaatgggggctttgtagttcattggttaaacaacaaggaatttcattttacatcatctacagaagtatttatgcatcaattacgaaaactttctgataagcaggtagatcatgaaaatgatgatgcagatagagaagatgaggaacattcacaggaggatagagaacggggtttacatatgaaattagaccatgatttatccctggatagagaatctgaggcaggtacaggatcatcagaacatgaagatggagaaagagaaggaagtcctagaacttactcacgacttagtgtaccaatgccactgcctacggttctgcttgatcggaagattgaaacgctgctaactgaatggaataagaatcctgatatgctttttacaatacaccctgtagatggtacctttctagtgtggcatgtgaagtatttggatgaatataatcctggaatatttagacaagttcaggtttctttttcttctcggattcctgttgcatttccctctggtgatgcaagctctcttagtaaaaatatcatgatgtatgcctgtataaatgcgacaaaagattctcaccacacgctgttacaccaggaggggatgtctgtaggcagtcctcacggatcacagccacactctagatcccacagtacacatatgaacatcttagctcccacagtaatgatgatctctaaacacatagatggttctttaaatcagtgggcagtcacttttgctgataagtctgcctttaccactgttctaactgtatctcacaaatttagatattgcggtcatcgatttcacctcaatgacctggcatgtcattcagttttaccactgttattgacatcctctcatcataatgctctattgactcctgaattagattgtcagtgggactcagacaataaattaagtagattaatggaccctgtaaaacatataaaaggttcctcgaaacaacctcttagaaatgcagcaactcgtacatttcatgacccaaatgcaatctacagtgaacttattctgtggcgtgtagacccaataggacctttgtcatacactggaggagtatcagaattggctcgaattaactctttacatacctcagcgttctctaatgtggcttggcttccaactctcattcccagttactgtctaggcacatactgcaattctgcaagtgcttgctttgttgcttctgatggcaaaaatctgagactctatcaagctgtagtggatgcaaggaaattattagatgaattgtcagacccagaatcttcaaaacttattggagaagtgtttaatattgtgagccaacagtctactgctcgacctggctgcattattgaactcgacgcaataaccaaccaatgtggctcaaatacacagttgcttcatgtgtttcaagaagacttcattataggatataaaccacataaggaagatatggagaaaaaggaaacagaaatattttttcagccatcacaaggataccgcccaccaccattttcagaaaagttctttctagtagtaattgagaaggacagcaataataactctattctgcatatgtggcaccttcatcttaaatctgtacaagcatgtttagctaaagcttcagaaggggcttcctctgagagtctactttcagtccctggacagaagaacgtagattcttctccagaaacctctcctagtgtgagccccatgccacattcttcatcaattgccaatcttcaaactgccagtaaacttattctgagttctagactggtgtatagccaaccccttgatctcccagaatcagttgaagtaataagagcaacgccttcagcaggccatctgagttcttcttcaatttatccagtgtgccttgcaccttatttagtggttacaacttgttctgacaataaagtacgcttctggaaatgttgtatggaagccaacccagagtgtaataaaagtgatgagaaagaaatttatcattggaagagatggcctttgatgaatgatgaaggagaagataatagcagtacagtgagcattgtgggaagaccagttgctgttagctgttcatacacaggtcgccttgcagtggcttataagcagcctatccaccataatggttttgtttctaaagaattttccatgcatgtttgtatatttgaatgtgaatctacaggaggatcagagtgggttttagaacaaacaattcatcttgatgatttggttaaggttgggagtgtacttgattcaagggtcagcgtcgacagtaatctgtttgtgtatagcaagtcagatgcactcttgagcaaggatagatatcttattccgaatatcaaacatttagtacatttggactgggtatcaaaagaagatggctcccacattcttacagtgggagtcggtgcgaatatcttcatgtatggaaggctttcaggaattgtgactgagcaaaccaacagtaaggatggagtagctgtcatcactttaccactaggtggtagtatcaagcaaggagttaagtcaagatgggttcttcttagatctatagacttggtatcttctgttgatggtactccttcactgcctgtttctctctcttgggtaagagatgggatattggtggtaggaatggattgtgaaatgcatgtatatgcacagtggaagcatgctgtcaaatttggagacactgaagctgatagttctaatgcagaagaggcagcaatgcaagatcattcgacctttaaatctaatatgctggcaagaaaaagtgttgttgaaggaacagctatttctgatgatgttttttgttcaccaactgtaattcaagatggtggcttatttgaggctgcacatgtactttcccctactcttccacaatatcatccaactcagctgttagaattgatggatttagggaaagtgcgaagggctaaagccattctctctcatttagtaaaatgtattgcaggtgaagtagcaatagttagagatcctgatgctggagaaggaactaagcgacatctctctcgaactattagtgtaagtggcagtacagcaaaggaaacagtcaccgtaggaaaagatggtactcgagattatactgagatagattctatccctccactaccactatatgcattacttgctgcagatcaagatacatcctacagaatttcagaagaaagtacaaagataccacagagctatgaagatcagacagtaagtcaaccagaggatcagtattcagagctgtttcaaatccaggatataccaacggatgatattgatttagagcctgaaaagagagaaaacaaatcaaaagtaataaatctttctcaatatggaccagcttactttggccaagaacatgcaagggtactttcaagtcatcttatgcactcaagtctaccaggccttacccgtttggagcagatgttccttgtagctttggctgatacagtggctactactagtactgagcttgatgaaagcagagataagagttgctcaggaagagatacattagatgagtgtggtttgagatacttgttagctatgcgcctacacacatgccttttgacatcgctgcctcctttataccgagtgcagctacttcatcaaggtgtctctacatgccattttgcctgggcttttcattctgaggctgaagaagaactgattaatatgattccagcaattcagagaggggacccccagtggtctgaattaagagctatgggcataggatggtgggtgaggaacattaacacgcttcgaagatgcattgaaaaggttgccaaagcttcttttcaaaggaacaatgatgccttagatgctgcactattctacctttcaatgaagaagaaagcagtagtgtggggtctgtttaggtcacagcatgatgaaaaaatgacaacatttttcagccacaactttaatgaagatagatggcgaaaagctgctttgaaaaatgctttttccttacttggaaaacaacgctttgaacaatcggctgcttttttcttgctagctggttcattgaaagatgccatagaggtatgtcttgaaaaaatggaagatattcagctagccatggttattgcccgtttatatgaatctgaatttgagacttcatccacttatatatccatcctaaatcagaagattttgggttgccaaaaggatggctcaggattcagttgcaaaagattacatcctgatcctttcctgcgtagtcttgcctattgggtaatgaaagattacacccgagccttggacacattactggaacaaacaccaaaggaggatgatgaacatcaagttatcatcaagtcttgtaacccggtggcatttagtttttataactaccttcgaactcatcctttgctcattcgaagaaatcttgcctcccctgaaggaactttggcaaccttaggtctcaaaactgagaagaactttgttgataaaattaacctcatagaaagaaaattattctttaccactgcaaatgctcattttaaagttggatgccctgttttagccttggaggtactctccaaaattccaaaagtaaccaaaacatctgccttatctgcaaaaaaagatcagcctgacttcatttctcacaggatggatgatgtaccttcacattcaaaagctctgagtgatggcaatggaagttctggcattgaatggtcaaatgtaacttcatcacagtatgactggagtcagccaatagtaaaagttgatgaggaacctcttaatcttgattggggtgaagatcacgacagtgccttagatgaagaggaagacgatgctgttggtttagtgatgaaaagtacagatgccagggaaaaagataaacaatcagatcagaaggcctcagaccctaacatgttattaacacctcaggaagaggatgatcctgaaggtgatactgaagttgatgtgattgctgaacaactaaaattcagagcttgtttaaagatccttatgactgaattaagaacattggctacaggttatgaagtagatggaggaaaactcagatttcaactctataactggcttgaaaaggaaattgctgccttgcatgagatatgtaatcatgaatcagttattaaagagtattccagtaagacatattccaaagtagagagtgatctgctggatcaggaagaaatggtagacaaaccagatattggttcctatgagcgccatcaaatagaaagaagaagattgcaggccaaacgagagcatgcagaaagacgaaagtcgtggttgcagaaaaaccaagatctcctgagagtatttctcagctactgtagccttcatggggcccaaggtggtggtttggcttcagtaaggatggaactcaaatttttgctacaagaatcacaacaggaaactacagtaaagcagctccagtctccactaccactgcctaccaccctacctctgctttcagcaagtattgcgtcaacaaaaacagtcatagctaatcctgtattgtacttaaataatcacatccatgatatactttatactattgttcagatgaaaacaccacctcatcccagtattgaagatgtgaaggtgcacacacttcattcactagcagcatcactttctgcatcaatttaccaagcattatgtgacagtcatagctacagtcaaacagaaggaaatcagtttacaggaatggcttatcaaggacttcttttaagtgatcgtagaagactaaggacagaaagcattgaagaacacgcaacaccaaattcatctcctgctcaatggcctggtgtgagctcacttattaatcttttgagttcagcccaagatgaagaccagccaaaactgaacattttgctatgtgaagctgttgttgctgtttacttaagtttattgatacatgctcttgccacaaattcctccagtgaattatttcggcttgcagcccacccattaaataatcgaatgtgggctgctgtttttggaggcggtgtaaaacttgttgtgaaacctcgaagacaatcagaaaatatttcagcacctcctgtcctttctgaagacatagataaacaccgtaggagatttaacatgagaatgctcgtccctggaaggcctgtaaaagatgctaccccaccaccggtgcctgcagaaagaccatcttacaaagaaaaatttattcctcccgaacttagtatgtgggattattttgttgcaaagccatttcttcctttgtctgatagtggtgttatatatgattctgatgaaagcattcatagtgatgaagaagatgatgcctttttttcagatacacaaatacaggagcaccaagatccaaattcctatagctgggctcttctacatttgacaatggttaaactagcacttcacaatgtcaagaatttctttcctattgctggactggaattctctgagctgcctgtaacatcaccattaggtattgctgtgattaaaaacttggagaactgggaacagatcttgcaagagaaaatggatcagtttgaaggtccaccccctaactatatcaacacatatccaactgacctttcagtgggagctggaccagctattcttcgaaataaagcaatgctagaacctgaaaataccccattcaagtcccgggattcttctgcatttccagtcaaacgactttggcatttccttgttaaacaagaggtccttcaagagacatttattagatatattttcactaagaaaagaaagcagagtgaggttgaagctgatctgggctatccaggtggaaaggcgaaagtcatccataaggaatctgatatgatcatggcattttctgttaataaggcaaattgtaatgaaattgttttggcttcaacacatgatgttcaagaacttgatgttacttctctactggcctgtcagtcatacatatggatcggagaagaatatgacagagaatccaaaagttcagatgatgttgattatcgtggttccactacaactctttatcaacccagtgcaacatcctattcagcaagtcaggtgcatccaccttcatctctgccatggctgggcactggacagactagcactggagctagtgtgcttatgaaaaggaatctacataatgttaagagaatgacttcacacccagtccatcaatactatcttacaggtgctcaggacggcagtgtacgaatgtttgaatggacgcggcctcagcaacttgtctgctttcgtcaagctggcaatgcaagagttactagattatattttaattcacaaggcaacaagtgtggtgttgcggatggagagggttttctgagtatctggcaagttaaccaaactgcatcaaatcctaaaccttatatgagttggcagtgccacagtaaagccacaagtgactttgcatttattacctcttcaagtctagttgccacatctggacactccaatgacaatagaaatgtttgcctctgggacacattaatatcacccggaaacagcctcattcatggtttcacgtgccacgatcatggtgccacggtactgcagtatgcacccaaacagcaactcctaatctcggggggtaggaaaggacacgtctgcatttttgacatcaggcaaaggcagctcattcacacgttccaggcccatgactcagctattaaggctctggccttggatccctatgaggaatattttaccacaggttcagcagaaggtaacataaaggtttggagattgacaggccatggcctaattcattcatttaaaagtgaacatgctaagcagtccatatttcgaaacattggggctggagtcatgcagattgacatcatccagggcaatcggctcttctcctgtggtgcagatggcacgctgaaaaccagggttttgcccaatgcttttaacatccctaacagaattcttgacattctataaagattggggttttatttttatatacatttcagttaaaaggcacactacagtcatcactaggcaattctgctttctaagcagttgtattgaaaacagagaatctctgtgtagaatttgaatatgacccaagctgagtattatctaaacaggttggtggaatgaatgcgcatgtaccttattatgctgacatactaaaaaaaataaaacctagtattgtatgaaggatagctattctttacagcatttagcaaacctgattcagaaaacatttgagattagcaaattagtaacttgaaataatgaaaaggacgtttataccaaattaaggaagaaaatgttgctgatttgggtttttcttcctgttcttaccactgactgaagcatgcctgcagtctcctcctctgttgaatgaaggataatcataaggtgtttgttaggagcgctagaccacctggaaaactttcttagctgtggagcagtgcgcagtgaccagttctctgctgtgagaggccgtttccattctttcctgctgaatatttttcctgttagtgtttatactgagctagtactgtaacttgcaaatgagtgcaaatttaaatgcaatgttttactcacaatttgcacattcacattttttggactgctagtttttctatttaaatatttgccttcatgttaggaatgtactatgtgaacatgacatatttgtagttaaccaaacacaccttcttagtccagtttagtactttttcttttcgtgtattcaaggttaaacacccaaacatttaaggatatgttgaaactacaccaatagagcatttcatatcataattaaaatgaatgttaggcttcttgtggccagttaatagttgatgagattggtgacattatttattgccacagcctattgtataaactatgcagagttaaatatttgcttgtaaaatattagccaatgttgtcattattttgatgtatttccttggttatgaccaaaaatatgttgagatactgaaactaatgtctgtgtgtttaaatgtttaccagcaaattgtcttatcatgttaatgagaatgttcaatgcctgtgtggtaaatagtaaatacaatggcataaaagtaactttctctgaagatgtgatgttcaggctgtgaaatatatatgtaaaagaaaaataaatgttatttgttagagtttttagtttgatactgtttttgaccattgagatttttaatttgataaaatgtttaactgttagagaatttgcaagcta

SEQ ID NO: 127486 - DNA, 7465 bp, Homo sapiens
  Payload ID: 4952
  Gene Symbol: DMXL2
  Gene Name: Dmx-like 2
  Uniprot ID: Q8TDJ6
  ENST ID: ENST00000449909
  CDS Start-End: 91-7293
acagagggaaacggctctcgcagcccgaggagggtcaggcgcggagcttgtcgcacctcccgcgcattctgtccagcccgggctccggagatgcatctgcatcaggtcctcaccggagctgtcaaccctggagacaactgctactccgtgggcagcgtcggggatgtccccttcacggcatatggatcaggctgtgatattgttattttggcaaatgactttgaatgtgtacagatcattcctggtgctaagcatggaaacatccaagtcagctgtgtggagtgttctaaccaacaaggaagaattgcagcttcatatggtaatgctgtttgtatatttgagcccttgggcataaattctcataaaagaaattgtcaactcaagtgccagtggcttaaaactgggcagttttttttgagttctgtgacatacaacttagcatgggatcctcaagataatagattgttgacagcaactgattctattcagttgtgggctcctccaggagatgatattctggaagaggaggaagaaattgataatacagttcctcctgttttaaatgattggaagtgtgtctggcagtgcaaaacctcagtatctgtacatttgatggaatggtctcctgatggtgaatattttgctactgctggaaaggatgattgtcttttgaaagtgtggtatcctatgactggttggaagtcttcaattatacctcaggatcatcatgaagtaaaaaggagacagtcctctactcaattttcttttgtttacttggcacatccccgagctgtgacaggtttttcgtggcgcaaaactagcaagtatatgcccaggggttctgtctgtaatgtgttgttaacttcatgtcatgatggtgtgtgccggctctgggcagaaactttattaccagaagactgtcttttgggtgagcagatttgtgagactaccacttccagcattgccagcagcctttctcatgctggaagacacaaagacagaatacagcatgctcttgagacaatacaccatttgaaaaatttaaggaaaggacagaggaggtcatctgttcttgtaactcatgctgaattaatgcccgaccagacagcaatgcatgaagttcaaagacacatttcccaccatgcaaatgcactctgtcattttcatattgcagcaagcatcaaccctgccacagatattccaaatgtcttggttggcactgcatttaatgttgatgatggaaatgggggctttgtagttcattggttaaacaacaaggaatttcattttacatcatctacagaagtatttatgcatcaattacgaaaactttctgataagcaggtagatcatgaaaatgatgatgcagatagagaagatgaggaacattcacaggaggatagagaacggggtttacatatgaaattagaccatgatttatccctggatagagaatctgaggcaggtacaggatcatcagaacatgaagatggagaaagagaaggaagtcctagaacttactcacgacttagtgtaccaatgccactgcctacggttctgcttgatcggaagattgaaacgctgctaactgaatggaataagaatcctgatatgctttttacaatacaccctgtagatggtacctttctagtgtggcatgtgaagtatttggatgaatataatcctggaatatttagacaagttcaggtttctttttcttctcggattcctgttgcatttccctctggtgatgcaagctctcttagtaaaaatatcatgatgtatgcctgtataaatgcgacaaaagattctcaccacacgctgttacaccaggaggggatgtctgtaggcagtcctcacggatcacagccacactctagatcccacagtacacatatgaacatcttagctcccacagtaatgatgatctctaaacacatagatggttctttaaatcagtgggcagtcacttttgctgataagtctgcctttaccactgttctaactgtatctcacaaatttagatattgcggtcatcgatttcacctcaatgacctggcatgtcattcagttttaccactgttattgacatcctctcatcataatgctctattgactcctgaattagattgtcagtgggactcagacaataaattaagtagattaatggaccctgtaaaacatataaaaggttcctcgaaacaacctcttagaaatgcagcaactcgtacatttcatgacccaaatgcaatctacagtgaacttattctgtggcgtgtagacccaataggacctttgtcatacactggaggagtatcagaattggctcgaattaactctttacatacctcagcgttctctaatgtggcttggcttccaactctcattcccagttactgtctaggcacatactgcaattctgcaagtgcttgctttgttgcttctgatggcaaaaatctgagactctatcaagctgtagtggatgcaaggaaattattagatgaattgtcagacccagaatcttcaaaacttattggagaagtgtttaatattgtgagccaacagtctactgctcgacctggctgcattattgaactcgacgcaataaccaaccaatgtggctcaaatacacagttgcttcatgtgtttcaagaagacttcattataggatataaaccacataaggaagatatggagaaaaaggaaacagaaatattttttcagccatcacaaggataccgcccaccaccattttcagaaaagttctttctagtagtaattgagaaggacagcaataataactctattctgcatatgtggcaccttcatcttaaatctgtacaagcatgtttaggaagagatacattagatgagtgtggtttgagatacttgttagctatgcgcctacacacatgccttttgacatcgctgcctcctttataccgagtgcagctacttcatcaaggtgtctctacatgccattttgcctgggcttttcattctgaggctgaagaagaactgattaatatgattccagcaattcagagaggggacccccagtggtctgaattaagagctatgggcataggatggtgggtgaggaacattaacacgcttcgaagatgcattgaaaaggttgccaaagcttcttttcaaaggaacaatgatgccttagatgctgcactattctacctttcaatgaagaagaaagcagtagtgtggggtctgtttaggtcacagcatgatgaaaaaatgacaacatttttcagccacaactttaatgaagatagatggcgaaaagctgctttgaaaaatgctttttccttacttggaaaacaacgctttgaacaatcggctgcttttttcttgctagctggttcattgaaagatgccatagaggtatgtcttgaaaaaatggaagatattcagctagccatggttattgcccgtttatatgaatctgaatttgagacttcatccacttatatatccatcctaaatcagaagattttgggttgccaaaaggatggctcaggattcagttgcaaaagattacatcctgatcctttcctgcgtagtcttgcctattgggtaatgaaagattacacccgagccttggacacattactggaacaaacaccaaaggaggatgatgaacatcaagttatcatcaagtcttgtaacccggtggcatttagtttttataactaccttcgaactcatcctttgctcattcgaagaaatcttgcctcccctgaaggaactttggcaaccttaggtctcaaaactgagaagaactttgttgataaaattaacctcatagaaagaaaattattctttaccactgcaaatgctcattttaaagttggatgccctgttttagccttggaggtactctccaaaattccaaaagtaaccaaaacatctgccttatctgcaaaaaaagatcagcctgacttcatttctcacaggatggatgatgtaccttcacattcaaaagctctgagtgatggcaatggaagttctggcattgaatggtcaaatgtaacttcatcacagtatgactggagtcagccaatagtaaaagttgatgaggaacctcttaatcttgattggggtgaagatcacgacagtgccttagatgaagaggaagacgatgctgttggtttagtgatgaaaagtacagatgccagggaaaaagataaacaatcagatcagaaggcctcagaccctaacatgttattaacacctcaggaagaggatgatcctgaaggtgatactgaagttgatgtgattgctgaacaactaaaattcagagcttgtttaaagatccttatgactgaattaagaacattggctacaggttatgaagtagatggaggaaaactcagatttcaactctataactggcttgaaaaggaaattgctgccttgcatgagatatgtaatcatgaatcagttattaaagagtattccagtaagacatattccaaagtagagagtgatctgctggatcaggaagaaatggtagacaaaccagatattggttcctatgagcgccatcaaatagaaagaagaagattgcaggccaaacgagagcatgcagaaagacgaaagtcgtggttgcagaaaaaccaagatctcctgagagtatttctcagctactgtagccttcatggggcccaaggtggtggtttggcttcagtaaggatggaactcaaatttttgctacaagaatcacaacaggaaactacagtaaagcagctccagtctccactaccactgcctaccaccctacctctgctttcagcaagtattgcgtcaacaaaaacagtcatagctaatcctgtattgtacttaaataatcacatccatgatatactttatactattgttcagatgaaaacaccacctcatcccagtattgaagatgtgaaggtgcacacacttcattcactagcagcatcactttctgcatcaatttaccaagcattatgtgacagtcatagctacagtcaaacagaaggaaatcagtttacaggaatggcttatcaaggacttcttttaagtgatcgtagaagactaaggacagaaagcattgaagaacacgcaacaccaaattcatctcctgctcaatggcctggtgtgagctcacttattaatcttttgagttcagcccaagatgaagaccagccaaaactgaacattttgctatgtgaagctgttgttgctgtttacttaagtttattgatacatgctcttgccacaaattcctccagtgaattatttcggcttgcagcccacccattaaataatcgaatgtgggctgctgtttttggaggcggtgtaaaacttgttgtgaaacctcgaagacaatcagaaaatatttcagcacctcctgtcctttctgaagacatagataaacaccgtaggagatttaacatgagaatgctcgtccctggaaggcctgtaaaagatgctaccccaccaccggtgcctgcagaaagaccatcttacaaagaaaaatttattcctcccgaacttagtatgtgggattattttgttgcaaagccatttcttcctttgtctgatagtggtgttatatatgattctgatgaaagcattcatagtgatgaagaagatgatgcctttttttcagatacacaaatacaggagcaccaagatccaaattcctatagctgggctcttctacatttgacaatggttaaactagcacttcacaatgtcaagaatttctttcctattgctggactggaattctctgagctgcctgtaacatcaccattaggtattgctgtgattaaaaacttggagaactgggaacagatcttgcaagagaaaatggatcagtttgaaggtccaccccctaactatatcaacacatatccaactgacctttcagtgggagctggaccagctattcttcgaaataaagcaatgctagaacctgaaaataccccattcaagtcccgggattcttctgcatttccagtcaaacgactttggcatttccttgttaaacaagaggtccttcaagagacatttattagatatattttcactaagaaaagaaagcagagtgaggttgaagctgatctgggctatccaggtggaaaggcgaaagtcatccataaggaatctgatatgatcatggcattttctgttaataaggcaaattgtaatgaaattgttttggcttcaacacatgatgttcaagaacttgatgttacttctctactggcctgtcagtcatacatatggatcggagaagaatatgacagagaatccaaaagttcagatgatgttgattatcgtggttccactacaactctttatcaacccagtgcaacatcctattcagcaagtcaggtgcatccaccttcatctctgccatggctgggcactggacagactagcactggagctagtgtgcttatgaaaaggaatctacataatgttaagagaatgacttcacacccagtccatcaatactatcttacaggtgctcaggacggcagtgtacgaatgtttgaatggacgcggcctcagcaacttgtctgctttcgtcaagctggcaatgcaagagttactagattatattttaattcacaaggcaacaagtgtggtgttgcggatggagagggttttctgagtatctggcaagttaaccaaactgcatcaaatcctaaaccttatatgagttggcagtgccacagtaaagccacaagtgactttgcatttattacctcttcaagtctagttgccacatctggacactccaatgacaatagaaatgtttgcctctgggacacattaatatcacccggaaacagcctcattcatggtttcacgtgccacgatcatggtgccacggtactgcagtatgcacccaaacagcaactcctaatctcggggggtaggaaaggacacgtctgcatttttgacatcaggcaaaggcagctcattcacacgttccaggcccatgactcagctattaaggctctggccttggatccctatgaggaatattttaccacaggttcagcagaaggtaacataaaggtttggagattgacaggccatggcctaattcattcatttaaaagtgaacatgctaagcagtccatatttcgaaacattggggctggagtcatgcagattgacatcatccagggcaatcggctcttctcctgtggtgcagatggcacgctgaaaaccagggttttgcccaatgcttttaacatccctaacagaattcttgacattctataaagattggggttttatttttatatacatttcagttaaaaggcacactacagtcatcactaggcaattctgctttctaagcagttgtattgaaaacagagaatctctgtgtagaatttgaatatgacccaagctgagtattatctaaacaggttggtggaatgaatgcgcatgt

SEQ ID NO: 127487 - DNA, 10400 bp, Homo sapiens
  Payload ID: 4952
  Gene Symbol: DMXL2
  Gene Name: Dmx-like 2
  Uniprot ID: Q8TDJ6
  ENST ID: ENST00000543779
  CDS Start-End: 91-9204
acagagggaaacggctctcgcagcccgaggagggtcaggcgcggagcttgtcgcacctcccgcgcattctgtccagcccgggctccggagatgcatctgcatcaggtcctcaccggagctgtcaaccctggagacaactgctactccgtgggcagcgtcggggatgtccccttcacggcatatggatcaggctgtgatattgttattttggcaaatgactttgaatgtgtacagatcattcctggtgctaagcatggaaacatccaagtcagctgtgtggagtgttctaaccaacaaggaagaattgcagcttcatatggtaatgctgtttgtatatttgagcccttgggcataaattctcataaaagaaattgtcaactcaagtgccagtggcttaaaactgggcagttttttttgagttctgtgacatacaacttagcatgggatcctcaagataatagattgttgacagcaactgattctattcagttgtgggctcctccaggagatgatattctggaagaggaggaagaaattgataatacagttcctcctgttttaaatgattggaagtgtgtctggcagtgcaaaacctcagtatctgtacatttgatggaatggtctcctgatggtgaatattttgctactgctggaaaggatgattgtcttttgaaagtgtggtatcctatgactggttggaagtcttcaattatacctcaggatcatcatgaagtaaaaaggagacagtcctctactcaattttcttttgtttacttggcacatccccgagctgtgacaggtttttcgtggcgcaaaactagcaagtatatgcccaggggttctgtctgtaatgtgttgttaacttcatgtcatgatggtgtgtgccggctctgggcagaaactttattaccagaagactgtcttttgggtgagcagatttgtgagactaccacttccagcattgccagcagcctttctcatgctggaagacacaaagacagaatacagcatgctcttgagacaatacaccatttgaaaaatttaaggaaaggacagaggaggtcatctgttcttgtaactcatgctgaattaatgcccgaccagacagcaatgcatgaagttcaaagacacatttcccaccatgcaaatgcactctgtcattttcatattgcagcaagcatcaaccctgccacagatattccaaatgtcttggttggcactgcatttaatgttgatgatggaaatgggggctttgtagttcattggttaaacaacaaggaatttcattttacatcatctacagaagtatttatgcatcaattacgaaaactttctgataagcaggtagatcatgaaaatgatgatgcagatagagaagatgaggaacattcacaggaggatagagaacggggtttacatatgaaattagaccatgatttatccctggatagagaatctgaggcaggtacaggatcatcagaacatgaagatggagaaagagaaggaagtcctagaacttactcacgacttagtgtaccaatgccactgcctacggttctgcttgatcggaagattgaaacgctgctaactgaatggaataagaatcctgatatgctttttacaatacaccctgtagatggtacctttctagtgtggcatgtgaagtatttggatgaatataatcctggaatatttagacaagttcaggtttctttttcttctcggattcctgttgcatttccctctggtgatgcaagctctcttagtaaaaatatcatgatgtatgcctgtataaatgcgacaaaagattctcaccacacgctgttacaccaggaggggatgtctgtaggcagtcctcacggatcacagccacactctagatcccacagtacacatatgaacatcttagctcccacagtaatgatgatctctaaacacatagatggttctttaaatcagtgggcagtcacttttgctgataagtctgcctttaccactgttctaactgtatctcacaaatttagatattgcggtcatcgatttcacctcaatgacctggcatgtcattcagttttaccactgttattgacatcctctcatcataatgctctattgactcctgaattagattgtcagtgggactcagacaataaattaagtagattaatggaccctgtaaaacatataaaaggttcctcgaaacaacctcttagaaatgcagcaactcgtacatttcatgacccaaatgcaatctacagtgaacttattctgtggcgtgtagacccaataggacctttgtcatacactggaggagtatcagaattggctcgaattaactctttacatacctcagcgttctctaatgtggcttggcttccaactctcattcccagttactgtctaggcacatactgcaattctgcaagtgcttgctttgttgcttctgatggcaaaaatctgagactctatcaagctgtagtggatgcaaggaaattattagatgaattgtcagacccagaatcttcaaaacttattggagaagtgtttaatattgtgagccaacagtctactgctcgacctggctgcattattgaactcgacgcaataaccaaccaatgtggctcaaatacacagttgcttcatgtgtttcaagaagacttcattataggatataaaccacataaggaagatatggagaaaaaggaaacagaaatattttttcagccatcacaaggataccgcccaccaccattttcagaaaagttctttctagtagtaattgagaaggacagcaataataactctattctgcatatgtggcaccttcatcttaaatctgtacaagcatgtttagctaaagcttcagaaggggcttcctctgagagtctactttcagtccctggacagaagaacgtagattcttctccagaaacctctcctagtgtgagccccatgccacattcttcatcaattgccaatcttcaaactgccagtaaacttattctgagttctagactggtgtatagccaaccccttgatctcccagaatcagttgaagtaataagagcaacgccttcagcaggccatctgagttcttcttcaatttatccagtgtgccttgcaccttatttagtggttacaacttgttctgacaataaagtacgcttctggaaatgttgtatggaagccaacccagagtgtaataaaagtgatgagaaagaaatttatcattggaagagatggcctttgatgaatgatgaaggagaagataatagcagtacagtgagcattgtgggaagaccagttgctgttagctgttcatacacaggtcgccttgcagtggcttataagcagcctatccaccataatggttttgtttctaaagaattttccatgcatgtttgtatatttgaatgtgaatctacaggaggatcagagtgggttttagaacaaacaattcatcttgatgatttggttaaggttgggagtgtacttgattcaagggtcagcgtcgacagtaatctgtttgtgtatagcaagtcagatgcactcttgagcaaggatagatatcttattccgaatatcaaacatttagtacatttggactgggtatcaaaagaagatggctcccacattcttacagtgggagtcggtgcgaatatcttcatgtatggaaggctttcaggaattgtgactgagcaaaccaacagtaaggatggagtagctgtcatcactttaccactaggtggtagtatcaagcaaggagttaagtcaagatgggttcttcttagatctatagacttggtatcttctgttgatggtactccttcactgcctgtttctctctcttgggtaagagatgggatattggtggtaggaatggattgtgaaatgcatgtatatgcacagtggaagcatgctgtcaaatttggagacactgaagctgatagttctaatgcagaagaggcagcaatgcaagatcattcgacctttaaatctaatatgctggcaagaaaaagtgttgttgaaggaacagctatttctgatgatgttttttgttcaccaactgtaattcaagatggtggcttatttgaggctgcacatgtactttcccctactcttccacaatatcatccaactcagctgttagaattgatggatttagggaaagtgcgaagggctaaagccattctctctcatttagtaaaatgtattgcaggtgaagtagcaatagttagagatcctgatgctggagaaggaactaagcgacatctctctcgaactattagtgtaagtggcagtacagcaaaggaaacagtcaccgtaggaaaagatggtactcgagattatactgagatagattctatccctccactaccactatatgcattacttgctgcagatcaagatacatcctacagaatttcagaagaaagtacaaagataccacagagctatgaagatcagacagtaagtcaaccagaggatcagtattcagagctgtttcaaatccaggatataccaacggatgatattgatttagagcctgaaaagagagaaaacaaatcaaaagtaataaatctttctcaatatggaccagcttactttggccaagaacatgcaagggtactttcaagtcatcttatgcactcaagtctaccaggccttacccgtttggagcagatgttccttgtagctttggctgatacagtggctactactagtactgagcttgatgaaagcagagataagagttgctcaggaagagatacattagatgagtgtggtttgagatacttgttagctatgcgcctacacacatgccttttgacatcgctgcctcctttataccgagtgcagctacttcatcaaggtgtctctacatgccattttgcctgggcttttcattctgaggctgaagaagaactgattaatatgattccagcaattcagagaggggacccccagtggtctgaattaagagctatgggcataggatggtgggtgaggaacattaacacgcttcgaagatgcattgaaaaggttgccaaagcttcttttcaaaggaacaatgatgccttagatgctgcactattctacctttcaatgaagaagaaagcagtagtgtggggtctgtttaggtcacagcatgatgaaaaaatgacaacatttttcagccacaactttaatgaagatagatggcgaaaagctgctttgaaaaatgctttttccttacttggaaaacaacgctttgaacaatcggctgcttttttcttgctagctggttcattgaaagatgccatagaggtatgtcttgaaaaaatggaagatattcagctagccatggttattgcccgtttatatgaatctgaatttgagacttcatccacttatatatccatcctaaatcagaagattttgggttgccaaaaggatggctcaggattcagttgcaaaagattacatcctgatcctttcctgcgtagtcttgcctattgggtaatgaaagattacacccgagccttggacacattactggaacaaacaccaaaggaggatgatgaacatcaagttatcatcaagtcttgtaacccggtggcatttagtttttataactaccttcgaactcatcctttgctcattcgaagaaatcttgcctcccctgaaggaactttggcaaccttaggtctcaaaactgagaagaactttgttgataaaattaacctcatagaaagaaaattattctttaccactgcaaatgctcattttaaagttggatgccctgttttagccttggaggtactctccaaaattccaaaagtaaccaaaacatctgccttatctgcaaaaaaagatcagcctgacttcatttctcacaggatggatgatgtaccttcacattcaaaagctctgagtgatggcaatggaagttctggcattgaatggtcaaatgtaacttcatcacagtatgactggagtcagccaatagtaaaagttgatgaggaacctcttaatcttgattggggtgaagatcacgacagtgccttagatgaagaggaagacgatgctgttggtttagtgatgaaaagtacagatgccagggaaaaagataaacaatcagatcagaaggcctcagaccctaacatgttattaacacctcaggaagaggatgatcctgaaggtgatactgaagttgatgtgattgctgaacaactaaaattcagagcttgtttaaagatccttatgactgaattaagaacattggctacaggttatgaagtagatggaggaaaactcagatttcaactctataactggcttgaaaaggaaattgctgccttgcatgagatatgtaatcatgaatcagttattaaagagtattccagtaagacatattccaaagtagagagtgatctgctggatcaggaagaaatggtagacaaaccagatattggttcctatgagcgccatcaaatagaaagaagaagattgcaggccaaacgagagcatgcagaaagacgaaagtcgtggttgcagaaaaaccaagatctcctgagagtatttctcagctactgtagccttcatggggcccaaggtggtggtttggcttcagtaaggatggaactcaaatttttgctacaagaatcacaacaggaaactacagtaaagcagctccagtctccactaccactgcctaccaccctacctctgctttcagcaagtattgcgtcaacaaaaacagtcatagctaatcctgtattgtacttaaataatcacatccatgatatactttatactattgttcagatgaaaacaccacctcatcccagtattgaagatgtgaaggtgcacacacttcattcactagcagcatcactttctgcatcaatttaccaagcattatgtgacagtcatagctacagcagtcaaacagaaggaaatcagtttacaggaatggcttatcaaggacttcttttaagtgatcgtagaagactaaggacagaaagcattgaagaacacgcaacaccaaattcatctcctgctcaatggcctggtgtgagctcacttattaatcttttgagttcagcccaagatgaagaccagccaaaactgaacattttgctatgtgaagctgttgttgctgtttacttaagtttattgatacatgctcttgccacaaattcctccagtgaattatttcggcttgcagcccacccattaaataatcgaatgtgggctgctgtttttggaggcggtgtaaaacttgttgtgaaacctcgaagacaatcagaaaatatttcagcacctcctgtcctttctgaagacatagataaacaccgtaggagatttaacatgagaatgctcgtccctggaaggcctgtaaaagatgctaccccaccaccggtgcctgcagaaagaccatcttacaaagaaaaatttattcctcccgaacttagtatgtgggattattttgttgcaaagccatttcttcctttgtctgatagtggtgttatatatgattctgatgaaagcattcatagtgatgaagaagatgatgcctttttttcagatacacaaatacaggagcaccaagatccaaattcctatagctgggctcttctacatttgacaatggttaaactagcacttcacaatgtcaagaatttctttcctattgctggactggaattctctgagctgcctgtaacatcaccattaggtattgctgtgattaaaaacttggagaactgggaacagatcttgcaagagaaaatggatcagtttgaaggtccaccccctaactatatcaacacatatccaactgacctttcagtgggagctggaccagctattcttcgaaataaagcaatgctagaacctgaaaataccccattcaagtcccgggattcttctgcatttccagtcaaacgactttggcatttccttgttaaacaagaggtccttcaagagacatttattagatatattttcactaagaaaagaaagcagagtgaggttgaagctgatctgggctatccaggtggaaaggcgaaagtcatccataaggaatctgatatgatcatggcattttctgttaataaggcaaattgtaatgaaattgttttggcttcaacacatgatgttcaagaacttgatgttacttctctactggcctgtcagtcatacatatggatcggagaagaatatgacagagaatccaaaagttcagatgatgttgattatcgtggttccactacaactctttatcaacccagtgcaacatcctattcagcaagtcaggtgcatccaccttcatctctgccatggctgggcactggacagactagcactggagctagtgtgcttatgaaaaggaatctacataatgttaagagaatgacttcacacccagtccatcaatactatcttacaggtgctcaggacggcagtgtacgaatgtttgaatggacgcggcctcagcaacttgtctgctttcgtcaagctggcaatgcaagagttactagattatattttaattcacaaggcaacaagtgtggtgttgcggatggagagggttttctgagtatctggcaagttaaccaaactgcatcaaatcctaaaccttatatgagttggcagtgccacagtaaagccacaagtgactttgcatttattacctcttcaagtctagttgccacatctggacactccaatgacaatagaaatgtttgcctctgggacacattaatatcacccggaaacagcctcattcatggtttcacgtgccacgatcatggtgccacggtactgcagtatgcacccaaacagcaactcctaatctcggggggtaggaaaggacacgtctgcatttttgacatcaggcaaaggcagctcattcacacgttccaggcccatgactcagctattaaggctctggccttggatccctatgaggaatattttaccacaggttcagcagaaggtaacataaaggtttggagattgacaggccatggcctaattcattcatttaaaagtgaacatgctaagcagtccatatttcgaaacattggggctggagtcatgcagattgacatcatccagggcaatcggctcttctcctgtggtgcagatggcacgctgaaaaccagggttttgcccaatgcttttaacatccctaacagaattcttgacattctataaagattggggttttatttttatatacatttcagttaaaaggcacactacagtcatcactaggcaattctgctttctaagcagttgtattgaaaacagagaatctctgtgtagaatttgaatatgacccaagctgagtattatctaaacaggttggtggaatgaatgcgcatgtaccttattatgctgacatactaaaaaaaataaaacctagtattgtatgaaggatagctattctttacagcatttagcaaacctgattcagaaaacatttgagattagcaaattagtaacttgaaataatgaaaaggacgtttataccaaattaaggaagaaaatgttgctgatttgggtttttcttcctgttcttaccactgactgaagcatgcctgcagtctcctcctctgttgaatgaaggataatcataaggtgtttgttaggagcgctagaccacctggaaaactttcttagctgtggagcagtgcgcagtgaccagttctctgctgtgagaggccgtttccattctttcctgctgaatatttttcctgttagtgtttatactgagctagtactgtaacttgcaaatgagtgcaaatttaaatgcaatgttttactcacaatttgcacattcacattttttggactgctagtttttctatttaaatatttgccttcatgttaggaatgtactatgtgaacatgacatatttgtagttaaccaaacacaccttcttagtccagtttagtactttttcttttcgtgtattcaaggttaaacacccaaacatttaaggatatgttgaaactacaccaatagagcatttcatatcataattaaaatgaatgttaggcttcttgtggccagttaatagttgatgagattggtgacattatttattgccacagcctattgtataaactatgcagagttaaatatttgcttgtaaaatattagccaatgttgtcattattttgatgtatttccttggttatgaccaaaaatatgttgagatactgaaactaatgtctgtgtgtttaaatgtttaccagcaaattgtcttatcatgttaatgagaatgttcaatgcctgtgtggtaaatagtaaatacaatggcataaaagtaactttctctgaagatgtgatgttcaggctgtgaaatatatatgtaaaagaaaaataaatgttatttgttagagtt

SEQ ID NO: 127488 - DNA, 4759 bp, Homo sapiens
  Payload ID: 4952
  Gene Symbol: DMXL2
  Gene Name: Dmx-like 2
  ENST ID: ENST00000560891
  CDS Start-End: 1-3551
aaattaacctcatagaaagaaaattattctttaccactgcaaatgctcattttaaagttggatgccctgttttagccttggaggtactctccaaaattccaaaagtaaccaaaacatctgccttatctgcaaaaaaagatcagcctgacttcatttctcacaggatggatgatgtaccttcacattcaaaagctctgagtgatggcaatggaagttctggcattgaatggtcaaatgtaacttcatcacagtatgactggagtcagccaatagtaaaagttgatgaggaacctcttaatcttgattggggtgaagatcacgacagtgccttagatgaagaggaagacgatgctgttggtttagtgatgaaaagtacagatgccagggaaaaagataaacaatcagatcagaaggcctcagaccctaacatgttattaacacctcaggaagaggatgatcctgaaggtgatactgaagttgatgtgattgctgaacaactaaaattcagagcttgtttaaagatccttatgactgaattaagaacattggctacaggttatgaagtagatggaggaaaactcagatttcaactctataactggcttgaaaaggaaattgctgccttgcatgagatatgtaatcatgaatcagttattaaagagtattccagtaagacatattccaaagtagagagtgatctgctggatcaggaagaaatggtagacaaaccagatattggttcctatgagcgccatcaaatagaaagaagaagattgcaggccaaacgagagcatgcagaaagacgaaagtcgtggttgcagaaaaaccaagatctcctgagagtatttctcagctactgtagccttcatggggcccaaggtggtggtttggcttcagtaaggatggaactcaaatttttgctacaagaatcacaacaggaaactacagtaaagcagctccagtctccactaccactgcctaccaccctacctctgctttcagcaagtattgcgtcaacaaaaacagtcatagctaatcctgtattgtacttaaataatcacatccatgatatactttatactattgttcagatgaaaacaccacctcatcccagtattgaagatgtgaaggtgcacacacttcattcactagcagcatcactttctgcatcaatttaccaagcattatgtgacagtcatagctacagcagtcaaacagaaggaaatcagtttacaggaatggcttatcaaggacttcttttaagtgatcgtagaagactaaggacagaaagcattgaagaacacgcaacaccaaattcatctcctgctcaatggcctggtgtgagctcacttattaatcttttgagttcagcccaagatgaagaccagccaaaactgaacattttgctatgtgaagctgttgttgctgtttacttaagtttattgatacatgctcttgccacaaattcctccagtgaattatttcggcttgcagcccacccattaaataatcgaatgtgggctgctgtttttggaggcggtgtaaaacttgttgtgaaacctcgaagacaatcagaaaatatttcagcacctcctgtcctttctgaagacatagataaacaccgtaggagatttaacatgagaatgctcgtccctggaaggcctgtaaaagatgctaccccaccaccggtgcctgcagaaagaccatcttacaaagaaaaatttattcctcccgaacttagtatgtgggattattttgttgcaaagccatttcttcctttgtctgatagtggtgttatatatgattctgatgaaagcattcatagtgatgaagaagatgatgcctttttttcagatacacaaatacaggagcaccaagatccaaattcctatagctgggctcttctacatttgacaatggttaaactagcacttcacaatgtcaagaatttctttcctattgctggactggaattctctgagctgcctgtaacatcaccattaggtattgctgtgattaaaaacttggagaactgggaacagatcttgcaagagaaaatggatcagtttgaaggtccaccccctaactatatcaacacatatccaactgacctttcagtgggagctggaccagctattcttcgaaataaagcaatgctagaacctgaaaataccccattcaagtcccgggattcttctgcatttccagtcaaacgactttggcatttccttgttaaacaagaggtccttcaagagacatttattagatatattttcactaagaaaagaaagcagagtgagtctatagaagaacatgtggagcaggtcaaccaaaactgcatagcagaagattgccacatcaaggttgaagctgatctgggctatccaggtggaaaggcgaaagtcatccataaggaatctgatatgatcatggcattttctgttaataaggcaaattgtaatgaaattgttttggcttcaacacatgatgttcaagaacttgatgttacttctctactggcctgtcagtcatacatatggatcggagaagaatatgacagagaatccaaaagttcagatgatgttgattatcgtggttccactacaactctttatcaacccagtgcaacatcctattcagcaagtcaggtgcatccaccttcatctctgccatggctgggcactggacagactagcactggagctagtgtgcttatgaaaaggaatctacataatgttaagagaatgacttcacacccagtccatcaatactatcttacaggtgctcaggacggcagtgtacgaatgtttgaatggacgcggcctcagcaacttgtctgctttcgtcaagctggcaatgcaagagttactagattatattttaattcacaaggcaacaagtgtggtgttgcggatggagagggttttctgagtatctggcaagttaaccaaactgcatcaaatcctaaaccttatatgagttggcagtgccacagtaaagccacaagtgactttgcatttattacctcttcaagtctagttgccacatctggacactccaatgacaatagaaatgtttgcctctgggacacattaatatcacccggaaacagcctcattcatggtttcacgtgccacgatcatggtgccacggtactgcagtatgcacccaaacagcaactcctaatctcggggggtaggaaaggacacgtctgcatttttgacatcaggcaaaggcagctcattcacacgttccaggcccatgactcagctattaaggctctggccttggatccctatgaggaatattttaccacaggttcagcagaaggtaacataaaggtttggagattgacaggccatggcctaattcattcatttaaaagtgaacatgctaagcagtccatatttcgaaacattggggctggagtcatgcagattgacatcatccagggcaatcggctcttctcctgtggtgcagatggcacgctgaaaaccagggttttgcccaatgcttttaacatccctaacagaattcttgacattctataaagattggggttttatttttatatacatttcagttaaaaggcacactacagtcatcactaggcaattctgctttctaagcagttgtattgaaaacagagaatctctgtgtagaatttgaatatgacccaagctgagtattatctaaacaggttggtggaatgaatgcgcatgtaccttattatgctgacatactaaaaaaaataaaacctagtattgtatgaaggatagctattctttacagcatttagcaaacctgattcagaaaacatttgagattagcaaattagtaacttgaaataatgaaaaggacgtttataccaaattaaggaagaaaatgttgctgatttgggtttttcttcctgttcttaccactgactgaagcatgcctgcagtctcctcctctgttgaatgaaggataatcataaggtgtttgttaggagcgctagaccacctggaaaactttcttagctgtggagcagtgcgcagtgaccagttctctgctgtgagaggccgtttccattctttcctgctgaatatttttcctgttagtgtttatactgagctagtactgtaacttgcaaatgagtgcaaatttaaatgcaatgttttactcacaatttgcacattcacattttttggactgctagtttttctatttaaatatttgccttcatgttaggaatgtactatgtgaacatgacatatttgtagttaaccaaacacaccttcttagtccagtttagtactttttcttttcgtgtattcaaggttaaacacccaaacatttaaggatatgttgaaactacaccaatagagcatttcatatcataattaaaatgaatgttaggcttcttgtggccagttaatagttgatgagattggtgacattatttattgccacagcctattgtataaactatgcagagttaaatatttgcttgtaaaatattagccaatgttgtcattattttgatgtatttccttggttatgaccaaaaatatgttgagatactgaaactaatgtctgtgtgtttaaatgtttaccagcaaattgtcttatcatgttaatgagaatgttcaatgcctgtgtggtaaatagtaaatacaatggcataaaagtaactttctctgaagatgtgatgttcaggctgtgaaatatatatgtaaaagaaaaataaatgttatttgttagagtttttagtttgata

SEQ ID NO: 127489 - DNA, 571 bp, Homo sapiens
  Payload ID: 4952
  Gene Symbol: DMXL2
  Gene Name: Dmx-like 2
  ENST ID: ENST00000559498
  CDS Start-End: 1-347
tgagaatgctcgtccctggaaggcctgtaaaagatgctaccccaccaccggtgcctgcagaaagaccatcttacaaagaaaaatttattcctcccgaacttagtatgtgggattattttgttgcaaagccatttcttcctttgtctgatagtggtgttatatatgattctgatgaaagcattcatagtgatgaagaagatgatgcctttttttcagatacacaaatacaggagcaccaagatccaaattcctatagctgggctcttctacatttgacaatggttaaactagcacttcacaatgtcaagaatttctttcctattgctggactggaattctctggttgaagctgatctgggctatccaggtggaaaggcgaaagtcatccataaggaatctgatatgatcatggcattttctgttaataaggcaaattgtaatgaaattgttttggcttcaacacatgatgttcaagaacttgatgttacttctctactggcctgtcagtcatacatatggatcggagaagaatatgacagagaatccaaaagttcagatgatgttgattatc

SEQ ID NO: 127490 - DNA, 307 bp, Homo sapiens
  Payload ID: 4952
  Gene Symbol: DMXL2
  Gene Name: Dmx-like 2
  ENST ID: ENST00000559059
  CDS Start-End: 1-231
ggagagggttttctgagtatctggcaagttaaccaaactgcatcaaatcctaaaccttatatgagttggcagtgccacagtaaagccacaagtgactttgcatttattacctcttcaagtctagttgccacatctggacactccaatgacaataggtttcacgtgccacgatcatggtgccacggtactgcagtatgcacccaaacagcaactcctaatctcggggggtaggaaaggacacgtctgcatttttgacatcaggcaaaggcagctcattcacacgttccaggcccatgactcagctatt

SEQ ID NO: 127491 - DNA, 5408 bp, Homo sapiens
  Payload ID: 4953
  Gene Symbol: DNMT1
  Gene Name: DNA (cytosine-5-)-methyltransferase 1
  Uniprot ID: P26358
  ENST ID: ENST00000340748
  CDS Start-End: 237-5087
tccgcgtggggggggtgtgtgcccgccttgcgcatgcgtgttccctgggcatggccggctccgttccatccttctgcacagggtatcgcctctctccgtttggtacatcccctcctcccccacgcccggactggggtggtagacgccgcctccgctcatcgcccctccccatcggtttccgcgcgaaaagccggggcgcctgcgctgccgccgccgcgtctgctgaagcctccgagatgccggcgcgtaccgccccagcccgggtgcccacactggccgtcccggccatctcgctgcccgacgatgtccgcaggcggctcaaagatttggaaagagacagcttaacagaaaaggaatgtgtgaaggagaaattgaatctcttgcacgaatttctgcaaacagaaataaagaatcagttatgtgacttggaaaccaaattacgtaaagaagaattatccgaggagggctacctggctaaagtcaaatcccttttaaataaagatttgtccttggagaacggtgctcatgcttacaaccgggaagtgaatggacgtctagaaaacgggaaccaagcaagaagtgaagcccgtagagtgggaatggcagatgccaacagcccccccaaacccctttccaaacctcgcacgcccaggaggagcaagtccgatggagaggctaagcctgaaccttcacctagccccaggattacaaggaaaagcaccaggcaaaccaccatcacatctcattttgcaaagggccctgccaaacggaaacctcaggaagagtctgaaagagccaaatcggatgagtccatcaaggaagaagacaaagaccaggatgagaagagacgtagagttacatccagagaacgagttgctagaccgcttcctgcagaagaacctgaaagagcaaaatcaggaacgcgcactgaaaaggaagaagaaagagatgaaaaagaagaaaagagactccgaagtcaaaccaaagaaccaacacccaaacagaaactgaaggaggagccggacagagaagccagggcaggcgtgcaggctgacgaggacgaagatggagacgagaaagatgagaagaagcacagaagtcaacccaaagatctagctgccaaacggaggcccgaagaaaaagaacctgaaaaagtaaatccacagatttctgatgaaaaagacgaggatgaaaaggaggagaagagacgcaaaacgacccccaaagaaccaacggagaaaaaaatggctcgcgccaaaacagtcatgaactccaagacccaccctcccaagtgcattcagtgcgggcagtacctggacgaccctgacctcaaatatgggcagcacccaccagacgcggtggatgagccacagatgctgacaaatgagaagctgtccatctttgatgccaacgagtctggctttgagagttatgaggcgcttccccagcacaaactgacctgcttcagtgtgtactgtaagcacggtcacctgtgtcccatcgacaccggcctcatcgagaagaatatcgaactcttcttttctggttcagcaaaaccaatctatgatgatgacccatctcttgaaggtggtgttaatggcaaaaatcttggccccataaatgaatggtggatcactggctttgatggaggtgaaaaggccctcatcggcttcagcacctcatttgccgaatacattctgatggatcccagtcccgagtatgcgcccatatttgggctgatgcaggagaagatctacatcagcaagattgtggtggagttcctgcagagcaattccgactcgacctatgaggacctgatcaacaagatcgagaccacggttcctccttctggcctcaacttgaaccgcttcacagaggactccctcctgcgacacgcgcagtttgtggtggagcaggtggagagttatgacgaggccggggacagtgatgagcagcccatcttcctgacaccctgcatgcgggacctgatcaagctggctggggtcacgctgggacagaggcgagcccaggcgaggcggcagaccatcaggcattctaccagggagaaggacaggggacccacgaaagccaccaccaccaagctggtctaccagatcttcgatactttcttcgcagagcaaattgaaaaggatgacagagaagacaaggagaacgcctttaagcgccggcgatgtggcgtctgtgaggtgtgtcagcagcctgagtgtgggaaatgtaaagcctgcaaggacatggttaaatttggtggcagtggacggagcaagcaggcttgccaagagcggaggtgtcccaatatggccatgaaggaggcagatgacgatgaggaagtcgatgataacatcccagagatgccgtcacccaaaaaaatgcaccaggggaagaagaagaaacagaacaagaatcgcatctcttgggtcggagaagccgtcaagactgatgggaagaagagttactataagaaggtgtgcattgatgcggaaaccctggaagtgggggactgtgtctctgttattccagatgattcctcaaaaccgctgtatctagcaagggtcacggcgctgtgggaggacagcagcaacgggcagatgtttcacgcccactggttctgcgctgggacagacacagtcctcggggccacgtcggaccctctggagctgttcttggtggatgaatgtgaggacatgcagctttcatatatccacagcaaagtgaaagtcatctacaaagccccctccgaaaactgggccatggagggaggcatggatcccgagtccctgctggagggggacgacgggaagacctacttctaccagctgtggtatgatcaagactacgcgagattcgagtcccctccaaaaacccagccaacagaggacaacaagttcaaattctgtgtgagctgtgcccgtctggctgagatgaggcaaaaagaaatccccagggtcctggagcagctcgaggacctggatagccgggtcctctactactcagccaccaagaacggcatcctgtaccgagttggtgatggtgtgtacctgccccctgaggccttcacgttcaacatcaagctgtccagtcccgtgaaacgcccacggaaggagcccgtggatgaggacctgtacccagagcactaccggaaatactccgactacatcaaaggcagcaacctggatgcccctgagccctaccgaattggccggatcaaagagatcttctgtcccaagaagagcaacggcaggcccaatgagactgacatcaaaatccgggtcaacaagttctacaggcctgagaacacccacaagtccactccagcgagctaccacgcagacatcaacctgctctactggagcgacgaggaggccgtggtggacttcaaggctgtgcagggccgctgcaccgtggagtatggggaggacctgcccgagtgcgtccaggtgtactccatgggcggccccaaccgcttctacttcctcgaggcctataatgcaaagagcaaaagctttgaagatcctcccaaccatgcccgtagccctggaaacaaagggaagggcaagggaaaagggaagggcaagcccaagtcccaagcctgtgagccgagcgagccagagatagagatcaagctgcccaagctgcggaccctggatgtgttttctggctgcggggggttgtcggagggattccaccaagcaggcatctctgacacgctgtgggccatcgagatgtgggaccctgcggcccaggcgttccggctgaacaaccccggctccacagtgttcacagaggactgcaacatcctgctgaagctggtcatggctggggagaccaccaactcccgcggccagcggctgccccagaagggagacgtggagatgctgtgcggcgggccgccctgccagggcttcagcggcatgaaccgcttcaattcgcgcacctactccaagttcaaaaactctctggtggtttccttcctcagctactgcgactactaccggccccggttcttcctcctggagaatgtcaggaactttgtctccttcaagcgctccatggtcctgaagctcaccctccgctgcctggtccgcatgggctatcagtgcaccttcggcgtgctgcaggccggtcagtacggcgtggcccagactaggaggcgggccatcatcctggccgcggcccctggagagaagctccctctgttcccggagccactgcacgtgtttgctccccgggcctgccagctgagcgtggtggtggatgacaagaagtttgtgagcaacataaccaggttgagctcgggtcctttccggaccatcacggtgcgagacacgatgtccgacctgccggaggtgcggaatggagcctcggcactggagatctcctacaacggggagcctcagtcctggttccagaggcagctccggggcgcacagtaccagcccatcctcagggaccacatctgtaaggacatgagtgcattggtggctgcccgcatgcggcacatccccttggccccagggtcagactggcgcgatctgcccaacatcgaggtgcggctctcagacggcaccatggccaggaagctgcggtatacccaccatgacaggaagaacggccgcagcagctctggggccctccgtggggtctgctcctgcgtggaagccggcaaagcctgcgaccccgcagccaggcagttcaacaccctcatcccctggtgcctgccccacaccgggaaccggcacaaccactgggctggcctctatggaaggctcgagtgggacggcttcttcagcacaaccgtcaccaaccccgagcccatgggcaagcagggccgcgtgctccacccagagcagcaccgtgtggtgagcgtgcgggagtgtgcccgctcccagggcttccctgacacctaccggctcttcggcaacatcctggacaagcaccggcaggtgggcaatgccgtgccaccgcccctggccaaagccattggcttggagatcaagctttgtatgttggccaaagcccgagagagtgcctcagctaaaataaaggaggaggaagctgctaaggactagttctgccctcccgtcacccctgtttctggcaccaggaatccccaacatgcactgatgttgtgtttttaacatgtcaatctgtccgttcacatgtgtggtacatggtgtttgtggccttggctgacatgaagctgttgtgtgaggttcgcttatcaactaatgatttagtgatcaaattgtgcagtactttgtgcattctggattttaaaagttttttattatgcattatatcaaatctaccactgtatgagtggaaattaagactttatgtagtttttatatgttgtaatatttcttcaaataaatctctcctataaacca

SEQ ID NO: 127492 - DNA, 5206 bp, Homo sapiens
  Payload ID: 4953
  Gene Symbol: DNMT1
  Gene Name: DNA (cytosine-5-)-methyltransferase 1
  Uniprot ID: P26358
  ENST ID: ENST00000359526
  CDS Start-End: 181-5079
ggctccgttccatccttctgcacagggtatcgcctctctccgtttggtacatcccctcctcccccacgcccggactggggtggtagacgccgcctccgctcatcgcccctccccatcggtttccgcgcgaaaagccggggcgcctgcgctgccgccgccgcgtctgctgaagcctccgagatgccggcgcgtaccgccccagcccgggtgcccacactggccgtcccggccatctcgctgcccgacgatgtccgcaggcggctcaaagatttggaaagagacagcttaacagaaaaggaatgtgtgaaggagaaattgaatctcttgcacgaatttctgcaaacagaaataaagaatcagttatgtgacttggaaaccaaattacgtaaagaagaattatccgaggagggctacctggctaaagtcaaatcccttttaaataaagatttgtccttggagaacggtgctcatgcttacaaccgggaagtgaatggacgtctagaaaacgggaaccaagcaagaagtgaagcccgtagagtgggaatggcagatgccaacagcccccccaaacccctttccaaacctcgcacgcccaggaggagcaagtccgatggagaggctaagcgttcaagagaccctcctgcctcagcctcccaagtaactgggattagagctgaaccttcacctagccccaggattacaaggaaaagcaccaggcaaaccaccatcacatctcattttgcaaagggccctgccaaacggaaacctcaggaagagtctgaaagagccaaatcggatgagtccatcaaggaagaagacaaagaccaggatgagaagagacgtagagttacatccagagaacgagttgctagaccgcttcctgcagaagaacctgaaagagcaaaatcaggaacgcgcactgaaaaggaagaagaaagagatgaaaaagaagaaaagagactccgaagtcaaaccaaagaaccaacacccaaacagaaactgaaggaggagccggacagagaagccagggcaggcgtgcaggctgacgaggacgaagatggagacgagaaagatgagaagaagcacagaagtcaacccaaagatctagctgccaaacggaggcccgaagaaaaagaacctgaaaaagtaaatccacagatttctgatgaaaaagacgaggatgaaaaggaggagaagagacgcaaaacgacccccaaagaaccaacggagaaaaaaatggctcgcgccaaaacagtcatgaactccaagacccaccctcccaagtgcattcagtgcgggcagtacctggacgaccctgacctcaaatatgggcagcacccaccagacgcggtggatgagccacagatgctgacaaatgagaagctgtccatctttgatgccaacgagtctggctttgagagttatgaggcgcttccccagcacaaactgacctgcttcagtgtgtactgtaagcacggtcacctgtgtcccatcgacaccggcctcatcgagaagaatatcgaactcttcttttctggttcagcaaaaccaatctatgatgatgacccatctcttgaaggtggtgttaatggcaaaaatcttggccccataaatgaatggtggatcactggctttgatggaggtgaaaaggccctcatcggcttcagcacctcatttgccgaatacattctgatggatcccagtcccgagtatgcgcccatatttgggctgatgcaggagaagatctacatcagcaagattgtggtggagttcctgcagagcaattccgactcgacctatgaggacctgatcaacaagatcgagaccacggttcctccttctggcctcaacttgaaccgcttcacagaggactccctcctgcgacacgcgcagtttgtggtggagcaggtggagagttatgacgaggccggggacagtgatgagcagcccatcttcctgacaccctgcatgcgggacctgatcaagctggctggggtcacgctgggacagaggcgagcccaggcgaggcggcagaccatcaggcattctaccagggagaaggacaggggacccacgaaagccaccaccaccaagctggtctaccagatcttcgatactttcttcgcagagcaaattgaaaaggatgacagagaagacaaggagaacgcctttaagcgccggcgatgtggcgtctgtgaggtgtgtcagcagcctgagtgtgggaaatgtaaagcctgcaaggacatggttaaatttggtggcagtggacggagcaagcaggcttgccaagagcggaggtgtcccaatatggccatgaaggaggcagatgacgatgaggaagtcgatgataacatcccagagatgccgtcacccaaaaaaatgcaccaggggaagaagaagaaacagaacaagaatcgcatctcttgggtcggagaagccgtcaagactgatgggaagaagagttactataagaaggtgtgcattgatgcggaaaccctggaagtgggggactgtgtctctgttattccagatgattcctcaaaaccgctgtatctagcaagggtcacggcgctgtgggaggacagcagcaacgggcagatgtttcacgcccactggttctgcgctgggacagacacagtcctcggggccacgtcggaccctctggagctgttcttggtggatgaatgtgaggacatgcagctttcatatatccacagcaaagtgaaagtcatctacaaagccccctccgaaaactgggccatggagggaggcatggatcccgagtccctgctggagggggacgacgggaagacctacttctaccagctgtggtatgatcaagactacgcgagattcgagtcccctccaaaaacccagccaacagaggacaacaagttcaaattctgtgtgagctgtgcccgtctggctgagatgaggcaaaaagaaatccccagggtcctggagcagctcgaggacctggatagccgggtcctctactactcagccaccaagaacggcatcctgtaccgagttggtgatggtgtgtacctgccccctgaggccttcacgttcaacatcaagctgtccagtcccgtgaaacgcccacggaaggagcccgtggatgaggacctgtacccagagcactaccggaaatactccgactacatcaaaggcagcaacctggatgcccctgagccctaccgaattggccggatcaaagagatcttctgtcccaagaagagcaacggcaggcccaatgagactgacatcaaaatccgggtcaacaagttctacaggcctgagaacacccacaagtccactccagcgagctaccacgcagacatcaacctgctctactggagcgacgaggaggccgtggtggacttcaaggctgtgcagggccgctgcaccgtggagtatggggaggacctgcccgagtgcgtccaggtgtactccatgggcggccccaaccgcttctacttcctcgaggcctataatgcaaagagcaaaagctttgaagatcctcccaaccatgcccgtagccctggaaacaaagggaagggcaagggaaaagggaagggcaagcccaagtcccaagcctgtgagccgagcgagccagagatagagatcaagctgcccaagctgcggaccctggatgtgttttctggctgcggggggttgtcggagggattccaccaagcaggcatctctgacacgctgtgggccatcgagatgtgggaccctgcggcccaggcgttccggctgaacaaccccggctccacagtgttcacagaggactgcaacatcctgctgaagctggtcatggctggggagaccaccaactcccgcggccagcggctgccccagaagggagacgtggagatgctgtgcggcgggccgccctgccagggcttcagcggcatgaaccgcttcaattcgcgcacctactccaagttcaaaaactctctggtggtttccttcctcagctactgcgactactaccggccccggttcttcctcctggagaatgtcaggaactttgtctccttcaagcgctccatggtcctgaagctcaccctccgctgcctggtccgcatgggctatcagtgcaccttcggcgtgctgcaggccggtcagtacggcgtggcccagactaggaggcgggccatcatcctggccgcggcccctggagagaagctccctctgttcccggagccactgcacgtgtttgctccccgggcctgccagctgagcgtggtggtggatgacaagaagtttgtgagcaacataaccaggttgagctcgggtcctttccggaccatcacggtgcgagacacgatgtccgacctgccggaggtgcggaatggagcctcggcactggagatctcctacaacggggagcctcagtcctggttccagaggcagctccggggcgcacagtaccagcccatcctcagggaccacatctgtaaggacatgagtgcattggtggctgcccgcatgcggcacatccccttggccccagggtcagactggcgcgatctgcccaacatcgaggtgcggctctcagacggcaccatggccaggaagctgcggtatacccaccatgacaggaagaacggccgcagcagctctggggccctccgtggggtctgctcctgcgtggaagccggcaaagcctgcgaccccgcagccaggcagttcaacaccctcatcccctggtgcctgccccacaccgggaaccggcacaaccactgggctggcctctatggaaggctcgagtgggacggcttcttcagcacaaccgtcaccaaccccgagcccatgggcaagcagggccgcgtgctccacccagagcagcaccgtgtggtgagcgtgcgggagtgtgcccgctcccagggcttccctgacacctaccggctcttcggcaacatcctggacaagcaccggcaggtgggcaatgccgtgccaccgcccctggccaaagccattggcttggagatcaagctttgtatgttggccaaagcccgagagagtgcctcagctaaaataaaggaggaggaagctgctaaggactagttctgccctcccgtcacccctgtttctggcaccaggaatccccaacatgcactgatgttgtgtttttaacatgtcaatctgtccgttcacatgtgtggtacatggtgtttgtggccttggctgacat

SEQ ID NO: 127493 - DNA, 4916 bp, Homo sapiens
  Payload ID: 4953
  Gene Symbol: DNMT1
  Gene Name: DNA (cytosine-5-)-methyltransferase 1
  Uniprot ID: P26358
  ENST ID: ENST00000540357
  CDS Start-End: 754-4596
tccgcgtggggggggtgtgtgcccgccttgcgcatgcgtgttccctgggcatggccggctccgttccatccttctgcacagggtatcgcctctctccgtttggtacatcccctcctcccccacgcccggactggggtggtagacgccgcctccgctcatcgcccctccccatcggtttccgcgcgaaaagccgaaccttcacctagccccaggattacaaggaaaagcaccaggcaaaccaccatcacatctcattttgcaaagggccctgccaaacggaaacctcaggaagagtctgaaagagccaaatcggatgagtccatcaaggaagaagacaaagaccaggatgagaagagacgtagagttacatccagagaacgagttgctagaccgcttcctgcagaagaacctgaaagagcaaaatcaggaacgcgcactgaaaaggaagaagaaagagatgaaaaagaagaaaagagactccgaagtcaaaccaaagaaccaacacccaaacagaaactgaaggaggagccggacagagaagccagggcaggcgtgcaggctgacgaggacgaagatggagacgagaaagatgagaagaagcacagaagtcaacccaaagatctagctgccaaacggaggcccgaagaaaaagaacctgaaaaagtaaatccacagatttctgatgaaaaagacgaggatgaaaaggaggagaagagacgcaaaacgacccccaaagaaccaacggagaaaaaaatggctcgcgccaaaacagtcatgaactccaagacccaccctcccaagtgcattcagtgcgggcagtacctggacgaccctgacctcaaatatgggcagcacccaccagacgcggtggatgagccacagatgctgacaaatgagaagctgtccatctttgatgccaacgagtctggctttgagagttatgaggcgcttccccagcacaaactgacctgcttcagtgtgtactgtaagcacggtcacctgtgtcccatcgacaccggcctcatcgagaagaatatcgaactcttcttttctggttcagcaaaaccaatctatgatgatgacccatctcttgaaggtggtgttaatggcaaaaatcttggccccataaatgaatggtggatcactggctttgatggaggtgaaaaggccctcatcggcttcagcacctcatttgccgaatacattctgatggatcccagtcccgagtatgcgcccatatttgggctgatgcaggagaagatctacatcagcaagattgtggtggagttcctgcagagcaattccgactcgacctatgaggacctgatcaacaagatcgagaccacggttcctccttctggcctcaacttgaaccgcttcacagaggactccctcctgcgacacgcgcagtttgtggtggagcaggtggagagttatgacgaggccggggacagtgatgagcagcccatcttcctgacaccctgcatgcgggacctgatcaagctggctggggtcacgctgggacagaggcgagcccaggcgaggcggcagaccatcaggcattctaccagggagaaggacaggggacccacgaaagccaccaccaccaagctggtctaccagatcttcgatactttcttcgcagagcaaattgaaaaggatgacagagaagacaaggagaacgcctttaagcgccggcgatgtggcgtctgtgaggtgtgtcagcagcctgagtgtgggaaatgtaaagcctgcaaggacatggttaaatttggtggcagtggacggagcaagcaggcttgccaagagcggaggtgtcccaatatggccatgaaggaggcagatgacgatgaggaagtcgatgataacatcccagagatgccgtcacccaaaaaaatgcaccaggggaagaagaagaaacagaacaagaatcgcatctcttgggtcggagaagccgtcaagactgatgggaagaagagttactataagaaggtgtgcattgatgcggaaaccctggaagtgggggactgtgtctctgttattccagatgattcctcaaaaccgctgtatctagcaagggtcacggcgctgtgggaggacagcagcaacgggcagatgtttcacgcccactggttctgcgctgggacagacacagtcctcggggccacgtcggaccctctggagctgttcttggtggatgaatgtgaggacatgcagctttcatatatccacagcaaagtgaaagtcatctacaaagccccctccgaaaactgggccatggagggaggcatggatcccgagtccctgctggagggggacgacgggaagacctacttctaccagctgtggtatgatcaagactacgcgagattcgagtcccctccaaaaacccagccaacagaggacaacaagttcaaattctgtgtgagctgtgcccgtctggctgagatgaggcaaaaagaaatccccagggtcctggagcagctcgaggacctggatagccgggtcctctactactcagccaccaagaacggcatcctgtaccgagttggtgatggtgtgtacctgccccctgaggccttcacgttcaacatcaagctgtccagtcccgtgaaacgcccacggaaggagcccgtggatgaggacctgtacccagagcactaccggaaatactccgactacatcaaaggcagcaacctggatgcccctgagccctaccgaattggccggatcaaagagatcttctgtcccaagaagagcaacggcaggcccaatgagactgacatcaaaatccgggtcaacaagttctacaggcctgagaacacccacaagtccactccagcgagctaccacgcagacatcaacctgctctactggagcgacgaggaggccgtggtggacttcaaggctgtgcagggccgctgcaccgtggagtatggggaggacctgcccgagtgcgtccaggtgtactccatgggcggccccaaccgcttctacttcctcgaggcctataatgcaaagagcaaaagctttgaagatcctcccaaccatgcccgtagccctggaaacaaagggaagggcaagggaaaagggaagggcaagcccaagtcccaagcctgtgagccgagcgagccagagatagagatcaagctgcccaagctgcggaccctggatgtgttttctggctgcggggggttgtcggagggattccaccaagcaggcatctctgacacgctgtgggccatcgagatgtgggaccctgcggcccaggcgttccggctgaacaaccccggctccacagtgttcacagaggactgcaacatcctgctgaagctggtcatggctggggagaccaccaactcccgcggccagcggctgccccagaagggagacgtggagatgctgtgcggcgggccgccctgccagggcttcagcggcatgaaccgcttcaattcgcgcacctactccaagttcaaaaactctctggtggtttccttcctcagctactgcgactactaccggccccggttcttcctcctggagaatgtcaggaactttgtctccttcaagcgctccatggtcctgaagctcaccctccgctgcctggtccgcatgggctatcagtgcaccttcggcgtgctgcaggccggtcagtacggcgtggcccagactaggaggcgggccatcatcctggccgcggcccctggagagaagctccctctgttcccggagccactgcacgtgtttgctccccgggcctgccagctgagcgtggtggtggatgacaagaagtttgtgagcaacataaccaggttgagctcgggtcctttccggaccatcacggtgcgagacacgatgtccgacctgccggaggtgcggaatggagcctcggcactggagatctcctacaacggggagcctcagtcctggttccagaggcagctccggggcgcacagtaccagcccatcctcagggaccacatctgtaaggacatgagtgcattggtggctgcccgcatgcggcacatccccttggccccagggtcagactggcgcgatctgcccaacatcgaggtgcggctctcagacggcaccatggccaggaagctgcggtatacccaccatgacaggaagaacggccgcagcagctctggggccctccgtggggtctgctcctgcgtggaagccggcaaagcctgcgaccccgcagccaggcagttcaacaccctcatcccctggtgcctgccccacaccgggaaccggcacaaccactgggctggcctctatggaaggctcgagtgggacggcttcttcagcacaaccgtcaccaaccccgagcccatgggcaagcagggccgcgtgctccacccagagcagcaccgtgtggtgagcgtgcgggagtgtgcccgctcccagggcttccctgacacctaccggctcttcggcaacatcctggacaagcaccggcaggtgggcaatgccgtgccaccgcccctggccaaagccattggcttggagatcaagctttgtatgttggccaaagcccgagagagtgcctcagctaaaataaaggaggaggaagctgctaaggactagttctgccctcccgtcacccctgtttctggcaccaggaatccccaacatgcactgatgttgtgtttttaacatgtcaatctgtccgttcacatgtgtggtacatggtgtttgtggccttggctgacatgaagctgttgtgtgaggttcgcttatcaactaatgatttagtgatcaaattgtgcagtactttgtgcattctggattttaaaagttttttattatgcattatatcaaatctaccactgtatgagtggaaattaagactttatgtagtttttatatgttgtaatatttcttcaaataaatctctcctataaacc

SEQ ID NO: 127494 - DNA, 711 bp, Homo sapiens
  Payload ID: 4953
  Gene Symbol: DNMT1
  Gene Name: DNA (cytosine-5-)-methyltransferase 1
  ENST ID: ENST00000586988
  CDS Start-End: 6-128
ccgagatgccggcgcgtaccgccccagcccgggtgcccacactggccgtcccggccatctcgctgcccgacgatgtccgcaggcggctcaaagatttggaaagagacagcttaacagaaaagaaataaagaatcagttatgtgacttggaaaccaaattacgtaaagaagaattatccgaggagggctacctggctaaagtcaaatcccttttaaataaagatttgtccttggagaacggtgctcatgcttacaaccgggaagtgaatggacgtctagaaaacgggaaccaagcaagaagtgaagcccgtagagtgggaatggcagatgccaacagcccccccaaacccctttccaaacctcgcacgcccaggaggagcaagtccgatggagaggctaagcctgaaccttcacctagccccaggattacaaggaaaagcaccaggcaaaccaccatcacatctcattttgcaaagggccctgccaaacggaaacctcaggaagagtctgaaagagccaaatcggatgagtccatcaaggaagaagacaaagaccaggatgagaagagacgtagagttacatccagagaacgagttgctagaccgcttcctgcagaagaacctgaaagagcaaaatcaggaacgcgcactgaaaaggaagaagaaagagatgaaaaagaagaaaagagactccgaagtcaaaccaaagaacc

SEQ ID NO: 127495 - DNA, 973 bp, Homo sapiens
  Payload ID: 4953
  Gene Symbol: DNMT1
  Gene Name: DNA (cytosine-5-)-methyltransferase 1
  ENST ID: ENST00000588118
  CDS Start-End: 209-973
tccttgcgttgaagtccctgagtaggaggtctgttcatctgtcccctcttcttatttcctcccctggctctaagtccagcttccttcaagtgctatccctttggtctcccatggcctggacaactggccatccctggggccactgttttgccctcaggttctggatgaaagacagctggattcatggtccgtactgctgagtgagtctatgatcttggggtatcgcctctctccgtttggtacatcccctcctcccccacgcccggactggggtggtagacgccgcctccgctcatcgcccctccccatcggtttccgcgcgaaaagccggggcgcctgcgctgccgccgccgcgtctgctgaagcctccgagatgccggcgcgtaccgccccagcccgggtgcccacactggccgtcccggccatctcgctgcccgacgatgtccgcaggcggctcaaagatttggaaagagacagcttaacagaaaaggaatgtgtgaaggagaaattgaatctcttgcacgaatttctgcaaacagaaataaagaatcagttatgtgacttggaaaccaaattacgtaaagaagaattatccgaggagggctacctggctaaagtcaaatcccttttaaataaagatttgtccttggagaacggtgctcatgcttacaaccgggaagtgaatggacgtctagaaaacgggaaccaagcaagaagtgaagcccgtagagtgggaatggcagatgccaacagcccccccaaacccctttccaaacctcgcacgcccaggaggagcaagtccgatggagaggctaagcctgaaccttcacctagccccaggattacaaggaaaagcaccaggcaaaccaccatcacatctcattttgcaaagggccctgccaaacggaaacctcaggaagagtctgaaagagccaaatcggatgagtccatcaaggaagaagacaaagaccag

SEQ ID NO: 127496 - DNA, 583 bp, Homo sapiens
  Payload ID: 4953
  Gene Symbol: DNMT1
  Gene Name: DNA (cytosine-5-)-methyltransferase 1
  ENST ID: ENST00000586800
  CDS Start-End: 507-583
tggtctccttgcgttgaagtccctgagtaggaggtctgttcatctgtcccctcttcttatttcctcccctggctctaagtccagcttccttcaagtgctatccctttggtctcccatggcctggacaactggccatccctggggccactgttttgccctcaggttctggatgaaagacagctggattcatggtccgtactgctgagtgagtctatgatcttgggctcaaagatttggaaagagacagcttaacagaaaaggaatgtgtgaaggagaaattgaatctcttgcacgaatttctgcaaacagaaataaagaatcagttatgtgacttggaaaccaaattacgtaaagaagaattatccgaggagggctacctggctaaagtcaaatcccttttaaataaagatttgtccttggagaacggtgctcatgcttacaaccgggaagtgaatggacgtctagaaaacgggaaccaagcaagaagtgaagcccgtagagtgggaatggcagatgccaacagcccccccaaacccctttccaaacctcgcacgcccaggaggagcaagtccgatggagaggc

SEQ ID NO: 127497 - DNA, 636 bp, Homo sapiens
  Payload ID: 4953
  Gene Symbol: DNMT1
  Gene Name: DNA (cytosine-5-)-methyltransferase 1
  ENST ID: ENST00000592342
  CDS Start-End: 354-636
gcggccgccctggggacgcagacgccaaggcccctccggccagggccgggagccgggccggcctagccaggctcaaagatttggaaagagacagcttaacagaaaaggaatgtgtgaaggagaaattgaatctcttgcacgaatttctgcaaacagaaataaagaatcagttatgtgacttggaaaccaaattacgtaaagaagaattatccgaggagggctacctggctaaagtcaaatcccttttaaataaagatttgtccttggagaacggtgctcatgcttacaaccgggaagtgaatggacgtctagaaaacgggaaccaagcaagaagtgaagcccgtagagtgggaatggcagatgccaacagcccccccaaacccctttccaaacctcgcacgcccaggaggagcaagtccgatggagaggctaagcgttcaagagaccctcctgcctcagcctcccaagtaactgggattagagctgaaccttcacctagccccaggattacaaggaaaagcaccaggcaaaccaccatcacatctcattttgcaaagggccctgccaaacggaaacctcaggaagagtctgaaagagccaaatcggatgagtccatcaaggaagaagacaaagacc

SEQ ID NO: 127498 - DNA, 5215 bp, Homo sapiens
  Payload ID: 4953
  Gene Symbol: DNMT1
  Gene Name: DNA (cytosine-5-)-methyltransferase 1
  ENST ID: ENST00000592705
  CDS Start-End: 36-305
gcgctgccgccgccgcgtctgctgaagcctccgagatgccggcgcgtaccgccccagcccgggtgcccacactggccgtcccggccatctcgctgcccgacgatgtccgcaggcggctcaaagatttggaaagagacagcttaacagaaaaggaatgtgtgaaggagaaattgaatctcttgcacgaatttctgcaaacagaaataaagaatcagttatgtgacttggaaaccaaattacgtaaagaagaattatccgagatttgtccttggagaacggtgctcatgcttacaaccgggaagtgaatggacgtctagaaaacgggaaccaagcaagaagtgaagcccgtagagtgggaatggcagatgccaacagcccccccaaacccctttccaaacctcgcacgcccaggaggagcaagtccgatggagaggctaagcgttcaagagaccctcctgcctcagcctcccaagtaactgggattagagctgaaccttcacctagccccaggattacaaggaaaagcaccaggcaaaccaccatcacatctcattttgcaaagggccctgccaaacggaaacctcaggaagagtctgaaagagccaaatcggatgagtccatcaaggaagaagacaaagaccaggatgagaagagacgtagagttacatccagagaacgagttgctagaccgcttcctgcagaagaacctgaaagagcaaaatcaggaacgcgcactgaaaaggaagaagaaagagatgaaaaagaagaaaagagactccgaagtcaaaccaaagaaccaacacccaaacagaaactgaaggaggagccggacagagaagccagggcaggcgtgcaggctgacgaggacgaagatggagacgagaaagatgagaagaagcacagaagtcaacccaaagatctagctgccaaacggaggcccgaagaaaaagaacctgaaaaagtaaatccacagatttctgatgaaaaagacgaggatgaaaaggaggagaagagacgcaaaacgacccccaaagaaccaacggagaaaaaaatggctcgcgccaaaacagtcatgaactccaagacccaccctcccaagtgcattcagtgcgggcagtacctggacgaccctgacctcaaatatgggcagcacccaccagacgcggtggatgagccacagatgctgacaaatgagaagctgtccatctttgatgccaacgagtctggctttgagagttatgaggcgcttccccagcacaaactgacctgcttcagtgtgtactgtaagcacggtcacctgtgtcccatcgacaccggcctcatcgagaagaatatcgaactcttcttttctggttcagcaaaaccaatctatgatgatgacccatctcttgaaggtggtgttaatggcaaaaatcttggccccataaatgaatggtggatcactggctttgatggaggtgaaaaggccctcatcggcttcagcacctcatttgccgaatacattctgatggatcccagtcccgagtatgcgcccatatttgggctgatgcaggagaagatctacatcagcaagattgtggtggagttcctgcagagcaattccgactcgacctatgaggacctgatcaacaagatcgagaccacggttcctccttctggcctcaacttgaaccgcttcacagaggactccctcctgcgacacgcgcagtttgtggtggagcaggtggagagttatgacgaggccggggacagtgatgagcagcccatcttcctgacaccctgcatgcgggacctgatcaagctggctggggtcacgctgggacagaggcgagcccaggcgaggcggcagaccatcaggcattctaccagggagaaggacaggggacccacgaaagccaccaccaccaagctggtctaccagatcttcgatactttcttcgcagagcaaattgaaaaggatgacagagaagacaaggagaacgcctttaagcgccggcgatgtggcgtctgtgaggtgtgtcagcagcctgagtgtgggaaatgtaaagcctgcaaggacatggttaaatttggtggcagtggacggagcaagcaggcttgccaagagcggaggtgtcccaatatggccatgaaggaggcagatgacgatgaggaagtcgatgataacatcccagagatgccgtcacccaaaaaaatgcaccaggggaagaagaagaaacagaacaagaatcgcatctcttgggtcggagaagccgtcaagactgatgggaagaagagttactataagaaggtgtgcattgatgcggaaaccctggaagtgggggactgtgtctctgttattccagatgattcctcaaaaccgctgtatctagcaagggtcacggcgctgtgggaggacagcagcaacgggcagatgtttcacgcccactggttctgcgctgggacagacacagtcctcggggccacgtcggaccctctggagctgttcttggtggatgaatgtgaggacatgcagctttcatatatccacagcaaagtgaaagtcatctacaaagccccctccgaaaactgggccatggagggaggcatggatcccgagtccctgctggagggggacgacgggaagacctacttctaccagctgtggtatgatcaagactacgcgagattcgagtcccctccaaaaacccagccaacagaggacaacaagttcaaattctgtgtgagctgtgcccgtctggctgagatgaggcaaaaagaaatccccagggtcctggagcagctcgaggacctggatagccgggtcctctactactcagccaccaagaacggcatcctgtaccgagttggtgatggtgtgtacctgccccctgaggccttcacgttcaacatcaagctgtccagtcccgtgaaacgcccacggaaggagcccgtggatgaggacctgtacccagagcactaccggaaatactccgactacatcaaaggcagcaacctggatgcccctgagccctaccgaattggccggatcaaagagatcttctgtcccaagaagagcaacggcaggcccaatgagactgacatcaaaatccgggtcaacaagttctacaggcctgagaacacccacaagtccactccagcgagctaccacgcagacatcaacctgctctactggagcgacgaggaggccgtggtggacttcaaggctgtgcagggccgctgcaccgtggagtatggggaggacctgcccgagtgcgtccaggtgtactccatgggcggccccaaccgcttctacttcctcgaggcctataatgcaaagagcaaaagctttgaagatcctcccaaccatgcccgtagccctggaaacaaagggaagggcaagggaaaagggaagggcaagcccaagtcccaagcctgtgagccgagcgagccagagatagagatcaagctgcccaagctgcggaccctggatgtgttttctggctgcggggggttgtcggagggattccaccaagcaggcatctctgacacgctgtgggccatcgagatgtgggaccctgcggcccaggcgttccggctgaacaaccccggctccacagtgttcacagaggactgcaacatcctgctgaagctggtcatggctggggagaccaccaactcccgcggccagcggctgccccagaagggagacgtggagatgctgtgcggcgggccgccctgccagggcttcagcggcatgaaccgcttcaattcgcgcacctactccaagttcaaaaactctctggtggtttccttcctcagctactgcgactactaccggccccggttcttcctcctggagaatgtcaggaactttgtctccttcaagcgctccatggtcctgaagctcaccctccgctgcctggtccgcatgggctatcagtgcaccttcggcgtgctgcaggccggtcagtacggcgtggcccagactaggaggcgggccatcatcctggccgcggcccctggagagaagctccctctgttcccggagccactgcacgtgtttgctccccgggcctgccagctgagcgtggtggtggatgacaagaagtttgtgagcaacataaccaggttgagctcgggtcctttccggaccatcacggtgcgagacacgatgtccgacctgccggaggtgcggaatggagcctcggcactggagatctcctacaacggggagcctcagtcctggttccagaggcagctccggggcgcacagtaccagcccatcctcagggaccacatctgtaaggacatgagtgcattggtggctgcccgcatgcggcacatccccttggccccagggtcagactggcgcgatctgcccaacatcgaggtgcggctctcagacggcaccatggccaggaagctgcggtatacccaccatgacaggaagaacggccgcagcagctctggggccctccgtggggtctgctcctgcgtggaagccggcaaagcctgcgaccccgcagccaggcagttcaacaccctcatcccctggtgcctgccccacaccgggaaccggcacaaccactgggctggcctctatggaaggctcgagtgggacggcttcttcagcacaaccgtcaccaaccccgagcccatgggcaagcagggccgcgtgctccacccagagcagcaccgtgtggtgagcgtgcgggagtgtgcccgctcccagggcttccctgacacctaccggctcttcggcaacatcctggacaagcaccggcaggtgggcaatgccgtgccaccgcccctggccaaagccattggcttggagatcaagctttgtatgttggccaaagcccgagagagtgcctcagctaaaataaaggaggaggaagctgctaaggactagttctgccctcccgtcacccctgtttctggcaccaggaatccccaacatgcactgatgttgtgtttttaacatgtcaatctgtccgttcacatgtgtggtacatggtgtttgtggccttggctgacatgaagctgttgtgtgaggttcgcttatcaactaatgatttagtgatcaaattgtgcagtactttgtgcattctggattttaaaagttttttattatgcattatatcaaatctaccactgtatgagtggaaattaagactttatgtagtttttatatgttgtaatatttcttcaaataaatctctcctataaacca

SEQ ID NO: 127499 - DNA, 841 bp, Homo sapiens
  Payload ID: 4953
  Gene Symbol: DNMT1
  Gene Name: DNA (cytosine-5-)-methyltransferase 1
  ENST ID: ENST00000588952
  CDS Start-End: 485-841
cccagccccagccgcggccgccctggggacgcagacgccaaggcccctccggccagggccgggagccgggccggcctagccagggtctgactctgtcacccaggctggagtgcagtgacgtaatcacagctcaccgcagccttgacctcctgggctcaagccatcctcccacctcaatctcccaagtaggtggaactacaggctcaaagatttggaaagagacagcttaacagaaaaggaatgtgtgaaggagaaattgaatctcttgcacgaatttctgcaaacagaaataaagaatcagttatgtgacttggaaaccaaattacgtaaagaagaattatccgaggagggctacctggctaaagtcaaatcccttttaaataaagatttgtccttggagaacggtgctcatgcttacaaccgggaagtgaatggacgtctagaaaacgggaaccaagcaagaagtgaagcccgtagagtgggaatggcagatgccaacagcccccccaaacccctttccaaacctcgcacgcccaggaggagcaagtccgatggagaggctaagcctgaaccttcacctagccccaggattacaaggaaaagcaccaggcaaaccaccatcacatctcattttgcaaagggccctgccaaacggaaacctcaggaagagtctgaaagagccaaatcggatgagtccatcaaggaagaagacaaagaccaggatgagaagagacgtagagttacatccagagaacgagttgctagaccgcttcctgcagaagaacctgaaagagcaaaatcaggaacgcgcactgaaaaggaagaagaaagagatgaaaaa

SEQ ID NO: 127500 - DNA, 1775 bp, Homo sapiens
  Payload ID: 4953
  Gene Symbol: DNMT1
  Gene Name: DNA (cytosine-5-)-methyltransferase 1
  ENST ID: ENST00000588913
  CDS Start-End: 1-1169
cctgccagggcttcagcggcatgaaccgcttcaattcgcgcacctactccaagttcaaaaactctctggtggtttccttcctcagctactgcgactactaccggccccggttcttcctcctggagaatgtcaggaactttgtctccttcaagcgctccatggtcctgaagctcaccctccgctgcctggtccgcatgggctatcagtgcaccttcggcgtgctgcaggccggtcagtacggcgtggcccagactaggaggcgggccatcatcctggccgcggcccctggagagaagctccctctgttcccggagccactgcacgtgtttgctccccgggcctgccagctgagcgtggtggtggatgacaagaagtttgtgagcaacataaccaggttgagctcgggtcctttccggaccatcacggtgcgagacacgatgtccgacctgccggaggtgcggaatggagcctcggcactggagatctcctacaacggggagcctcagtcctggttccagaggcagctccggggcgcacagtaccagcccatcctcagggaccacatctgtaaggacatgagtgcattggtggctgcccgcatgcggcacatccccttggccccagggtcagactggcgcgatctgcccaacatcgaggtgcggctctcagacggcaccatggccaggaagctgcggtatacccaccatgacaggaagaacggccgcagcagctctggggccctccgtggggtctgctcctgcgtggaagccggcaaagcctgcgaccccgcagccaggcagttcaacaccctcatcccctggtgcctgccccacaccgggaaccggcacaaccactgggctggcctctatggaaggctcgagtgggacggcttcttcagcacaaccgtcaccaaccccgagcccatgggcaagcagggccgcgtgctccacccagagcagcaccgtgtggtgagcgtgcgggagtgtgcccgctcccagggcttccctgacacctaccggctcttcggcaacatcctggacaagcaccggcaggtcagtggggcggcgcccgctgggtctggacaggaaggaggcttctgtgcctgtcaccaggtggggctggggccagcgcagtcacttccgggaggacgcctgctggctgccgggtagccccatcactctcagtgggaagacggcccacaggagggacagtgctgagacatccgagtcaggctgcgtccctatgctggttccttactgtttgtttttgaggcagagattgagccagaaggacagtccgtcgcgctaaaggagcaggctaaaacccatggtggcgacagctcactcgctgtgggcaatgccgtgccaccgcccctggccaaagccattggcttggagatcaagctttgtatgttggccaaagcccgagagagtgcctcagctaaaataaaggaggaggaagctgctaaggactagttctgccctcccgtcacccctgtttctggcaccaggaatccccaacatgcactgatgttgtgtttttaacatgtcaatctgtccgttcacatgtgtggtacatggtgtttgtggccttggctgacatgaagctgttgtgtgaggttcgcttatcaactaatgatttagtgatcaaattgtgcagtactttgtgcattctggattttaaaagttttttattatgcattatatcaaatctaccactgtatgagtggaaattaagactttatgtagtttttatatgttgtaatatttcttcaa

SEQ ID NO: 127501 - DNA, 672 bp, Homo sapiens
  Payload ID: 4953
  Gene Symbol: DNMT1
  Gene Name: DNA (cytosine-5-)-methyltransferase 1
  ENST ID: ENST00000586799
  CDS Start-End: 1-166
cagcaagattgtggtggagttcctgcagagcaattccgactcgacctatgaggacctgatcaacaagatcgagaggactccctcctgcgacacgcgcagtttgtggtggagcaggtggagagttatgacgaggccggggacagtgatgagcagcccatcttcctgacaccctgcatgcgggacctgatcaagctggctggggtcacgctgggacagaggcgagcccaggcgaggcggcagaccatcaggcattctaccagggagaaggacaggggacccacgaaagccaccaccaccaagctggtctaccagatcttcgatactttcttcgcagagcaaattgaaaaggatgacagagaagacaaggagaacgcctttaagcgccggcgatgtggcgtctgtgaggtgtgtcagcagcctgagtgtgggaaatgtaaagcctgcaaggacatggttaaatttggtggcagtggacggagcaagcaggcttgccaagagcggaggtgtcccaatatggccatgaaggaggcagatgacgatgaggaagtcgatgataacatcccagagatgccgtcacccaaaaaaatgcaccaggggaagaagaagaaacagaacaagaatcgcatctcttgggtcggagaagccgtcaagactgatgggaagaagagttac

SEQ ID NO: 127502 - DNA, 231 bp, Homo sapiens
  Payload ID: 4953
  Gene Symbol: DNMT1
  Gene Name: DNA (cytosine-5-)-methyltransferase 1
  ENST ID: ENST00000590619
  CDS Start-End: 1-231
caggaggagcaagtccgatggagaggctaagcgttcaagagaccctcctgcctcagcctcccaagtaactgggattagagagtcttgctctatcgcccaggatagagtgcaatggcgcgatctcggctcactgcaacctccgcctcccagtttcaagcgattctcctgcctcagcctcccaactgaaccttcacctagccccaggattacaaggaaaagcaccaggcaaac

SEQ ID NO: 127503 - DNA, 591 bp, Homo sapiens
  Payload ID: 4953
  Gene Symbol: DNMT1
  Gene Name: DNA (cytosine-5-)-methyltransferase 1
  ENST ID: ENST00000592054
  CDS Start-End: 378-591
aaaatggaccgtggattcccccgtagctccctggtggctagaaactaggcggggtgggggttctcttttgatccccaaatacagcaagctttgggctcaaagatttggaaagagacagcttaacagaaaaggaatgtgtgaaggagaaattgaatctcttgcacgaatttctgcaaacagaaataaagaatcagttatgtgacttggaaaccaaattacgtaaagaagaattatccgaggagggctacctggctaaagtcaaatcccttttaaataaagatttgtccttggagaacggtgctcatgcttacaaccgggaagtgaatggacgtctagaaaacgggaaccaagcaagaagtgaagcccgtagagtgggaatggcagatgccaacagcccccccaaacccctttccaaacctcgcacgcccaggaggagcaagtccgatggagaggctaagcctgaaccttcacctagccccaggattacaaggaaaagcaccaggcaaaccaccatcacatctcattttgcaaagggccctgccaaacggaaacctcaggaagagtctgaaagagccaaatcggatgagtcca

SEQ ID NO: 127504 - DNA, 9501 bp, Homo sapiens
  Payload ID: 4954
  Gene Symbol: DNMT3A
  Gene Name: DNA (cytosine-5-)-methyltransferase 3 alpha
  Uniprot ID: Q9Y6K1
  ENST ID: ENST00000264709
  CDS Start-End: 339-3077
gcagtgggctctggcggaggtcgggagaactgcagggcgaaggccgccgggggctccgcgggctgcggggggaggcacttgacaccggcccggggagaggaggggccgctgtccctgcggccagtgctggatgcggggacccagcgcagaagcagcgccaggtggagccatcgaagcccccacccacaggctgacagaggcaccgttcaccagagggctcaacaccgggatctatgtttaagttttaactctcgcctccaaagaccacgataattccttccccaaagcccagcagccccccagccccgcgcagccccagcctgcctcccggcgcccagatgcccgccatgccctccagcggccccggggacaccagcagctctgctgcggagcgggaggaggaccgaaaggacggagaggagcaggaggagccgcgtggcaaggaggagcgccaagagcccagcaccacggcacggaaggtggggcggcctgggaggaagcgcaagcaccccccggtggaaagcggtgacacgccaaaggaccctgcggtgatctccaagtccccatccatggcccaggactcaggcgcctcagagctattacccaatggggacttggagaagcggagtgagccccagccagaggaggggagccctgctggggggcagaagggcggggccccagcagagggagagggtgcagctgagaccctgcctgaagcctcaagagcagtggaaaatggctgctgcacccccaaggagggccgaggagcccctgcagaagcgggcaaagaacagaaggagaccaacatcgaatccatgaaaatggagggctcccggggccggctgcggggtggcttgggctgggagtccagcctccgtcagcggcccatgccgaggctcaccttccaggcgggggacccctactacatcagcaagcgcaagcgggacgagtggctggcacgctggaaaagggaggctgagaagaaagccaaggtcattgcaggaatgaatgctgtggaagaaaaccaggggcccggggagtctcagaaggtggaggaggccagccctcctgctgtgcagcagcccactgaccccgcatcccccactgtggctaccacgcctgagcccgtggggtccgatgctggggacaagaatgccaccaaagcaggcgatgacgagccagagtacgaggacggccggggctttggcattggggagctggtgtgggggaaactgcggggcttctcctggtggccaggccgcattgtgtcttggtggatgacgggccggagccgagcagctgaaggcacccgctgggtcatgtggttcggagacggcaaattctcagtggtgtgtgttgagaagctgatgccgctgagctcgttttgcagtgcgttccaccaggccacgtacaacaagcagcccatgtaccgcaaagccatctacgaggtcctgcaggtggccagcagccgcgcggggaagctgttcccggtgtgccacgacagcgatgagagtgacactgccaaggccgtggaggtgcagaacaagcccatgattgaatgggccctggggggcttccagccttctggccctaagggcctggagccaccagaagaagagaagaatccctacaaagaagtgtacacggacatgtgggtggaacctgaggcagctgcctacgcaccacctccaccagccaaaaagccccggaagagcacagcggagaagcccaaggtcaaggagattattgatgagcgcacaagagagcggctggtgtacgaggtgcggcagaagtgccggaacattgaggacatctgcatctcctgtgggagcctcaatgttaccctggaacaccccctcttcgttggaggaatgtgccaaaactgcaagaactgctttctggagtgtgcgtaccagtacgacgacgacggctaccagtcctactgcaccatctgctgtgggggccgtgaggtgctcatgtgcggaaacaacaactgctgcaggtgcttttgcgtggagtgtgtggacctcttggtggggccgggggctgcccaggcagccattaaggaagacccctggaactgctacatgtgcgggcacaagggtacctacgggctgctgcggcggcgagaggactggccctcccggctccagatgttcttcgctaataaccacgaccaggaatttgaccctccaaaggtttacccacctgtcccagctgagaagaggaagcccatccgggtgctgtctctctttgatggaatcgctacagggctcctggtgctgaaggacttgggcattcaggtggaccgctacattgcctcggaggtgtgtgaggactccatcacggtgggcatggtgcggcaccaggggaagatcatgtacgtcggggacgtccgcagcgtcacacagaagcatatccaggagtggggcccattcgatctggtgattgggggcagtccctgcaatgacctctccatcgtcaaccctgctcgcaagggcctctacgagggcactggccggctcttctttgagttctaccgcctcctgcatgatgcgcggcccaaggagggagatgatcgccccttcttctggctctttgagaatgtggtggccatgggcgttagtgacaagagggacatctcgcgatttctcgagtccaaccctgtgatgattgatgccaaagaagtgtcagctgcacacagggcccgctacttctggggtaaccttcccggtatgaacaggccgttggcatccactgtgaatgataagctggagctgcaggagtgtctggagcatggcaggatagccaagttcagcaaagtgaggaccattactacgaggtcaaactccataaagcagggcaaagaccagcattttcctgtcttcatgaatgagaaagaggacatcttatggtgcactgaaatggaaagggtatttggtttcccagtccactatactgacgtctccaacatgagccgcttggcgaggcagagactgctgggccggtcatggagcgtgccagtcatccgccacctcttcgctccgctgaaggagtattttgcgtgtgtgtaagggacatgggggcaaactgaggtagcgacacaaagttaaacaaacaaacaaaaaacacaaaacataataaaacaccaagaacatgaggatggagagaagtatcagcacccagaagagaaaaaggaatttaaaacaaaaaccacagaggcggaaataccggagggctttgccttgcgaaaagggttggacatcatctcctgatttttcaatgttattcttcagtcctatttaaaaacaaaaccaagctcccttcccttcctcccccttcccttttttttcggtcagaccttttattttctactcttttcagaggggttttctgtttgtttgggttttgtttcttgctgtgactgaaacaagaaggttattgcagcaaaaatcagtaacaaaaaatagtaacaataccttgcagaggaaaggtgggagagaggaaaaaaggaaattctatagaaatctatatattgggttgtttttttttttgttttttgttttttttttttgggtttttttttttactatatatcttttttttgttgtctctagcctgatcagataggagcacaagcaggggacggaaagagagagacactcaggcggcagcattccctcccagccactgagctgtcgtgccagcaccattcctggtcacgcaaaacagaacccagttagcagcagggagacgagaacaccacacaagacatttttctacagtatttcaggtgcctaccacacaggaaaccttgaagaaaatcagtttctagaagccgctgttacctcttgtttacagtttatatatatatgatagatatgagatatatatataaaaggtactgttaactactgtacaacccgacttcataatggtgctttcaaacagcgagatgagtaaaaacatcagcttccacgttgccttctgcgcaaagggtttcaccaaggatggagaaagggagacagcttgcagatggcgcgttctcacggtgggctcttccccttggtttgtaacgaagtgaaggaggagaacttgggagccaggttctccctgccaaaaagggggctagatgaggtggtcgggcccgtggacagctgagagtgggattcatccagactcatgcaataaccctttgattgttttctaaaaggagactccctcggcaagatggcagagggtacggagtcttcaggcccagtttctcactttagccaattcgagggctccttgtggtgggatcagaactaatccagagtgtgggaaagtgacagtcaaaaccccacctggagcaaataaaaaaacatacaaaacgtactggtgctttcctgtctaagtcgccttttgtgtgttcttttatgaggcccccaccatccacccctctgtgcacaaggcggctcccggcccctggaatgtgatgtttttggtcatctccaaaggctgcagttttatactgggaggctgatgacaccttttattataattattcttatggttctggttataattatgtttgttttaagattttctttaagaaaacaaaaacccaacacccttccctttaggtttcaaaccaaggtgcgggagcagggtgcttctgagttagcggtggctctggtgccctggctcccacccctcgggccaggtgggccactgggcatggtgacagctgggcggccagggagtccccaaggtctgccttctgggcttgtcactcttctcttctacttcccctcctcttgagtcgggtgtgtcagggctggagggaggaccggccgtctctctccttgtgtgtgtgattggagtggtgtgtatttcttttctagtacttggtctgatgatagctgtgctcttacctcgagtcagcagcacctggagccccaagtgctcaacactttgttctacttcctacaaggcaggcggcctggcgtcagtagtaggaagggatggcattgttggctccagggtgagggcccgacgggcaggtgcttgcctgggtagatggggtgtagatatgtggcatatagagatatatattttataatgggaggggggatggcacctcctgggactggtagagctgggaggtgtgtcggcaagcacatggccccaagtccacgtccctagaaagatggggcctacagtgataggcgctctataaatacatagatagggtcatgtttaagaaatattatggggtggggagtgggggaagcaggcttagtgtgctgagcctcggtccccactgcagacctaaaccccacaccaatcagtcaatctcacacgcatacacaggagcatatttctgtactgatgcataatgaatgcactcacacacacacacacacgccagggggctcccagcactcttctcccagggttcaggactttgtggagtcagcccgtgcagctatttacctctgttgccctgattgcaggtagactgtcaatcccagaagttgctaggtgctgaggcaggaaaaggaggaggtttcttttagcaggtgctctcctctagcaggtagtgttctatctcttttgcccctggtgatgtcaaaagattcttctgttagcaacctgtgatactgacctgcaactctaggcaccagtcaagtcagccctcaactccccctacctattctccccaactgaaatcaaattgacatccaggtctgtcttggccagggggcttccattggggaaaaaaaatgggacagtgaacctcacctattgaataaaccaaattagtaattagtgacaaaaccaaaccaaggctttggaccccctgctcattactcaggagtaaattcacacagctggtggccggtctcacccctttttggggtgcttggtcctggaccccaatctactgtctcctcgacagattggtgtttaagatcatgcccagttgcttcctgtcacctcttgacaggtggtgactgggctgctgtggggctggagcagcgaggaagggagcctctgccccctcagtggagtccctgtgctaactgtggtgctcacccagctcctccttgctcccgcggggctctgtccttcgggcctggagtccaccagcgccactccaggagggctgggggaggaggggctgcctcaggcagtccaaggtgctccctcccccgctggccaatgctaaggtcttcccggctcccagggtcaggacagagtcttctaaggctcaggctctcccaagccactgcttagtgacagttagcctttcccagcggcccaagctccaccggaactgggcctggtgctccaaccaaagggttggtgttgggacttgggaagagacttggtagccaagggcatggcaagcctgggggattcctgtgggccggcttgctcgaggagggagtgctgggcacagaggagcccttatggctgacagcttgagagcacttgttcctccagatctagccacttgaccaggccctagaatggaccagatgccccaggggtcatggcccccccccccccccccttgcagggacgagagttaacaatcaccagcttttcttccggcccagcctgtgtgcttggtctcacagtagaatttaggagagtgtggggctttgggattgtgccaacttggccaagctgagatatgcttaatccacctcaacgctggggcctctggggacaggtattgggtcaccttccaaggggtgctgaacttcagcaggctgtagataaggcagaggttagaggcagtggagtgggggaaccaagaaggcctagggaaaattgccaggcatattccctgtggaattttctttccgaagagtaggcccatttcccccttagaaacaagggttctgggggctgatgacagcttcccctgcaggtgccaggtggcgcatgatgccaaagagatccgtggctcttgcctgggggaggtagccaggtgctcgtgctggggacacagtccttggcctcctgcctaagcaggaagctagtttccagcaggcggctggtactaaccccccgccccacgggagcgacaggctggtgcaccggcagactggggggccgcaggcgggcactagcaggggtctgcagtccatagatgatgacatgaatctgttgctgtccttttgtctctaggccccagagacttcttgctattgaacatcctattggaaagcaaactttccaagagagcacccgggacctgttagcttttgaaacaggcctgggtgtgattgactggtagagatgcctgtgtgatttttggcgcattgcaggagtgtggattgggacaggcaccccagcaggaaggaaggctgacaccaaaggggtctcacagggcccagctccccttgcttcccgataattggccaccaggccatggcgactctggggaagcctagatgggaacacccaccttctccagcagtagaaggaatatttcagcagagccatctgggagatgttcttataggaaaactgcagtcattcatttcatagttttgcttatataaatagagtacatttgggaggcagttttgaattcctgttgctactctgcttggtgcggagttgcagtggccccaagtgtctttcagagctgttgcttttaggatccccctcaagctgtgggttagggccagggcagggagggggtgctgcctggcactgtgccctgaagagggctgcttgcttcctttggtcgggagcacggcagagccaacattctggtgggaaccgagtttctagccaggcccctgttttggtcccgggaggtgagtaatctgagtttgtcattgcgtattctccacgctgcctgctctcagtgctggagactagagagcgaccctggagttgtcctctgggagtcctgcctgtttgccagggagcagctgaaacctccccgctcccaatcccgggggtggaaaaggtgtagtggaggaatggtctggagctgggatggcccttctggccatgccctgctgagccaggattaaggaaagtgtcagccgcctccttaccaggccctgtgctggggtcaggaggaccgggaggagagggaaggggtgagaggatggactctgctgttgtagtgtgagctctggaatctttacgttttggtaaaggcaggccagggtctttgaggatcgagttggggaaccttgcctctgtgtttccgagacccagctaaggtgggcctttggtgggtgacctgtctctgacccgaggcagcagagttttgggggagggagaaacaagcaaggagcagggaggacaaggacacaagatccctttgctggtggtgacttactcacttcccccaccagagggcctgggactcccgaaactcccgtaactggaaagctccctggctcagctccactggggggtgaggagggcggctccctcagccccagcctagcggcctccaaccctgtgcctgagaacatgagcagcggtctaaagcatcccctagtcccatttcacttcacagaccgatttggttgcacagccctagaattcaacagacaacaaaaatgctgaaattccttagaatacgcagagggaggaggtgactcaccaaggtgctaaaacattttattaaaaatatatattgttaaattaagtctgctgtctggacaatgactgtttgttttgttttcttgtagtggagtttaaaagagactattattttactctgatatattattattaaaaaggcattttaactttgtacttgaaaactaaatgagcgatttcatgtgttttagctgaggcattgaagtagcgggtgcttacttatttgtgggaaatcatgtattcatactgaagaataaactccgtagctgatttggtaataacttttactgttacagacgatttcgctttgaccccggtggcagagcacttttactccacattccacgcagctaaatgcaggacttcccagactcttccctccccagccctctttcctttctcttaagttcctcttttctcctttattattattatttttttttcctggttccagcatcctttcaccactgtattttttttttttttttttttttttttttttttttttttttttttttttttttagggttgcttctctatttattgacaataataatgtacatttcacagtctggttctaggacattcagggaagggcgagtgggggcccgaggggtccctgccccacccgcctggtgtcctgttgtatctctgtgtaagtgatgctcgtgacatagctgtttatgaaataattaaagaggtcaatgcgtacaacagatgtagaaagtctgtcagttccgccttcatcacatttttttttgtgcccagaagaatataataaagctcctttctaatgtacttgtgctggagaacacttgaataaatggactgtttttgtgcaaaaagaaaaatggaaaagcaccgtaataa

SEQ ID NO: 127505 - DNA, 4279 bp, Homo sapiens
  Payload ID: 4954
  Gene Symbol: DNMT3A
  Gene Name: DNA (cytosine-5-)-methyltransferase 3 alpha
  Uniprot ID: Q9Y6K1
  ENST ID: ENST00000321117
  CDS Start-End: 238-2976
gacgcggcgccgcggcaccagggcgcgcagccgggccggcccgaccccaccggccatacggtggagccatcgaagcccccacccacaggctgacagaggcaccgttcaccagagggctcaacaccgggatctatgtttaagttttaactctcgcctccaaagaccacgataattccttccccaaagcccagcagccccccagccccgcgcagccccagcctgcctcccggcgcccagatgcccgccatgccctccagcggccccggggacaccagcagctctgctgcggagcgggaggaggaccgaaaggacggagaggagcaggaggagccgcgtggcaaggaggagcgccaagagcccagcaccacggcacggaaggtggggcggcctgggaggaagcgcaagcaccccccggtggaaagcggtgacacgccaaaggaccctgcggtgatctccaagtccccatccatggcccaggactcaggcgcctcagagctattacccaatggggacttggagaagcggagtgagccccagccagaggaggggagccctgctggggggcagaagggcggggccccagcagagggagagggtgcagctgagaccctgcctgaagcctcaagagcagtggaaaatggctgctgcacccccaaggagggccgaggagcccctgcagaagcgggcaaagaacagaaggagaccaacatcgaatccatgaaaatggagggctcccggggccggctgcggggtggcttgggctgggagtccagcctccgtcagcggcccatgccgaggctcaccttccaggcgggggacccctactacatcagcaagcgcaagcgggacgagtggctggcacgctggaaaagggaggctgagaagaaagccaaggtcattgcaggaatgaatgctgtggaagaaaaccaggggcccggggagtctcagaaggtggaggaggccagccctcctgctgtgcagcagcccactgaccccgcatcccccactgtggctaccacgcctgagcccgtggggtccgatgctggggacaagaatgccaccaaagcaggcgatgacgagccagagtacgaggacggccggggctttggcattggggagctggtgtgggggaaactgcggggcttctcctggtggccaggccgcattgtgtcttggtggatgacgggccggagccgagcagctgaaggcacccgctgggtcatgtggttcggagacggcaaattctcagtggtgtgtgttgagaagctgatgccgctgagctcgttttgcagtgcgttccaccaggccacgtacaacaagcagcccatgtaccgcaaagccatctacgaggtcctgcaggtggccagcagccgcgcggggaagctgttcccggtgtgccacgacagcgatgagagtgacactgccaaggccgtggaggtgcagaacaagcccatgattgaatgggccctggggggcttccagccttctggccctaagggcctggagccaccagaagaagagaagaatccctacaaagaagtgtacacggacatgtgggtggaacctgaggcagctgcctacgcaccacctccaccagccaaaaagccccggaagagcacagcggagaagcccaaggtcaaggagattattgatgagcgcacaagagagcggctggtgtacgaggtgcggcagaagtgccggaacattgaggacatctgcatctcctgtgggagcctcaatgttaccctggaacaccccctcttcgttggaggaatgtgccaaaactgcaagaactgctttctggagtgtgcgtaccagtacgacgacgacggctaccagtcctactgcaccatctgctgtgggggccgtgaggtgctcatgtgcggaaacaacaactgctgcaggtgcttttgcgtggagtgtgtggacctcttggtggggccgggggctgcccaggcagccattaaggaagacccctggaactgctacatgtgcgggcacaagggtacctacgggctgctgcggcggcgagaggactggccctcccggctccagatgttcttcgctaataaccacgaccaggaatttgaccctccaaaggtttacccacctgtcccagctgagaagaggaagcccatccgggtgctgtctctctttgatggaatcgctacagggctcctggtgctgaaggacttgggcattcaggtggaccgctacattgcctcggaggtgtgtgaggactccatcacggtgggcatggtgcggcaccaggggaagatcatgtacgtcggggacgtccgcagcgtcacacagaagcatatccaggagtggggcccattcgatctggtgattgggggcagtccctgcaatgacctctccatcgtcaaccctgctcgcaagggcctctacgagggcactggccggctcttctttgagttctaccgcctcctgcatgatgcgcggcccaaggagggagatgatcgccccttcttctggctctttgagaatgtggtggccatgggcgttagtgacaagagggacatctcgcgatttctcgagtccaaccctgtgatgattgatgccaaagaagtgtcagctgcacacagggcccgctacttctggggtaaccttcccggtatgaacaggccgttggcatccactgtgaatgataagctggagctgcaggagtgtctggagcatggcaggatagccaagttcagcaaagtgaggaccattactacgaggtcaaactccataaagcagggcaaagaccagcattttcctgtcttcatgaatgagaaagaggacatcttatggtgcactgaaatggaaagggtatttggtttcccagtccactatactgacgtctccaacatgagccgcttggcgaggcagagactgctgggccggtcatggagcgtgccagtcatccgccacctcttcgctccgctgaaggagtattttgcgtgtgtgtaagggacatgggggcaaactgaggtagcgacacaaagttaaacaaacaaacaaaaaacacaaaacataataaaacaccaagaacatgaggatggagagaagtatcagcacccagaagagaaaaaggaatttaaaacaaaaaccacagaggcggaaataccggagggctttgccttgcgaaaagggttggacatcatctcctgatttttcaatgttattcttcagtcctatttaaaaacaaaaccaagctcccttcccttcctcccccttcccttttttttcggtcagaccttttattttctactcttttcagaggggttttctgtttgtttgggttttgtttcttgctgtgactgaaacaagaaggttattgcagcaaaaatcagtaacaaaaaatagtaacaataccttgcagaggaaaggtgggagagaggaaaaaaggaaattctatagaaatctatatattgggttgtttttttttttgttttttgttttttttttttgggtttttttttttactatatatcttttttttgttgtctctagcctgatcagataggagcacaagcaggggacggaaagagagagacactcaggcggcagcattccctcccagccactgagctgtcgtgccagcaccattcctggtcacgcaaaacagaacccagttagcagcagggagacgagaacaccacacaagacatttttctacagtatttcaggtgcctaccacacaggaaaccttgaagaaaatcagtttctagaagccgctgttacctcttgtttacagtttatatatatatgatagatatgagatatatatataaaaggtactgttaactactgtacaacccgacttcataatggtgctttcaaacagcgagatgagtaaaaacatcagcttccacgttgccttctgcgcaaagggtttcaccaaggatggagaaagggagacagcttgcagatggcgcgttctcacggtgggctcttccccttggtttgtaacgaagtgaaggaggagaacttgggagccaggttctccctgccaaaaagggggctagatgaggtggtcgggcccgtggacagctgagagtgggattcatccagactcatgcaataaccctttgattgttttctaaaaggagactccctcggcaagatggcagagggtacggagtcttcaggcccagtttctcactttagccaattcgagggctccttgtggtgggatcagaactaatccagagtgtgggaaagtgacagtcaaaaccccacctggagcaaataaaaaaacatacaaaacgta

SEQ ID NO: 127506 - DNA, 3589 bp, Homo sapiens
  Payload ID: 4954
  Gene Symbol: DNMT3A
  Gene Name: DNA (cytosine-5-)-methyltransferase 3 alpha
  Uniprot ID: Q9Y6K1
  ENST ID: ENST00000380746
  CDS Start-End: 115-2286
ccgcccccagccccatcgcccccttcccctcccccaagacgggcagctacttccagagcttcagggccgcggctcacacctgagcgcgactgcagaggggctgcacctggccttatggggatcctggagcgggttgtgagaaggaatgggcgcgtggatcgtagcctgaaagacgagtgtgatacggctgagaagaaagccaaggtcattgcaggaatgaatgctgtggaagaaaaccaggggcccggggagtctcagaaggtggaggaggccagccctcctgctgtgcagcagcccactgaccccgcatcccccactgtggctaccacgcctgagcccgtggggtccgatgctggggacaagaatgccaccaaagcaggcgatgacgagccagagtacgaggacggccggggctttggcattggggagctggtgtgggggaaactgcggggcttctcctggtggccaggccgcattgtgtcttggtggatgacgggccggagccgagcagctgaaggcacccgctgggtcatgtggttcggagacggcaaattctcagtggtgtgtgttgagaagctgatgccgctgagctcgttttgcagtgcgttccaccaggccacgtacaacaagcagcccatgtaccgcaaagccatctacgaggtcctgcaggtggccagcagccgcgcggggaagctgttcccggtgtgccacgacagcgatgagagtgacactgccaaggccgtggaggtgcagaacaagcccatgattgaatgggccctggggggcttccagccttctggccctaagggcctggagccaccagaagaagagaagaatccctacaaagaagtgtacacggacatgtgggtggaacctgaggcagctgcctacgcaccacctccaccagccaaaaagccccggaagagcacagcggagaagcccaaggtcaaggagattattgatgagcgcacaagagagcggctggtgtacgaggtgcggcagaagtgccggaacattgaggacatctgcatctcctgtgggagcctcaatgttaccctggaacaccccctcttcgttggaggaatgtgccaaaactgcaagaactgctttctggagtgtgcgtaccagtacgacgacgacggctaccagtcctactgcaccatctgctgtgggggccgtgaggtgctcatgtgcggaaacaacaactgctgcaggtgcttttgcgtggagtgtgtggacctcttggtggggccgggggctgcccaggcagccattaaggaagacccctggaactgctacatgtgcgggcacaagggtacctacgggctgctgcggcggcgagaggactggccctcccggctccagatgttcttcgctaataaccacgaccaggaatttgaccctccaaaggtttacccacctgtcccagctgagaagaggaagcccatccgggtgctgtctctctttgatggaatcgctacagggctcctggtgctgaaggacttgggcattcaggtggaccgctacattgcctcggaggtgtgtgaggactccatcacggtgggcatggtgcggcaccaggggaagatcatgtacgtcggggacgtccgcagcgtcacacagaagcatatccaggagtggggcccattcgatctggtgattgggggcagtccctgcaatgacctctccatcgtcaaccctgctcgcaagggcctctacgagggcactggccggctcttctttgagttctaccgcctcctgcatgatgcgcggcccaaggagggagatgatcgccccttcttctggctctttgagaatgtggtggccatgggcgttagtgacaagagggacatctcgcgatttctcgagtccaaccctgtgatgattgatgccaaagaagtgtcagctgcacacagggcccgctacttctggggtaaccttcccggtatgaacaggccgttggcatccactgtgaatgataagctggagctgcaggagtgtctggagcatggcaggatagccaagttcagcaaagtgaggaccattactacgaggtcaaactccataaagcagggcaaagaccagcattttcctgtcttcatgaatgagaaagaggacatcttatggtgcactgaaatggaaagggtatttggtttcccagtccactatactgacgtctccaacatgagccgcttggcgaggcagagactgctgggccggtcatggagcgtgccagtcatccgccacctcttcgctccgctgaaggagtattttgcgtgtgtgtaagggacatgggggcaaactgaggtagcgacacaaagttaaacaaacaaacaaaaaacacaaaacataataaaacaccaagaacatgaggatggagagaagtatcagcacccagaagagaaaaaggaatttaaaacaaaaaccacagaggcggaaataccggagggctttgccttgcgaaaagggttggacatcatctcctgatttttcaatgttattcttcagtcctatttaaaaacaaaaccaagctcccttcccttcctcccccttcccttttttttcggtcagaccttttattttctactcttttcagaggggttttctgtttgtttgggttttgtttcttgctgtgactgaaacaagaaggttattgcagcaaaaatcagtaacaaaaaatagtaacaataccttgcagaggaaaggtgggagagaggaaaaaaggaaattctatagaaatctatatattgggttgtttttttttttgttttttgttttttttttttgggtttttttttttactatatatcttttttttgttgtctctagcctgatcagataggagcacaagcaggggacggaaagagagagacactcaggcggcagcattccctcccagccactgagctgtcgtgccagcaccattcctggtcacgcaaaacagaacccagttagcagcagggagacgagaacaccacacaagacatttttctacagtatttcaggtgcctaccacacaggaaaccttgaagaaaatcagtttctagaagccgctgttacctcttgtttacagtttatatatatatgatagatatgagatatatatataaaaggtactgttaactactgtacaacccgacttcataatggtgctttcaaacagcgagatgagtaaaaacatcagcttccacgttgccttctgcgcaaagggtttcaccaaggatggagaaagggagacagcttgcagatggcgcgttctcacggtgggctcttccccttggtttgtaacgaagtgaaggaggagaacttgggagccaggttctccctgccaaaaagggggctagatgaggtggtcgggcccgtggacagctgagagtgggattcatccagactcatgcaataaccctttgattgttttctaaaaggagactccctcggcaagatggcagagggtacggagtcttcaggcccagtttctcactttagccaattcgagggctccttgtggtgggatcagaactaatccagagtgtgggaaagtgacagtcaaaaccccacctggagcaaataaaaaaacatacaaaacgta

SEQ ID NO: 127507 - DNA, 4477 bp, Homo sapiens
  Payload ID: 4954
  Gene Symbol: DNMT3A
  Gene Name: DNA (cytosine-5-)-methyltransferase 3 alpha
  ENST ID: ENST00000380756
  CDS Start-End: 238-2583
ggggccgctgtccctgcggccagtgctggatgcggggacccagcgcagaagcagcgccaggtggagccatcgaagcccccacccacaggctgacagaggcaccgttcaccagagggctcaacaccgggatctatgtttaagttttaactctcgcctccaaagaccacgataattccttccccaaagcccagcagccccccagccccgcgcagccccagcctgcctcccggcgcccagatgcccgccatgccctccagcggccccggggacaccagcagctctgctgcggagcgggaggaggaccgaaaggacggagaggagcaggaggagccgcgtggcaaggaggagcgccaagagcccagcaccacggcacggaaggtggggcggcctgggaggaagcgcaagcaccccccggtggaaagcggtgacacgccaaaggaccctgcggtgatctccaagtccccatccatggcccaggactcaggcgcctcagagctattacccaatggggacttggagaagcggagtgagccccagccagaggaggggagccctgctggggggcagaagggcggggccccagcagagggagagggtgcagctgagaccctgcctgaagcctcaagagcagtggaaaatggctgctgcacccccaaggagggccgaggagcccctgcagaagcgggcaaagaacagaaggagaccaacatcgaatccatgaaaatggagggctcccggggccggctgcggggtggcttgggctgggagtccagcctccgtcagcggcccatgccgaggctcaccttccaggcgggggacccctactacatcagcaagcgcaagcgggacgagtggctggcacgctggaaaagggaggctgagaagaaagccaaggtcattgcaggaatgaatgctgtggaagaaaaccaggggcccggggagtctcagaaggtggaggaggccagccctcctgctgtgcagcagcccactgaccccgcatcccccactgtggctaccacgcctgagcccgtggggtccgatgctggggacaagaatgccaccaaagcaggcgatgacgagccagagtacgaggacggccggggctttggcattggggagctggtgtgggggaaactgcggggcttctcctggtggccaggccgcattgtgtcttggtggatgacgggccggagccgagcagctgaaggcacccgctgggtcatgtggttcggagacggcaaattctcagtggtgtgtgttgagaagctgatgccgctgagctcgttttgcagtgcgttccaccaggccacgtacaacaagcagcccatgtaccgcaaagccatctacgaggtcctgcaggtggccagcagccgcgcggggaagctgttcccggtgtgccacgacagcgatgagagtgacactgccaaggccgtggaggtgcagaacaagcccatgattgaatgggccctggggggcttccagccttctggccctaagggcctggagccaccagaagaagagaagaatccctacaaagaagtgtacacggacatgtgggtggaacctgaggcagctgcctacgcaccacctccaccagccaaaaagccccggaagagcacagcggagaagcccaaggtcaaggagattattgatgagcgcacaagagagcggctggtgtacgaggtgcggcagaagtgccggaacattgaggacatctgcatctcctgtgggagcctcaatgttaccctggaacaccccctcttcgttggaggaatgtgccaaaactgcaagaactgctttctggagtgtgcgtaccagtacgacgacgacggctaccagtcctactgcaccatctgctgtgggggccgtgaggtgctcatgtgcggaaacaacaactgctgcaggtgcttttgcgtggagtgtgtggacctcttggtggggccgggggctgcccaggcagccattaaggaagacccctggaactgctacatgtgcgggcacaagggtacctacgggctgctgcggcggcgagaggactggccctcccggctccagatgttcttcgctaataaccacgaccaggaatttgaccctccaaaggtttacccacctgtcccagctgagaagaggaagcccatccgggtgctgtctctctttgatggaatcgctacagggctcctggtgctgaaggacttgggcattcaggtggaccgctacattgcctcggaggtgtgtgaggactccatcacggtgggcatggtgcggcaccaggggaagatcatgtacgtcggggacgtccgcagcgtcacacagaagcatatccaggagtggggcccattcgatctggtgattgggggcagtccctgcaatgacctctccatcgtcaaccctgctcgcaagggcctctacgagggcactggccggctcttctttgagttctaccgcctcctgcatgatgcgcggcccaaggagggagatgatcgccccttcttctggctctttgagaatgtggtggccatgggcgttagtgacaagagggacatctcgcgatttctcgaggtacaaaatagccacctgtactagtgggctagtggccactgaattgaacagtgtagaggacaacccaccatcgcagaagttcatttggacaatgctgatctagaacgttccagtgacagcttgtggaatgtggctaggtgtaattccagcttctcctggaggctgcaggctagcccagtgtgtggctcctgagagagaatccaaccctgtgatgattgatgccaaagaagtgtcagctgcacacagggcccgctacttctggggtaaccttcccggtatgaacaggccgttggcatccactgtgaatgataagctggagctgcaggagtgtctggagcatggcaggatagccaagttcagcaaagtgaggaccattactacgaggtcaaactccataaagcagggcaaagaccagcattttcctgtcttcatgaatgagaaagaggacatcttatggtgcactgaaatggaaagggtatttggtttcccagtccactatactgacgtctccaacatgagccgcttggcgaggcagagactgctgggccggtcatggagcgtgccagtcatccgccacctcttcgctccgctgaaggagtattttgcgtgtgtgtaagggacatgggggcaaactgaggtagcgacacaaagttaaacaaacaaacaaaaaacacaaaacataataaaacaccaagaacatgaggatggagagaagtatcagcacccagaagagaaaaaggaatttaaaacaaaaaccacagaggcggaaataccggagggctttgccttgcgaaaagggttggacatcatctcctgatttttcaatgttattcttcagtcctatttaaaaacaaaaccaagctcccttcccttcctcccccttcccttttttttcggtcagaccttttattttctactcttttcagaggggttttctgtttgtttgggttttgtttcttgctgtgactgaaacaagaaggttattgcagcaaaaatcagtaacaaaaaatagtaacaataccttgcagaggaaaggtgggagagaggaaaaaaggaaattctatagaaatctatatattgggttgtttttttttttgttttttgttttttttttttgggtttttttttttactatatatcttttttttgttgtctctagcctgatcagataggagcacaagcaggggacggaaagagagagacactcaggcggcagcattccctcccagccactgagctgtcgtgccagcaccattcctggtcacgcaaaacagaacccagttagcagcagggagacgagaacaccacacaagacatttttctacagtatttcaggtgcctaccacacaggaaaccttgaagaaaatcagtttctagaagccgctgttacctcttgtttacagtttatatatatatgatagatatgagatatatatataaaaggtactgttaactactgtacaacccgacttcataatggtgctttcaaacagcgagatgagtaaaaacatcagcttccacgttgccttctgcgcaaagggtttcaccaaggatggagaaagggagacagcttgcagatggcgcgttctcacggtgggctcttccccttggtttgtaacgaagtgaaggaggagaacttgggagccaggttctccctgccaaaaagggggctagatgaggtggtcgggcccgtggacagctgagagtgggattcatccagactcatgcaataaccctttgattgttttctaaaaggagactccctcggcaagatggcagagggtacggagtcttcaggcccagtttctcactttagccaattcgagggctccttgtggtgggatcagaactaatccagagtgtgggaaagtgacagtcaaaaccccacctggagcaaataaaaaaacatacaaaacgt

SEQ ID NO: 127508 - DNA, 2300 bp, Homo sapiens
  Payload ID: 4954
  Gene Symbol: DNMT3A
  Gene Name: DNA (cytosine-5-)-methyltransferase 3 alpha
  ENST ID: ENST00000402667
  CDS Start-End: 149-2218
ccgcccccagccccatcgcccccttcccctcccccaagacgggcagctacttccagagcttcagggccgcggctcacacctgagcgcgactgcagaggggctgcacctggccttatgggctgagaagaaagccaaggtcattgcaggaatgaatgctgtggaagaaaaccaggggcccggggagtctcagaaggtggaggaggccagccctcctgctgtgcagcagcccactgaccccgcatcccccactgtggctaccacgcctgagcccgtggggtccgatgctggggacaagaatgccaccaaagcaggcgatgacgagccagagtacgaggacggccggggctttggcattggggagctggtgtgggggaaactgcggggcttctcctggtggccaggccgcattgtgtcttggtggatgacgggccggagccgagcagctgaaggcacccgctgggtcatgtggttcggagacggcaaattctcagtggtgtgtgttgagaagctgatgccgctgagctcgttttgcagtgcgttccaccaggccacgtacaacaagcagcccatgtaccgcaaagccatctacgaggtcctgcaggtggccagcagccgcgcggggaagctgttcccggtgtgccacgacagcgatgagagtgacactgccaaggccgtggaggtgcagaacaagcccatgattgaatgggccctggggggcttccagccttctggccctaagggcctggagccaccagaagaagagaagaatccctacaaagaagtgtacacggacatgtgggtggaacctgaggcagctgcctacgcaccacctccaccagccaaaaagccccggaagagcacagcggagaagcccaaggtcaaggagattattgatgagcgcacaagagagcggctggtgtacgaggtgcggcagaagtgccggaacattgaggacatctgcatctcctgtgggagcctcaatgttaccctggaacaccccctcttcgttggaggaatgtgccaaaactgcaagaactgctttctggagtgtgcgtaccagtacgacgacgacggctaccagtcctactgcaccatctgctgtgggggccgtgaggtgctcatgtgcggaaacaacaactgctgcaggtgcttttgcgtggagtgtgtggacctcttggtggggccgggggctgcccaggcagccattaaggaagacccctggaactgctacatgtgcgggcacaagggtacctacgggctgctgcggcggcgagaggactggccctcccggctccagatgttcttcgctaataaccacgaccaggaatttgaccctccaaaggtttacccacctgtcccagctgagaagaggaagcccatccgggtgctgtctctctttgatggaatcgctacagggctcctggtgctgaaggacttgggcattcaggtggaccgctacattgcctcggaggtgtgtgaggactccatcacggtgggcatggtgcggcaccaggggaagatcatgtacgtcggggacgtccgcagcgtcacacagaagcatatccaggagtggggcccattcgatctggtgattgggggcagtccctgcaatgacctctccatcgtcaaccctgctcgcaagggcctctacgagggcactggccggctcttctttgagttctaccgcctcctgcatgatgcgcggcccaaggagggagatgatcgccccttcttctggctctttgagaatgtggtggccatgggcgttagtgacaagagggacatctcgcgatttctcgagtccaaccctgtgatgattgatgccaaagaagtgtcagctgcacacagggcccgctacttctggggtaaccttcccggtatgaacaggccgttggcatccactgtgaatgataagctggagctgcaggagtgtctggagcatggcaggatagccaagttcagcaaagtgaggaccattactacgaggtcaaactccataaagcagggcaaagaccagcattttcctgtcttcatgaatgagaaagaggacatcttatggtgcactgaaatggaaagggtatttggtttcccagtccactatactgacgtctccaacatgagccgcttggcgaggcagagactgctgggccggtcatggagcgtgccagtcatccgccacctcttcgctccgctgaaggagtattttgcgtgtgtgtaagggacatgggggcaaactgaggtagcgacacaaagttaaacaaacaaacaaaaaacacaaaacataataaaacaccaagaac

SEQ ID NO: 127509 - DNA, 1775 bp, Homo sapiens
  Payload ID: 4954
  Gene Symbol: DNMT3A
  Gene Name: DNA (cytosine-5-)-methyltransferase 3 alpha
  Uniprot ID: Q9Y6K1
  ENST ID: ENST00000406659
  CDS Start-End: 339-839
gcagtgggctctggcggaggtcgggagaactgcagggcgaaggccgccgggggctccgcgggctgcggggggaggcacttgacaccggcccggggagaggaggggccgctgtccctgcggccagtgctggatgcggggacccagcgcagaagcagcgccaggtggagccatcgaagcccccacccacaggctgacagaggcaccgttcaccagagggctcaacaccgggatctatgtttaagttttaactctcgcctccaaagaccacgataattccttccccaaagcccagcagccccccagccccgcgcagccccagcctgcctcccggcgcccagatgcccgccatgccctccagcggccccggggacaccagcagctctgctgcggagcgggaggaggaccgaaaggacggagaggagcaggaggagccgcgtggcaaggaggagcgccaagagcccagcaccacggcacggaaggtggggcggcctgggaggaagcgcaagcaccccccggtggaaagcggtgacacgccaaaggaccctgcggtgatctccaagtccccatccatggcccaggactcaggcgcctcagagctattacccaatggggacttggagaagcggagtgagccccagccagaggaggggagccctgctggggggcagaagggcggggccccagcagagggagagggtgcagctgagaccctgcctgaagcctcaagagcagtggaaaatggctgctgcacccccaaggagggccgaggagcccctgcagaagcgggtgagtcctcagcaccaggggcagcctcttctgggcccaccagcataccctgagagtcagggacttggctctccagcaggtcccaggaaggatggtctgggtcgtggctaaaggtctgcttgccaaggctatggcctggaggctactggctggatgcagcctgcgcatatgttttatttggcccatagagtgttttaaacatttaaaaaattagttgccagtatttaaaaatcaaaaaatttcacataaaaatctggagttttggcttctcatgaaaaaaaaaaaagctagatctggcaacagcgggctttcataacgccaacgattgctagactgggataatggcggtccctccatcgccttctgtggctggttgtgggccttagttttctgcagctctacctggcctgcttactctcccacgtgccatgcagttcctgggggttgctgtatttgtagcccctggcctgggcactcaagggcagcagataccctgtttgcctccctgagtgcagaggtcctgagcccaccctagttgggctgactcaactggaaatttggttgtgacagtggcgtggggagagggctgggtgattgtattctgtgtactgcccagcccaggcctcttcatctggggactttttggcctaaccctggaagcctggaaagttgcccacttttctctttcaggttaagccagcaatttcagggccaaccgagctgtaaacatgttagtaatgaggacaactagcatttgtacagggcttcacagtttacaaagcgctttctcatacattatcacatttgatcctcccagggccctgccaggttgttttgcatatgtgcattttaatttcaaaaagtcttccttccaagcgtgtatgatgaaatgagtaaattgattaattggcgtaacttattttgcatggatccaacctaatgttcatgcaggatagagaacatttccagaatacaaatttccaaactta

SEQ ID NO: 127510 - DNA, 4255 bp, Homo sapiens
  Payload ID: 4955
  Gene Symbol: DNMT3B
  Gene Name: DNA (cytosine-5-)-methyltransferase 3 beta
  Uniprot ID: Q9UBC3
  ENST ID: ENST00000201963
  CDS Start-End: 265-2802
gaagggagagagcaaacaaaggggtcaggagggaaaataatgcactggcttcctgagcccctgcagaggctgagcagggagagggggccagggccagaggggacagaggctggcggcagacgggccgggacaggcaggtcctaaatggcattgtttgaaggggccggctaattgcacagagcagtctgagcctgagaccccagccctggcctccccactctgtcctgggtgctggcgtctgagccttcgggacagcctgtccacatggaaccaagtcctgagcctccaagcttggaaagcatgaagggagacaccaggcatctcaatggagaggaggacgccggcgggagggaagactcgatcctcgtcaacggggcctgcagcgaccagtcctccgactcgcccccaatcctggaggctatccgcaccccggagatcagaggccgaagatcaagctcgcgactctccaagagggaggtgtccagtctgctaagctacacacaggacttgacaggcgatggcgacggggaagatggggatggctctgacaccccagtcatgccaaagctcttccgggaaaccaggactcgttcagaaagcccagctgtccgaactcgaaataacaacagtgtctccagccgggagaggcacaggccttccccacgttccacccgaggccggcagggccgcaaccatgtggacgagtcccccgtggagttcccggctaccaggtccctgagacggcgggcaacagcatcggcaggaacgccatggccgtcccctcccagctcttaccttaccatcgacctcacagacgacacagaggacacacatgggacgccccagagcagcagtaccccctacgcccgcctagcccaggacagccagcaggggggcatggagtccccgcaggtggaggcagacagtggagatggagacagttcagagtatcaggatgggaaggagtttggaataggggacctcgtgtggggaaagatcaagggcttctcctggtggcccgccatggtggtgtcttggaaggccacctccaagcgacaggctatgtctggcatgcggtgggtccagtggtttggcgatggcaagttctccgaggtctctgcagacaaactggtggcactggggctgttcagccagcactttaatttggccaccttcaataagctcgtctcctatcgaaaagccatgtaccatgctctggagaaagctagggtgcgagctggcaagaccttccccagcagccctggagactcattggaggaccagctgaagcccatgttggagtgggcccacgggggcttcaagcccactgggatcgagggcctcaaacccaacaacacgcaaccagagaacaagactcgaagacgcacagctgacgactcagccacctctgactactgccccgcacccaagcgcctcaagacaaattgctataacaacggcaaagaccgaggggatgaagatcagagccgagaacaaatggcttcagatgttgccaacaacaagagcagcctggaagatggctgtttgtcttgtggcaggaaaaaccccgtgtccttccaccctctctttgagggggggctctgtcagacatgccgggatcgcttccttgagctgttttacatgtatgatgacgatggctatcagtcttactgcactgtgtgctgcgagggccgagagctgctgctttgcagcaacacgagctgctgccggtgtttctgtgtggagtgcctggaggtgctggtgggcacaggcacagcggccgaggccaagcttcaggagccctggagctgttacatgtgtctcccgcagcgctgtcatggcgtcctgcggcgccggaaggactggaacgtgcgcctgcaggccttcttcaccagtgacacggggcttgaatatgaagcccccaagctgtaccctgccattcccgcagcccgaaggcggcccattcgagtcctgtcattgtttgatggcatcgcgacaggctacctagtcctcaaagagttgggcataaaggtaggaaagtacgtcgcttctgaagtgtgtgaggagtccattgctgttggaaccgtgaagcacgaggggaatatcaaatacgtgaacgacgtgaggaacatcacaaagaaaaatattgaagaatggggcccatttgacttggtgattggcggaagcccatgcaacgatctctcaaatgtgaatccagccaggaaaggcctgtatgagggtacaggccggctcttcttcgaattttaccacctgctgaattactcacgccccaaggagggtgatgaccggccgttcttctggatgtttgagaatgttgtagccatgaaggttggcgacaagagggacatctcacggttcctggagtgtaatccagtgatgattgatgccatcaaagtttctgctgctcacagggcccgatacttctggggcaacctacccgggatgaacaggcccgtgatagcatcaaagaatgataaactcgagctgcaggactgcttggaatacaataggatagccaagttaaagaaagtacagacaataaccaccaagtcgaactcgatcaaacaggggaaaaaccaacttttccctgttgtcatgaatggcaaagaagatgttttgtggtgcactgagctcgaaaggatctttggctttcctgtgcactacacagacgtgtccaacatgggccgtggtgcccgccagaagctgctgggaaggtcctggagcgtgcctgtcatccgacacctcttcgcccctctgaaggactactttgcatgtgaatagttccagccaggccccaagcccactggggtgtgtggcagagccaggacccaggaggtgtgattcctgaaggcatccccaggccctgctcttcctcagctgtgtgggtcataccgtgtacctcagttccctcttgctcagtgggggcagagccacctgactcttgcaggggtagcctgaggtgccgcctccttgtgcacaaatcagacctggctgcttggagcagcctaacacggtgctcattttttcttctcctaaaactttaaaacttgaagtaggtagcaacgtggctttttttttttcccttcctgggtctaccactcagagaaacaatggctaagataccaaaaccacagtgccgacagctctccaatactcaggttaatgctgaaaaatcatccaagacagttattgcaagagtttaatttttgaaaactggctactgctctgtgtttacagacgtgtgcagttgtaggcatgtagctacaggacatttttaagggcccaggatcgttttttcccagggcaagcagaagagaaaatgttgtatatgtcttttacccggcacattccccttgcctaaatacaagggctggagtctgcacgggacctattagagtattttccacaatgatgatgatttcagcagggatgacgtcatcatcacattcagggctattttttcccccacaaacccaagggcaggggccactcttagctaaatccctccccgtgactgcaatagaaccctctggggagctcaggaaggggtgtgctgagttctataatataagctgccatatattttgtagacaagtatggctcctccatatctccctcttccctaggagaggagtgtgaagcaaggagcttagataagacaccccctcaaacccattccctctccaggagacctaccctccacaggcacaggtccccagatgagaagtctgctaccctcatttctcatctttttactaaactcagaggcagtgacagcagtcagggacagacatacatttctcataccttccccacatctgagagatgacagggaaaactgcaaagctcggtgctccctttggagattttttaatccttttttattccataagaagtcgtttttagggagaacgggaattcagacaagctgcatttcagaaatgctgtcataatggtttttaacaccttttactcttcttactggtgctattttgtagaataaggaacaacgttgacaagttttgtggggctttttatacactttttaaaatctcaaacttctatttttatgtttaacgttttcattaaaattttttttgtaactggagccacgacgtaacaaatatggggaaaaaactgtgccttgtttcaacagtttttgctaatttttaggctgaaagatgacggatgcctagagtttaccttatgtttaattaaaatcagtatttgtcta

SEQ ID NO: 127511 - DNA, 4237 bp, Homo sapiens
  Payload ID: 4955
  Gene Symbol: DNMT3B
  Gene Name: DNA (cytosine-5-)-methyltransferase 3 beta
  Uniprot ID: Q9UBC3
  ENST ID: ENST00000353855
  CDS Start-End: 283-2784
cgcagcagctgctcccggctccgcggccgcagcccgcgtggacgctccgagcgccccccgacggacgggaccggctccctggcggtcgggcgagcgggcggcaacgctgcccggccggcagcgctggggttaagtggcccaagtaaacctagctcggcgatcggcgccggagattcgcgagcccagcgccctgcacggccgccagccggcctcccgccagccagccccgacccgcggctccgccgcccagccgcgccccagccagccctgcggcaggaaagcatgaagggagacaccaggcatctcaatggagaggaggacgccggcgggagggaagactcgatcctcgtcaacggggcctgcagcgaccagtcctccgactcgcccccaatcctggaggctatccgcaccccggagatcagaggccgaagatcaagctcgcgactctccaagagggaggtgtccagtctgctaagctacacacaggacttgacaggcgatggcgacggggaagatggggatggctctgacaccccagtcatgccaaagctcttccgggaaaccaggactcgttcagaaagcccagctgtccgaactcgaaataacaacagtgtctccagccgggagaggcacaggccttccccacgttccacccgaggccggcagggccgcaaccatgtggacgagtcccccgtggagttcccggctaccaggtccctgagacggcgggcaacagcatcggcaggaacgccatggccgtcccctcccagctcttaccttaccatcgacctcacagacgacacagaggacacacatgggacgccccagagcagcagtaccccctacgcccgcctagcccaggacagccagcaggggggcatggagtccccgcaggtggaggcagacagtggagatggagacagttcagagtatcaggatgggaaggagtttggaataggggacctcgtgtggggaaagatcaagggcttctcctggtggcccgccatggtggtgtcttggaaggccacctccaagcgacaggctatgtctggcatgcggtgggtccagtggtttggcgatggcaagttctccgaggtctctgcagacaaactggtggcactggggctgttcagccagcactttaatttggccaccttcaataagctcgtctcctatcgaaaagccatgtaccatgctctggagaaagctagggtgcgagctggcaagaccttccccagcagccctggagactcattggaggaccagctgaagcccatgttggagtgggcccacgggggcttcaagcccactgggatcgagggcctcaaacccaacaacacgcaaccagagaacaagactcgaagacgcacagctgacgactcagccacctctgactactgccccgcacccaagcgcctcaagacaaattgctataacaacggcaaagaccgaggggatgaagatcagagccgagaacaaatggcttcagatgttgccaacaacaagagcagcctggaagatggctgtttgtcttgtggcaggaaaaaccccgtgtccttccaccctctctttgagggggggctctgtcagacatgccgggatcgcttccttgagctgttttacatgtatgatgacgatggctatcagtcttactgcactgtgtgctgcgagggccgagagctgctgctttgcagcaacacgagctgctgccggtgtttctgtgtggagtgcctggaggtgctggtgggcacaggcacagcggccgaggccaagcttcaggagccctggagctgttacatgtgtctcccgcagcgctgtcatggcgtcctgcggcgccggaaggactggaacgtgcgcctgcaggccttcttcaccagtgacacggggcttgaatatgaagcccccaagctgtaccctgccattcccgcagcccgaaggcggcccattcgagtcctgtcattgtttgatggcatcgcgacaggctacctagtcctcaaagagttgggcataaaggtaggaaagtacgtcgcttctgaagtgtgtgaggagtccattgctgttggaaccgtgaagcacgaggggaatatcaaatacgtgaacgacgtgaggaacatcacaaagaaaaatattgaagaatggggcccatttgacttggtgattggcggaagcccatgcaacgatctctcaaatgtgaatccagccaggaaaggcctgtatgagggtacaggccggctcttcttcgaattttaccacctgctgaattactcacgccccaaggagggtgatgaccggccgttcttctggatgtttgagaatgttgtagccatgaaggttggcgacaagagggacatctcacggttcctggagtgtaatccagtgatgattgatgccatcaaagtttctgctgctcacagggcccgatacttctggggcaacctacccgggatgaacaggcccgtgatagcatcaaagaatgataaactcgagctgcaggactgcttggaatacaataggatagccaagttaaagaaagtacagacaataaccaccaagtcgaactcgatcaaacaggggaaaaaccaacttttccctgttgtcatgaatggcaaagaagatgttttgtggtgcactgagctcgaaaggatctttggctttcctgtgcactacacagacgtgtccaacatgggccgtggtgcccgccagaagctgctgggaaggtcctggagcgtgcctgtcatccgacacctcttcgcccctctgaaggactactttgcatgtgaatagttccagccaggccccaagcccactggggtgtgtggcagagccaggacccaggaggtgtgattcctgaaggcatccccaggccctgctcttcctcagctgtgtgggtcataccgtgtacctcagttccctcttgctcagtgggggcagagccacctgactcttgcaggggtagcctgaggtgccgcctccttgtgcacaaatcagacctggctgcttggagcagcctaacacggtgctcattttttcttctcctaaaactttaaaacttgaagtaggtagcaacgtggctttttttttttcccttcctgggtctaccactcagagaaacaatggctaagataccaaaaccacagtgccgacagctctccaatactcaggttaatgctgaaaaatcatccaagacagttattgcaagagtttaatttttgaaaactggctactgctctgtgtttacagacgtgtgcagttgtaggcatgtagctacaggacatttttaagggcccaggatcgttttttcccagggcaagcagaagagaaaatgttgtatatgtcttttacccggcacattccccttgcctaaatacaagggctggagtctgcacgggacctattagagtattttccacaatgatgatgatttcagcagggatgacgtcatcatcacattcagggctattttttcccccacaaacccaagggcaggggccactcttagctaaatccctccccgtgactgcaatagaaccctctggggagctcaggaaggggtgtgctgagttctataatataagctgccatatattttgtagacaagtatggctcctccatatctccctcttccctaggagaggagtgtgaagcaaggagcttagataagacaccccctcaaacccattccctctccaggagacctaccctccacaggcacaggtccccagatgagaagtctgctaccctcatttctcatctttttactaaactcagaggcagtgacagcagtcagggacagacatacatttctcataccttccccacatctgagagatgacagggaaaactgcaaagctcggtgctccctttggagattttttaatccttttttattccataagaagtcgtttttagggagaacgggaattcagacaagctgcatttcagaaatgctgtcataatggtttttaacaccttttactcttcttactggtgctattttgtagaataaggaacaacgttgacaagttttgtggggctttttatacactttttaaaatctcaaacttctatttttatgtttaacgttttcattaaaattttttttgtaactggagccacgacgtaacaaatatggggaaaaaactgtgccttgtttcaacagtttttgctaatttttaggctgaaagatgacggatgcctagagtttaccttatgtttaattaaaatcagtatttgtcta

SEQ ID NO: 127512 - DNA, 4336 bp, Homo sapiens
  Payload ID: 4955
  Gene Symbol: DNMT3B
  Gene Name: DNA (cytosine-5-)-methyltransferase 3 beta
  Uniprot ID: Q9UBC3
  ENST ID: ENST00000328111
  CDS Start-End: 322-2883
acccactcccgctgccccgtccggcccgcgccgcttcctcgcagcagctgctcccggctccgcggccgcagcccgcgtggacgctccgagcgccccccgacggacgggaccggctccctggcggtcgggcgagcgggcggcaacgctgcccggccggcagcgctggggttaagtggcccaagtaaacctagctcggcgatcggcgccggagattcgcgagcccagcgccctgcacggccgccagccggcctcccgccagccagccccgacccgcggctccgccgcccagccgcgccccagccagccctgcggcaggaaagcatgaagggagacaccaggcatctcaatggagaggaggacgccggcgggagggaagactcgatcctcgtcaacggggcctgcagcgaccagtcctccgactcgcccccaatcctggaggctatccgcaccccggagatcagaggccgaagatcaagctcgcgactctccaagagggaggtgtccagtctgctaagctacacacaggacttgacaggcgatggcgacggggaagatggggatggctctgacaccccagtcatgccaaagctcttccgggaaaccaggactcgttcagaaagcccagctgtccgaactcgaaataacaacagtgtctccagccgggagaggcacaggccttccccacgttccacccgaggccggcagggccgcaaccatgtggacgagtcccccgtggagttcccggctaccaggtccctgagacggcgggcaacagcatcggcaggaacgccatggccgtcccctcccagctcttaccttaccatcgacctcacagacgacacagaggacacacatgggacgccccagagcagcagtaccccctacgcccgcctagcccaggacagccagcaggggggcatggagtccccgcaggtggaggcagacagtggagatggagacagttcagagtatcaggatgggaaggagtttggaataggggacctcgtgtggggaaagatcaagggcttctcctggtggcccgccatggtggtgtcttggaaggccacctccaagcgacaggctatgtctggcatgcggtgggtccagtggtttggcgatggcaagttctccgaggtctctgcagacaaactggtggcactggggctgttcagccagcactttaatttggccaccttcaataagctcgtctcctatcgaaaagccatgtaccatgctctggagaaagctagggtgcgagctggcaagaccttccccagcagccctggagactcattggaggaccagctgaagcccatgttggagtgggcccacgggggcttcaagcccactgggatcgagggcctcaaacccaacaacacgcaaccagtggttaataagtcgaaggtgcgtcgtgcaggcagtaggaaattagaatcaaggaaatacgagaacaagactcgaagacgcacagctgacgactcagccacctctgactactgccccgcacccaagcgcctcaagacaaattgctataacaacggcaaagaccgaggggatgaagatcagagccgagaacaaatggcttcagatgttgccaacaacaagagcagcctggaagatggctgtttgtcttgtggcaggaaaaaccccgtgtccttccaccctctctttgagggggggctctgtcagacatgccgggatcgcttccttgagctgttttacatgtatgatgacgatggctatcagtcttactgcactgtgtgctgcgagggccgagagctgctgctttgcagcaacacgagctgctgccggtgtttctgtgtggagtgcctggaggtgctggtgggcacaggcacagcggccgaggccaagcttcaggagccctggagctgttacatgtgtctcccgcagcgctgtcatggcgtcctgcggcgccggaaggactggaacgtgcgcctgcaggccttcttcaccagtgacacggggcttgaatatgaagcccccaagctgtaccctgccattcccgcagcccgaaggcggcccattcgagtcctgtcattgtttgatggcatcgcgacaggctacctagtcctcaaagagttgggcataaaggtaggaaagtacgtcgcttctgaagtgtgtgaggagtccattgctgttggaaccgtgaagcacgaggggaatatcaaatacgtgaacgacgtgaggaacatcacaaagaaaaatattgaagaatggggcccatttgacttggtgattggcggaagcccatgcaacgatctctcaaatgtgaatccagccaggaaaggcctgtatgagggtacaggccggctcttcttcgaattttaccacctgctgaattactcacgccccaaggagggtgatgaccggccgttcttctggatgtttgagaatgttgtagccatgaaggttggcgacaagagggacatctcacggttcctggagtgtaatccagtgatgattgatgccatcaaagtttctgctgctcacagggcccgatacttctggggcaacctacccgggatgaacaggcccgtgatagcatcaaagaatgataaactcgagctgcaggactgcttggaatacaataggatagccaagttaaagaaagtacagacaataaccaccaagtcgaactcgatcaaacaggggaaaaaccaacttttccctgttgtcatgaatggcaaagaagatgttttgtggtgcactgagctcgaaaggatctttggctttcctgtgcactacacagacgtgtccaacatgggccgtggtgcccgccagaagctgctgggaaggtcctggagcgtgcctgtcatccgacacctcttcgcccctctgaaggactactttgcatgtgaatagttccagccaggccccaagcccactggggtgtgtggcagagccaggacccaggaggtgtgattcctgaaggcatccccaggccctgctcttcctcagctgtgtgggtcataccgtgtacctcagttccctcttgctcagtgggggcagagccacctgactcttgcaggggtagcctgaggtgccgcctccttgtgcacaaatcagacctggctgcttggagcagcctaacacggtgctcattttttcttctcctaaaactttaaaacttgaagtaggtagcaacgtggctttttttttttcccttcctgggtctaccactcagagaaacaatggctaagataccaaaaccacagtgccgacagctctccaatactcaggttaatgctgaaaaatcatccaagacagttattgcaagagtttaatttttgaaaactggctactgctctgtgtttacagacgtgtgcagttgtaggcatgtagctacaggacatttttaagggcccaggatcgttttttcccagggcaagcagaagagaaaatgttgtatatgtcttttacccggcacattccccttgcctaaatacaagggctggagtctgcacgggacctattagagtattttccacaatgatgatgatttcagcagggatgacgtcatcatcacattcagggctattttttcccccacaaacccaagggcaggggccactcttagctaaatccctccccgtgactgcaatagaaccctctggggagctcaggaaggggtgtgctgagttctataatataagctgccatatattttgtagacaagtatggctcctccatatctccctcttccctaggagaggagtgtgaagcaaggagcttagataagacaccccctcaaacccattccctctccaggagacctaccctccacaggcacaggtccccagatgagaagtctgctaccctcatttctcatctttttactaaactcagaggcagtgacagcagtcagggacagacatacatttctcataccttccccacatctgagagatgacagggaaaactgcaaagctcggtgctccctttggagattttttaatccttttttattccataagaagtcgtttttagggagaacgggaattcagacaagctgcatttcagaaatgctgtcataatggtttttaacaccttttactcttcttactggtgctattttgtagaataaggaacaacgttgacaagttttgtggggctttttatacactttttaaaatctcaaacttctatttttatgtttaacgttttcattaaaattttttttgtaactggagccacgacgtaacaaatatggggaaaaaactgtgccttgtttcaacagtttttgctaatttttaggctgaaagatgacggatgcctagagtttaccttatgtttaattaaaatcagtatttgtcta

SEQ ID NO: 127513 - DNA, 4048 bp, Homo sapiens
  Payload ID: 4955
  Gene Symbol: DNMT3B
  Gene Name: DNA (cytosine-5-)-methyltransferase 3 beta
  Uniprot ID: Q9UBC3
  ENST ID: ENST00000348286
  CDS Start-End: 283-2595
cgcagcagctgctcccggctccgcggccgcagcccgcgtggacgctccgagcgccccccgacggacgggaccggctccctggcggtcgggcgagcgggcggcaacgctgcccggccggcagcgctggggttaagtggcccaagtaaacctagctcggcgatcggcgccggagattcgcgagcccagcgccctgcacggccgccagccggcctcccgccagccagccccgacccgcggctccgccgcccagccgcgccccagccagccctgcggcaggaaagcatgaagggagacaccaggcatctcaatggagaggaggacgccggcgggagggaagactcgatcctcgtcaacggggcctgcagcgaccagtcctccgactcgcccccaatcctggaggctatccgcaccccggagatcagaggccgaagatcaagctcgcgactctccaagagggaggtgtccagtctgctaagctacacacaggacttgacaggcgatggcgacggggaagatggggatggctctgacaccccagtcatgccaaagctcttccgggaaaccaggactcgttcagaaagcccagctgtccgaactcgaaataacaacagtgtctccagccgggagaggcacaggccttccccacgttccacccgaggccggcagggccgcaaccatgtggacgagtcccccgtggagttcccggctaccaggtccctgagacggcgggcaacagcatcggcaggaacgccatggccgtcccctcccagctcttaccttaccatcgacctcacagacgacacagaggacacacatgggacgccccagagcagcagtaccccctacgcccgcctagcccaggacagccagcaggggggcatggagtccccgcaggtggaggcagacagtggagatggagacagttcagagtatcaggatgggaaggagtttggaataggggacctcgtgtggggaaagatcaagggcttctcctggtggcccgccatggtggtgtcttggaaggccacctccaagcgacaggctatgtctggcatgcggtgggtccagtggtttggcgatggcaagttctccgaggtctctgcagacaaactggtggcactggggctgttcagccagcactttaatttggccaccttcaataagctcgtctcctatcgaaaagccatgtaccatgctctggagaaagctagggtgcgagctggcaagaccttccccagcagccctggagactcattggaggaccagctgaagcccatgttggagtgggcccacgggggcttcaagcccactgggatcgagggcctcaaacccaacaacacgcaaccagagaacaagactcgaagacgcacagctgacgactcagccacctctgactactgccccgcacccaagcgcctcaagacaaattgctataacaacggcaaagaccgaggggatgaagatcagagccgagaacaaatggcttcagatgttgccaacaacaagagcagcctggaagatggctgtttgtcttgtggcaggaaaaaccccgtgtccttccaccctctctttgagggggggctctgtcagacatgccgggatcgcttccttgagctgttttacatgtatgatgacgatggctatcagtcttactgcactgtgtgctgcgagggccgagagctgctgctttgcagcaacacgagctgctgccggtgtttctgtgtggagtgcctggaggtgctggtgggcacaggcacagcggccgaggccaagcttcaggagccctggagctgttacatgtgtctcccgcagcgctgtcatggcgtcctgcggcgccggaaggactggaacgtgcgcctgcaggccttcttcaccagtgacacggggcttgaatatgaagcccccaagctgtaccctgccattcccgcagcccgaaggcggcccattcgagtcctgtcattgtttgatggcatcgcgacaggctacctagtcctcaaagagttgggcataaaggtaggaaagtacgtcgcttctgaagtgtgtgaggagtccattgctgttggaaccgtgaagcacgaggggaatatcaaatacgtgaacgacgtgaggaacatcacaaagaaaaatattgaagaatggggcccatttgacttggtgattggcggaagcccatgcaacgatctctcaaatgtgaatccagccaggaaaggcctgtatgagggtacaggccggctcttcttcgaattttaccacctgctgaattactcacgccccaaggagggtgatgaccggccgttcttctggatgtttgagaatgttgtagccatgaaggttggcgacaagagggacatctcacggttcctggagtgtaatccagtgatgattgatgccatcaaagtttctgctgctcacagggcccgatacttctggggcaacctacccgggatgaacaggatctttggctttcctgtgcactacacagacgtgtccaacatgggccgtggtgcccgccagaagctgctgggaaggtcctggagcgtgcctgtcatccgacacctcttcgcccctctgaaggactactttgcatgtgaatagttccagccaggccccaagcccactggggtgtgtggcagagccaggacccaggaggtgtgattcctgaaggcatccccaggccctgctcttcctcagctgtgtgggtcataccgtgtacctcagttccctcttgctcagtgggggcagagccacctgactcttgcaggggtagcctgaggtgccgcctccttgtgcacaaatcagacctggctgcttggagcagcctaacacggtgctcattttttcttctcctaaaactttaaaacttgaagtaggtagcaacgtggctttttttttttcccttcctgggtctaccactcagagaaacaatggctaagataccaaaaccacagtgccgacagctctccaatactcaggttaatgctgaaaaatcatccaagacagttattgcaagagtttaatttttgaaaactggctactgctctgtgtttacagacgtgtgcagttgtaggcatgtagctacaggacatttttaagggcccaggatcgttttttcccagggcaagcagaagagaaaatgttgtatatgtcttttacccggcacattccccttgcctaaatacaagggctggagtctgcacgggacctattagagtattttccacaatgatgatgatttcagcagggatgacgtcatcatcacattcagggctattttttcccccacaaacccaagggcaggggccactcttagctaaatccctccccgtgactgcaatagaaccctctggggagctcaggaaggggtgtgctgagttctataatataagctgccatatattttgtagacaagtatggctcctccatatctccctcttccctaggagaggagtgtgaagcaaggagcttagataagacaccccctcaaacccattccctctccaggagacctaccctccacaggcacaggtccccagatgagaagtctgctaccctcatttctcatctttttactaaactcagaggcagtgacagcagtcagggacagacatacatttctcataccttccccacatctgagagatgacagggaaaactgcaaagctcggtgctccctttggagattttttaatccttttttattccataagaagtcgtttttagggagaacgggaattcagacaagctgcatttcagaaatgctgtcataatggtttttaacaccttttactcttcttactggtgctattttgtagaataaggaacaacgttgacaagttttgtggggctttttatacactttttaaaatctcaaacttctatttttatgtttaacgttttcattaaaattttttttgtaactggagccacgacgtaacaaatatggggaaaaaactgtgccttgtttcaacagtttttgctaatttttaggctgaaagatgacggatgcctagagtttaccttatgtttaattaaaatcagtatttgtcta

SEQ ID NO: 127514 - DNA, 2674 bp, Homo sapiens
  Payload ID: 4955
  Gene Symbol: DNMT3B
  Gene Name: DNA (cytosine-5-)-methyltransferase 3 beta
  Uniprot ID: Q9UBC3
  ENST ID: ENST00000443239
  CDS Start-End: 111-2297
attcgcgagcccagcgccctgcacggccgccagccggcctcccgccagccagccccgacccgcggctccgccgcccagccgcgccccagccagccctgcggcaggaaagcatgaagggagacaccaggcatctcaatggagaggaggacgccggcgggagggaagactcgatcctcgtcaacggggcctgcagcgaccagtcctccgactcgcccccaatcctggaggctatccgcaccccggagatcagaggccgaagatcaagctcgcgactctccaagagggaggtgtccagtctgctaagctacacacaggacttgacaggcgatggcgacggggaagatggggatggctctgacaccccagtcatgccaaagctcttccgggaaaccaggactcgttcagaaagcccagcttccctgagacggcgggcaacagcatcggcaggaacgccatggccgtcccctcccagctcttaccttaccatcgacctcacagacgacacagaggacacacatgggacgccccagagcagcagtaccccctacgcccgcctagcccaggacagccagcaggggggcatggagtccccgcaggtggaggcagacagtggagatggagacagttcagagtatcaggatgggaaggagtttggaataggggacctcgtgtggggaaagatcaagggcttctcctggtggcccgccatggtggtgtcttggaaggccacctccaagcgacaggctatgtctggcatgcggtgggtccagtggtttggcgatggcaagttctccgaggtctctgcagacaaactggtggcactggggctgttcagccagcactttaatttggccaccttcaataagctcgtctcctatcgaaaagccatgtaccatgctctggagaaagctagggtgcgagctggcaagaccttccccagcagccctggagactcattggaggaccagctgaagcccatgttggagtgggcccacgggggcttcaagcccactgggatcgagggcctcaaacccaacaacacgcaaccagagaacaagactcgaagacgcacagctgacgactcagccacctctgactactgccccgcacccaagcgcctcaagacaaattgctataacaacggcaaagaccgaggggatgaagatcagagccgagaacaaatggcttcagatgttgccaacaacaagagcagcctggaagatggctgtttgtcttgtggcaggaaaaaccccgtgtccttccaccctctctttgagggggggctctgtcagacatgccgggatcgcttccttgagctgttttacatgtatgatgacgatggctatcagtcttactgcactgtgtgctgcgagggccgagagctgctgctttgcagcaacacgagctgctgccggtgtttctgtgtggagtgcctggaggtgctggtgggcacaggcacagcggccgaggccaagcttcaggagccctggagctgttacatgtgtctcccgcagcgctgtcatggcgtcctgcggcgccggaaggactggaacgtgcgcctgcaggccttcttcaccagtgacacggggcttgaatatgaagcccccaagctgtaccctgccattcccgcagcccgaaggcggcccattcgagtcctgtcattgtttgatggcatcgcgacaggctacctagtcctcaaagagttgggcataaaggtaggaaagtacgtcgcttctgaagtgtgtgaggagtccattgctgttggaaccgtgaagcacgaggggaatatcaaatacgtgaacgacgtgaggaacatcacaaagaaaaatattgaagaatggggcccatttgacttggtgattggcggaagcccatgcaacgatctctcaaatgtgaatccagccaggaaaggcctgtatgagggtacaggccggctcttcttcgaattttaccacctgctgaattactcacgccccaaggagggtgatgaccggccgttcttctggatgtttgagaatgttgtagccatgaaggttggcgacaagagggacatctcacggttcctggagtgtaatccagtgatgattgatgccatcaaagtttctgctgctcacagggcccgatacttctggggcaacctacccgggatgaacaggatctttggctttcctgtgcactacacagacgtgtccaacatgggccgtggtgcccgccagaagctgctgggaaggtcctggagcgtgcctgtcatccgacacctcttcgcccctctgaaggactactttgcatgtgaatagttccagccaggccccaagcccactggggtgtgtggcagagccaggacccaggaggtgtgattcctgaaggcatccccaggccctgctcttcctcagctgtgtgggtcataccgtgtacctcagttccctcttgctcagtgggggcagagccacctgactcttgcaggggtagcctgaggtgccgcctccttgtgcacaaatcagacctggctgcttggagcagcctaacacggtgctcattttttcttctcctaaaactttaaaacttgaagtaggtagcaacgtggctttttttttttcccttcctgggtctaccactcagagaaacaatggctaagataccaaaaccacagtgccgacagctctccaatactcag

SEQ ID NO: 127515 - DNA, 2315 bp, Homo sapiens
  Payload ID: 4955
  Gene Symbol: DNMT3B
  Gene Name: DNA (cytosine-5-)-methyltransferase 3 beta
  Uniprot ID: Q9UBC3
  ENST ID: ENST00000456297
  CDS Start-End: 65-2149
agccagccccgacccgcggctccgccgcccagccgcgccccagccagccctgcggcaggaaagcatgaagggagacaccaggcatctcaatggagaggaggacgccggcgggagggaagactcgatcctcgtcaacggggcctgcagcgaccagtcctccgactcgcccccaatcctggaggctatccgcaccccggagatcagaggccgaagatcaagctcgcgactctccaagagggaggtgtccagtctgctaagctacacacagtccctgagacggcgggcaacagcatcggcaggaacgccatggccgtcccctcccagctcttaccttaccatcgacctcacagacgacacagaggacacacatgggacgccccagagcagcagtaccccctacgcccgcctagcccaggacagccagcaggggggcatggagtccccgcaggtggaggcagacagtggagatggagacagttcagagtatcaggatgggaaggagtttggaataggggacctcgtgtggggaaagatcaagggcttctcctggtggcccgccatggtggtgtcttggaaggccacctccaagcgacaggctatgtctggcatgcggtgggtccagtggtttggcgatggcaagttctccgaggtctctgcagacaaactggtggcactggggctgttcagccagcactttaatttggccaccttcaataagctcgtctcctatcgaaaagccatgtaccatgctctggagaaagctagggtgcgagctggcaagaccttccccagcagccctggagactcattggaggaccagctgaagcccatgttggagtgggcccacgggggcttcaagcccactgggatcgagggcctcaaacccaacaacacgcaaccagagaacaagactcgaagacgcacagctgacgactcagccacctctgactactgccccgcacccaagcgcctcaagacaaattgctataacaacggcaaagaccgaggggatgaagatcagagccgagaacaaatggcttcagatgttgccaacaacaagagcagcctggaagatggctgtttgtcttgtggcaggaaaaaccccgtgtccttccaccctctctttgagggggggctctgtcagacatgccgggatcgcttccttgagctgttttacatgtatgatgacgatggctatcagtcttactgcactgtgtgctgcgagggccgagagctgctgctttgcagcaacacgagctgctgccggtgtttctgtgtggagtgcctggaggtgctggtgggcacaggcacagcggccgaggccaagcttcaggagccctggagctgttacatgtgtctcccgcagcgctgtcatggcgtcctgcggcgccggaaggactggaacgtgcgcctgcaggccttcttcaccagtgacacggggcttgaatatgaagcccccaagctgtaccctgccattcccgcagcccgaaggcggcccattcgagtcctgtcattgtttgatggcatcgcgacaggctacctagtcctcaaagagttgggcataaaggtaggaaagtacgtcgcttctgaagtgtgtgaggagtccattgctgttggaaccgtgaagcacgaggggaatatcaaatacgtgaacgacgtgaggaacatcacaaagaaaaatattgaagaatggggcccatttgacttggtgattggcggaagcccatgcaacgatctctcaaatgtgaatccagccaggaaaggcctgtatgagggtacaggccggctcttcttcgaattttaccacctgctgaattactcacgccccaaggagggtgatgaccggccgttcttctggatgtttgagaatgttgtagccatgaaggttggcgacaagagggacatctcacggttcctggagtgtaatccagtgatgattgatgccatcaaagtttctgctgctcacagggcccgatacttctggggcaacctacccgggatgaacaggatctttggctttcctgtgcactacacagacgtgtccaacatgggccgtggtgcccgccagaagctgctgggaaggtcctggagcgtgcctgtcatccgacacctcttcgcccctctgaaggactactttgcatgtgaatagttccagccaggccccaagcccactggggtgtgtggcagagccaggacccaggaggtgtgattcctgaaggcatccccaggccctgctcttcctcagctgtgtgggtcataccgtgtacctcagttccctcttgctcagtgggggcagagccacctgactcttgcag

SEQ ID NO: 127516 - DNA, 1706 bp, Homo sapiens
  Payload ID: 4956
  Gene Symbol: DNMT3L
  Gene Name: DNA (cytosine-5-)-methyltransferase 3-like
  Uniprot ID: Q9UJW3
  ENST ID: ENST00000270172
  CDS Start-End: 485-1648
cccatctccacccctcccctgaaccccactccccactgaggtccccaaaccccacccctcactccaccctgagggccccatcctctgaaccccaatcccccagccccactgagctcttaaccctccccacctgagggttccctttccctgcccgtcccccagcttcctagctccccaccccaagtgaccccccgcagctcctcgcccctcccactgcaaaccggcactgaagggctgccccgcccccgcccctccccgcccccgcgggacacgcccagattctttgcccccatagcctggtgacctctggccacccgctgtcccaggtgggcctggatccttccagctcattctttgcctgcgccgtccctcgttccatggcccagtcctccccggggaccctgagcctggaagccccggaccactggaaccttgaacccaccagctggctgtacccggagccgtggcagcagccctcatccccatggcggccatcccagccctggacccagaggccgagcccagcatggacgtgattttggtgggatccagtgagctctcaagctccgtttcacccgggacaggcagagatcttattgcatatgaagtcaaggctaaccagcgaaatatagaagacatctgcatctgctgcggaagtctccaggttcacacacagcaccctctgtttgagggagggatctgcgccccatgtaaggacaagttcctggatgccctcttcctgtacgacgatgacgggtaccaatcctactgctccatctgctgctccggagagacgctgctcatctgcggaaaccctgattgcacccgatgctactgcttcgagtgtgtggatagcctggtcggccccgggacctcggggaaggtgcacgccatgagcaactgggtgtgctacctgtgcctgccgtcctcccgaagcgggctgctgcagcgtcggaggaagtggcgcagccagctcaaggccttctacgaccgagagtcggagaatccccttgagatgttcgaaaccgtgcctgtgtggaggagacagccagtccgggtgctgtccctttttgaagacatcaagaaagagctgacgagtttgggctttttggaaagtggttctgacccgggacaactgaagcatgtggttgatgtcacagacacagtgaggaaggatgtggaggagtggggacccttcgatcttgtgtacggcgccacacctcccctgggccacacctgtgaccgtcctcccagctggtacctgttccagttccaccggctcctgcagtacgcacggcccaagccaggcagccccaggcccttcttctggatgttcgtggacaatctggtgctgaacaaggaagacctggacgtcgcatctcgcttcctggagatggagccagtcaccatcccagatgtccacggcggatccttgcagaatgctgtccgcgtgtggagcaacatcccagccataaggagcagcaggcactgggctctggtttcggaagaagaattgtccctgctggcccagaacaagcagagctcgaagctcgcggccaagtggcccaccaagctggtgaagaactgctttctccccctaagagaatatttcaagtatttttcaacagaactcacttcctctttataaatgagtcactatactgtgaagaaaaagacttttcctagaacaaaggcaactttcctca

SEQ ID NO: 127517 - DNA, 1014 bp, Homo sapiens
  Payload ID: 4956
  Gene Symbol: DNMT3L
  Gene Name: DNA (cytosine-5-)-methyltransferase 3-like
  ENST ID: ENST00000431166
  CDS Start-End: 151-1014
ggatccttccagctcattctttgcctgcgccgtccctcgttccatggcccagtcctccccggggaccctgagcctggaagccccggaccactggaaccttgaacccaccagctggctgtacccggagccgtggcagcagccctcatccccatggcggccatcccagccctggacccagaggccgagcccagcatggacgtgattttggtgggatccagtgagctctcaagctccgtttcacccgggacaggcagagacatctgcatctgctgcggaagtctccaggttcacacacagcaccctctgtttgagggagggatctgcgccccatgtaaggacaagttcctggatgccctcttcctgtacgacgatgacgggtaccaatcctactgctccatctgctgctccggagagacgctgctcatctgcggaaaccctgattgcacccgatgctactgcttcgagtgtgtggatagcctggtcggccccgggacctcggggaaggtgcacgccatgagcaactgggtgtgctacctgtgcctgccgtcctcccgaagcgggctgctgcagcgtcggaggaagtggcgcagccagctcaaggccttctacgaccgagagtcggagaatccccttgagatgttcgaaaccgtgcctgtgtggaggagacagccagtccgggtgctgtccctttttgaagacatcaagaaagagctgacgagtttgggctttttggaaagtggttctgacccgggacaactgaagcatgtggttgatgtcacagacacagtgaggaaggatgtggaggagtggggacccttcgatcttgtgtacggcgccacacctcccctgggccacacctgtgaccgtcctcccagctggtacctgttccagttccaccggctcctgcagtacgcacggcccaagccaggcagccccaggcccttcttctggatgttcgtggacaatctggtgctgaacaaggaagacctggacgtcgcatctcgcttcctggag

SEQ ID NO: 127518 - DNA, 603 bp, Homo sapiens
  Payload ID: 4956
  Gene Symbol: DNMT3L
  Gene Name: DNA (cytosine-5-)-methyltransferase 3-like
  ENST ID: ENST00000436357
  CDS Start-End: 1-545
cagctcctccctcggggttgcctgtctgtctcttccccactctaggcctgcctgggggaggaggggtccatgcacctctgtggccccagcactgggcagggcttcattgctgctggagggacaggggcagggggatccctcagacccaggccggctggtacctgttccagttccaccggctcctgcagtacgcacggcccaagccaggcagccccaggcccttcttctggatgttcgtggacaatctggtgctgaacaaggaagacctggacgtcgcatctcgcttcctggagatggagccagtcaccatcccagatgtccacggcggatccttgcagaatgctgtccgcgtgtggagcaacatcccagccataaggagcaggcactgggctctggtttcggaagaagaattgtccctgctggcccagaacaagcagagctcgaagctcgcggccaagtggcccaccaagctggtgaagaactgctttctccccctaagagaatatttcaagtatttttcaacagaactcacttcctctttataaatgagtcactatactgtgaagaaaaagacttttcctagaacaaaggcaactttcctca

SEQ ID NO: 127519 - DNA, 1364 bp, Homo sapiens
  Payload ID: 4956
  Gene Symbol: DNMT3L
  Gene Name: DNA (cytosine-5-)-methyltransferase 3-like
  Uniprot ID: Q9UJW3
  ENST ID: ENST00000628202
  CDS Start-End: 159-1319
gtgggcctggatccttccagctcattctttgcctgcgccgtccctcgttccatggcccagtcctccccggggaccctgagcctggaagccccggaccactggaaccttgaacccaccagctggctgtacccggagccgtggcagcagccctcatccccatggcggccatcccagccctggacccagaggccgagcccagcatggacgtgattttggtgggatccagtgagctctcaagctccgtttcacccgggacaggcagagatcttattgcatatgaagtcaaggctaaccagcgaaatatagaagacatctgcatctgctgcggaagtctccaggttcacacacagcaccctctgtttgagggagggatctgcgccccatgtaaggacaagttcctggatgccctcttcctgtacgacgatgacgggtaccaatcctactgctccatctgctgctccggagagacgctgctcatctgcggaaaccctgattgcacccgatgctactgcttcgagtgtgtggatagcctggtcggccccgggacctcggggaaggtgcacgccatgagcaactgggtgtgctacctgtgcctgccgtcctcccgaagcgggctgctgcagcgtcggaggaagtggcgcagccagctcaaggccttctacgaccgagagtcggagaatccccttgagatgttcgaaaccgtgcctgtgtggaggagacagccagtccgggtgctgtccctttttgaagacatcaagaaagagctgacgagtttgggctttttggaaagtggttctgacccgggacaactgaagcatgtggttgatgtcacagacacagtgaggaaggatgtggaggagtggggacccttcgatcttgtgtacggcgccacacctcccctgggccacacctgtgaccgtcctcccagctggtacctgttccagttccaccggctcctgcagtacgcacggcccaagccaggcagccccaggcccttcttctggatgttcgtggacaatctggtgctgaacaaggaagacctggacgtcgcatctcgcttcctggagatggagccagtcaccatcccagatgtccacggcggatccttgcagaatgctgtccgcgtgtggagcaacatcccagccataaggagcaggcactgggctctggtttcggaagaagaattgtccctgctggcccagaacaagcagagctcgaagctcgcggccaagtggcccaccaagctggtgaagaactgctttctccccctaagagaatatttcaagtatttttcaacagaactcacttcctctttataaatgagtcactatactgtgaagaaaaagacttttcctagaacaaag

SEQ ID NO: 127520 - DNA, 4468 bp, Homo sapiens
  Payload ID: 4957
  Gene Symbol: DCLRE1A
  Gene Name: DNA cross-link repair 1A
  Uniprot ID: Q6PJP8
  ENST ID: ENST00000361384
  CDS Start-End: 919-4041
ggactctgagggctttttggagctcgctatgcttaacctggagatgattaaggccccgcttcctggcctcccagcctctaatgccaaaagataagggagaggctggcgtgtgaccccgttttgagtcaggtggacagagggctggccaccttcggaaccatgggtgcaatacggagtcagacctcaatacaagcccactctttcacatatttgaacttttttcacatatcaactttttttgttcactgtgcagggattgttcattgctgctggaggaagatcatggactgtcgcgggaaactgaagtggttgagtatccactagtcgtggatgagggcagtgacttcgcagttttttgcgaattacacatctctttgattatgttgtgactagttttgttagatagtcatttagtgtttgggatacctgttaagccctttgtccagggactgtggttggatttatgaattatttggacggttgtccacttgaaagaactgacagtagcttcataacaatgttacaaatctcgttctaagattaagctgttgaacctatatttgccattagcgcttaatttttgaagtattatttttatgaatcaagccctggaaaaggacaagatatttgaatgaaatagcacccataatggagaacttcacagttgctactcctgtgataggtttatcttagtttcattgtggtataaatggaatagcaggtgttgtcaggtacaaggtttgtagcttgccaatatgttcattaccaacactgcagattcccattgagttggtgggggttttgttacctttgttttttttctcagcaaaataattctataactttttgtttgtgacaagaaatggactttcagtttacttaagattaatacttcttgaatgataaaatcattttgccatgttagaagacatttccgaagaagacatttgggaatacaaatctaaaagaaaaccaaaacgagttgatccaaataatggctctaaaaatattctaaaatctgttgaaaaagcaacagatggaaaataccagtcaaaacggagtagaaacagaaaaagagccgcagaagctaaagaggtgaaggaccatgaagtgccccttggaaatgcaggttgtcagacttctgttgcttctagtcagaattcaagttgtggagatggtattcagcagacccaagacaaggaaactactccaggaaaactctgtagaactcaaaaaagccaacacgtgtccccaaagatacgtccagtttatgatggatactgtccaaattgccagatgcctttttcctcattgatagggcagacacctcgatggcatgtttttgaatgtttggattctccaccacgctctgaaacagagtgtcctgatggtcttctgtgtacctcaaccattccttttcattacaagagatacactcacttcctgctagctcaaagcagggctggtgatcatccttttagcagcccatcacctgcgtcaggtggcagtttcagtgagactaagtcaggcgtcctttgtagccttgaggaaagatggtcttcgtatcagaaccaaactgataactcggtttcaaatgatcccttattgatgacacagtattttaaaaagtctccgtctctgactgaagccagtgaaaagatttctactcatatccaaacatcccaacaagctctacaatttacagattttgttgagaatgacaaactagtgggagttgctttgcgtcttgcaaacaactcagaacacataaatttgccattgccagaaaatgacttcagtgactgtgaaatctcctattctccacttcaaagtgatgaagacactcatgatatcgatgaaaaaccggatgattcacaagaacaactgttttttaccgaaagctcaaaagatggcagcctcgaagaagatgatgacagctgtggtttttttaaaaaacgacatggtcccttactgaaggaccaggatgagagctgccccaaagtgaacagcttcttaactcgggataagtatgatgaaggattgtatagattcaatagtctaaatgatttgtctcaacctatttctcaaaataatgagagtactttgccttatgatctggcatgtactggtggtgattttgtgttgtttccacctgcattggcagggaagcttgctgcttctgttcatcaggcaactaaagcaaaacctgatgagccagaatttcactcagctcaatcaaataaacagaaacaggtaattgaagaatcatctgtttacaatcaagtttctcttccgttagttaagagtttaatgttgaaaccttttgaaagtcaggtagaagggtatctttcttcccaaccaacccaaaatacaattagaaaattatcaagtgagaacttgaatgctaagaataatactaactcagcatgtttctgcagaaaggcattagagggtgtgccagttggtaaagctacaattttaaatacagaaaacttgtctagtacacctgctccgaagtatttgaaaatattgccttctggtcttaagtataatgcaagacatccttctaccaaggtaatgaagcaaatggatataggtgtgtattttggactacctcccaaaagaaaggaagagaaattgctaggggaaagtgcattagaagggataaacttaaatccagttccaagtcctaatcaaaagaggtcctcgcagtgcaagaggaaagcagaaaaatctttaagtgatttagaatttgatgcaagtactttacatgagagtcagctttctgtggaactttctagtgagaggtcacagcgtcaaaaaaagagatgtagaaagtcaaattcactgcaggaaggagcgtgtcagaagagatcagatcaccttattaatacagaatctgaagcagtcaatttaagtaaagtcaaagtcttcacaaaatcagctcatggtgggctgcaaaggggcaacaagaaaatcccagagtcatctaatgtaggaggatcaagaaaaaagacatgtccattctataagaaaatacctggaaccggctttacagttgatgcctttcagtatggcgtggttgaaggttgcacagcctattttctcacacattttcattctgatcattatgctggattgtctaaacacttcacatttccagtttattgtagtgagataactggcaatttgttgaagaacaagcttcatgtgcaagaacaatatattcacccattgccactggacactgaatgtattgtgaatggtgtcaaagttgttttgcttgatgccaatcactgtccaggtgctgtcatgatcctcttttatcttcctaatggtactgtcatattacacacgggagacttcagagcagatcccagcatggaacgttctcttcttgcggaccagaaagtccatatgctgtacttagataccacatattgtagcccagaatacacctttccatctcagcaagaggttatccggtttgccatcaacactgcctttgaggctgtaactctaaacccacatgctcttgttgtctgtggcacttactctattggaaaagagaaagtcttcctagccattgctgatgttttaggttcaaaagtgggcatgtcccaggaaaaatataaaactctacagtgcctcaatataccagaaattaattcactcatcactaccgacatgtgcagttcattggttcaccttctcccaatgatgcaaattaattttaagggcttacagagtcatttgaagaagtgtggtgggaaatacaatcagattttggcatttcgacctacaggatggacacactctaacaagttcactagaatagcagatgttattccccagaccaaaggaaacatttcaatatatggaattccttacagtgaacacagcagctacctagaaatgaagcgctttgtccagtggctgaagccccagaaaatcatacctactgtaaatgtgggcacctggaaatctaggagcacaatggagaaatattttagagagtggaaattggaagctggatattgatgatacctccgaggattcagtagtagttaagttccttggatgtagcttgttagtagttaaatctatagaaatgtgaaatacactttgtgtggaaaaacctcatgaagattgttcagatactttattttctcatttatgtttgaacaacatgttcgtggtgctgaatgcctctcagcatcatcaaggataactgaaactgggtctccctgggacccttaatttcttgtcccctgccctccatgggcagttatattctgcatcaagccttagaagaggaagcaaaggcagattcagggaccaaaaggattaatgataattaataaagtagtttgaagcattatatatataagtaattatgtgtctttaaaattatgagatgaaacttttatatgacgtgtatacttaaataaaattaatataaaatttg

SEQ ID NO: 127521 - DNA, 4241 bp, Homo sapiens
  Payload ID: 4957
  Gene Symbol: DCLRE1A
  Gene Name: DNA cross-link repair 1A
  Uniprot ID: Q6PJP8
  ENST ID: ENST00000369305
  CDS Start-End: 696-3818
cgggaacttgttcccgccaagaccctaaagggattgttcattgctgctggaggaagatcatggactgtcgcgggaaactgaagtggttgagtatccactagtcgtggatgagggcagtgacttcgcagttttttgcgaattacacatctctttgattatgttgtgactagttttgttagatagtcatttagtgtttgggatacctgttaagccctttgtccagggactgtggttggatttatgaattatttggacggttgtccacttgaaagaactgacagtagcttcataacaatgttacaaatctcgttctaagattaagctgttgaacctatatttgccattagcgcttaatttttgaagtattatttttatgaatcaagccctggaaaaggacaagatatttgaatgaaatagcacccataatggagaacttcacagttgctactcctgtgataggtttatcttagtttcattgtggtataaatggaatagcaggtgttgtcaggtacaaggtttgtagcttgccaatatgttcattaccaacactgcagattcccattgagttggtgggggttttgttacctttgttttttttctcagcaaaataattctataactttttgtttgtgacaagaaatggactttcagtttacttaagattaatacttcttgaatgataaaatcattttgccatgttagaagacatttccgaagaagacatttgggaatacaaatctaaaagaaaaccaaaacgagttgatccaaataatggctctaaaaatattctaaaatctgttgaaaaagcaacagatggaaaataccagtcaaaacggagtagaaacagaaaaagagccgcagaagctaaagaggtgaaggaccatgaagtgccccttggaaatgcaggttgtcagacttctgttgcttctagtcagaattcaagttgtggagatggtattcagcagacccaagacaaggaaactactccaggaaaactctgtagaactcaaaaaagccaacacgtgtccccaaagatacgtccagtttatgatggatactgtccaaattgccagatgcctttttcctcattgatagggcagacacctcgatggcatgtttttgaatgtttggattctccaccacgctctgaaacagagtgtcctgatggtcttctgtgtacctcaaccattccttttcattacaagagatacactcacttcctgctagctcaaagcagggctggtgatcatccttttagcagcccatcacctgcgtcaggtggcagtttcagtgagactaagtcaggcgtcctttgtagccttgaggaaagatggtcttcgtatcagaaccaaactgataactcggtttcaaatgatcccttattgatgacacagtattttaaaaagtctccgtctctgactgaagccagtgaaaagatttctactcatatccaaacatcccaacaagctctacaatttacagattttgttgagaatgacaaactagtgggagttgctttgcgtcttgcaaacaactcagaacacataaatttgccattgccagaaaatgacttcagtgactgtgaaatctcctattctccacttcaaagtgatgaagacactcatgatatcgatgaaaaaccggatgattcacaagaacaactgttttttaccgaaagctcaaaagatggcagcctcgaagaagatgatgacagctgtggtttttttaaaaaacgacatggtcccttactgaaggaccaggatgagagctgccccaaagtgaacagcttcttaactcgggataagtatgatgaaggattgtatagattcaatagtctaaatgatttgtctcaacctatttctcaaaataatgagagtactttgccttatgatctggcatgtactggtggtgattttgtgttgtttccacctgcattggcagggaagcttgctgcttctgttcatcaggcaactaaagcaaaacctgatgagccagaatttcactcagctcaatcaaataaacagaaacaggtaattgaagaatcatctgtttacaatcaagtttctcttccgttagttaagagtttaatgttgaaaccttttgaaagtcaggtagaagggtatctttcttcccaaccaacccaaaatacaattagaaaattatcaagtgagaacttgaatgctaagaataatactaactcagcatgtttctgcagaaaggcattagagggtgtgccagttggtaaagctacaattttaaatacagaaaacttgtctagtacacctgctccgaagtatttgaaaatattgccttctggtcttaagtataatgcaagacatccttctaccaaggtaatgaagcaaatggatataggtgtgtattttggactacctcccaaaagaaaggaagagaaattgctaggggaaagtgcattagaagggataaacttaaatccagttccaagtcctaatcaaaagaggtcctcgcagtgcaagaggaaagcagaaaaatctttaagtgatttagaatttgatgcaagtactttacatgagagtcagctttctgtggaactttctagtgagaggtcacagcgtcaaaaaaagagatgtagaaagtcaaattcactgcaggaaggagcgtgtcagaagagatcagatcaccttattaatacagaatctgaagcagtcaatttaagtaaagtcaaagtcttcacaaaatcagctcatggtgggctgcaaaggggcaacaagaaaatcccagagtcatctaatgtaggaggatcaagaaaaaagacatgtccattctataagaaaatacctggaaccggctttacagttgatgcctttcagtatggcgtggttgaaggttgcacagcctattttctcacacattttcattctgatcattatgctggattgtctaaacacttcacatttccagtttattgtagtgagataactggcaatttgttgaagaacaagcttcatgtgcaagaacaatatattcacccattgccactggacactgaatgtattgtgaatggtgtcaaagttgttttgcttgatgccaatcactgtccaggtgctgtcatgatcctcttttatcttcctaatggtactgtcatattacacacgggagacttcagagcagatcccagcatggaacgttctcttcttgcggaccagaaagtccatatgctgtacttagataccacatattgtagcccagaatacacctttccatctcagcaagaggttatccggtttgccatcaacactgcctttgaggctgtaactctaaacccacatgctcttgttgtctgtggcacttactctattggaaaagagaaagtcttcctagccattgctgatgttttaggttcaaaagtgggcatgtcccaggaaaaatataaaactctacagtgcctcaatataccagaaattaattcactcatcactaccgacatgtgcagttcattggttcaccttctcccaatgatgcaaattaattttaagggcttacagagtcatttgaagaagtgtggtgggaaatacaatcagattttggcatttcgacctacaggatggacacactctaacaagttcactagaatagcagatgttattccccagaccaaaggaaacatttcaatatatggaattccttacagtgaacacagcagctacctagaaatgaagcgctttgtccagtggctgaagccccagaaaatcatacctactgtaaatgtgggcacctggaaatctaggagcacaatggagaaatattttagagagtggaaattggaagctggatattgatgatacctccgaggattcagtagtagttaagttccttggatgtagcttgttagtagttaaatctatagaaatgtgaaatacactttgtgtggaaaaacctcatgaagattgttcagatactttattttctcatttatgtttgaacaacatgttcgtggtgctgaatgcctctcagcatcatcaaggataactgaaactgggtctccctgggacccttaatttcttgtcccctgccctccatgggcagttatattctgcatcaagccttagaagaggaagcaaaggcagattcagggaccaaaaggattaatgataattaataaagtagtttgaagcattatatatataagtaattatgtgtctttaaaattatgagatgaaacttttatatgacgtgtatacttaaataaaattaatataaaa

SEQ ID NO: 127522 - DNA, 3940 bp, Homo sapiens
  Payload ID: 4958
  Gene Symbol: DCLRE1B
  Gene Name: DNA cross-link repair 1B
  Uniprot ID: Q9H816
  ENST ID: ENST00000369563
  CDS Start-End: 447-2045
accaaacagaagaccgctgccggtctccccgcgagcgagcgctaagcgtagtcccgactccgaccttaggatgcccttcccccaacctctcactctccaggcgcagctgcgcggctccctctggtggagctgcggcgggcaatcggaaatcggctactttggcctgtctcctccctgcagcgcgcgctttgagtgcccggctcggcctccgctcccgcgcggttgggagtgtccagcgccctccgcgatttgggctccagcgggcagggtgacttcctttttctgcccactctggtaacttattgctctgctgggctctttcccttagggtctctggccctgttcttgccccagcatgacttttatcgggacgccgttgtggaagcctcacgcaggagccctgcccccgtggagaagatcccactggtgactccaaccctaccaccatgaatggggtcctgatcccccatacgcccatcgcagtggacttctggagcctgcgccgggctggcaccgcacgtctcttcttcttgtctcacatgcactcggaccacaccgtgggcctgtctagcacctgggcccggcccctctactgctccccaattacagcccacctcttgcatcgtcacctacaggtatctaagcaatggatccaagccctggaggttggtgagagccatgtattacccctagatgaaattggacaagagaccatgaccgtaaccctcctcgatgccaatcactgtcctggttctgtcatgtttctctttgaaggatattttggaaccatcctctacacaggtgattttcgatacacaccatccatgctaaaggagccagccctgacactggggaaacagatccatactttatacctagacaacaccaattgcaatccagccctggttcttccttcccgacaagaagctgcccaccagattgtccagctcattcgaaaacacccacaacataacataaagattggactctacagcctgggaaaggaatcactgctggagcagctggccctggagtttcagacctgggtggtattgagtcctcggcgcctggagttggtacagctactgggcctggcagatgtgttcacagtggaggagaaggctggccgcatccatgcagtagaccatatggagatctgccattccaacatgctgcgttggaaccagacccaccctacgattgctatccttcccacaagccgaaaaatccacagctcccaccctgatatccacgtcatcccttactctgaccattcctcttactccgagcttcgtgcctttgtcgcagcactgaagccttgccaggtggtgcccattgtaagtcggcggccctgtggaggctttcaggacagtctgagccccaggatctccgtgcccctgattccggactctgtacagcaatacatgagttcttcctctagaaaaccaagccttctctggctgttagaaaggaggctaaagaggccgagaacccaaggtgttgtgtttgaatcccctgaggaaagtgctgatcaatctcaagctgacagagactcaaagaaggccaagaaagagaaactttctccctggcctgcggaccttgaaaagcagccttcccaccatcctttgcggatcaagaagcagttgttcccagatctctatagcaaagaatggaacaaggcagtgcctttctgtgagtctcaaaagagggtgactatgttgacggccccactgggattttcagtgcacttaaggtctacagatgaggagtttatttctcaaaaaaccagggaggaaattggtttagggtcccccttggtacccatgggagatgatgatggaggtccagaagccacagggaatcagagtgcctggatgggccatggttctcccctgtcccacagcagcaagggcacccctcttctagctactgaattcaggggtctagcactcaaatatcttctgactccagtgaactttttccaggcagggtattcttccaggagatttgaccagcaagtggaaaaataccataaaccctgctgaagacaggagagtacagaatgacaacattgagcccacactgcagttttgaagatagtaactgatggctggtgggaaagagtttgtttttggggcctacttttctatctttacaagactcttatgggcccaccgtggagcagcacttcccaaaacttgttcactggggtcctcgtgcctatggaatccttctttttataactaagtttaagaaatactttttttataaaatctttggagtatgcgtgagcaaattaaaagttctttgaagtcctacagtaacttaatctgtttaaccttgtttaacccagtatttctcaaacttttgtgaacatgcaatcatcttatgtgggtacagaaagaggtaaagagtctgaatcaaaaaggaccaggttattgctgttgctgttttgtggtgtcatgagccattctccatgtccccttctccctcttctcagatcaaaatccctagggagttctatttttaaaattatgaactatggcgctgcatgcttcaatcctgaacgtcactgacttgctgtgaccatccaaataattttcctgtctctgcctctgggagggaacaggaagcgatgaagaggtcttggaacagtagtgaaaattctacctctatgtccttcatgaggatgtgcagtatcccagtatcactgggatccatgtggaacagagccagctggggggttgggcagctctctccaaggcagtacctagagcccagctgaacaacaaggctttgggtgtgaagggactccccagcctggagaccctatttggctgaaacagttacaaaatatcaaatgtgttgtcagatattcctccaattgttcacatagctgggatatttgttgctcccctcaccccttggattatgtagggagccagtgcacacagcctgtttgttttagtatccaaggaagagaccaaggagccagctggcgggaaggggtgggggtgtgcagtctgccctgtccttctgctcataacctgacaaaatgccaaactagtaagcaggatagctgataccacggctatgagggagtaggctctgagagggcacagacttgtggagctgggcgtctggatcaaaactgctttgggatggaacctcgagccctagcagtgaagaagattccatttcttgtccaggggatttaaaagagttttctgctttgagagagaaatagagagtttagaaagcaattgctcttgggaaagctatacacagctctgttttgtcaatgacctttgttgtaagtctcccaacgtcctattaggagccacagcaggtgaggcatttggtgcagcaggaaacatggggactgcctaggctcgaatctgtggcaccctgagcaattacttaaattgtggagcctagttcctcatctgtaagatggacttgagattcctacctctcatgattactatggagattgaataattggtaaaattctcctagctcagtgactgccacaggatgggtctttcagattttggttctctttagcttctggttcttgaaagaaattaatctgtatataacataagaaactttgaaagtcaaaaaaacaaaaaattttaattcctcgtagattaattgatttgctatcttttagtttttttttctatgcatgtagatgtattaaatatgtaaatgtttttcaaagttgaggtaatattgtatagaattttatagcctacattttaatttcttgatatcttaagcatttcacttattagatattgttcaaaaatgccatttttaatatttgtataataccctatcatgtgagtataccttaactaagccattcccatattcaacattttgtgtactgtttttctaattacatatattacaatgaacaaccttatgcata

SEQ ID NO: 127523 - DNA, 2228 bp, Homo sapiens
  Payload ID: 4959
  Gene Symbol: DCLRE1C
  Gene Name: DNA cross-link repair 1C
  Uniprot ID: Q96SD1
  ENST ID: ENST00000357717
  CDS Start-End: 253-1986
ggcttcagctgcggttttggggtcccggactctgggatcggcggcgctatgagttctttcgaggggcagatggccgagtatccaactatctccatagaccgcttcgatagggagaacctgagggcccgcgcctacttcctgtcccactgccacaaagatcacatgaaaggattaagagcccctaccttgaaaagaaggttggagtgcagatatctattgaaatcgagactcctacccagatatctttagtggatgaagcatcaggagaggtttttatttcagggcaataatggaactgtcctgtacacaggagacttcagattggcgcaaggagaagctgctagaatggagcttctgcactccgggggcagagtcaaagacatccaaagtgtatatttggatactacgttctgtgatccaagattttaccaaattccaagtcgggaggagtgtttaagtggagtcttagagctggtccgaagctggatcactcggagcccgtaccatgttgtgtggctgaactgcaaagcggcttatggctatgaatatctgttcaccaaccttagtgaagaattaggagtccaggttcatgtgaataagctagacatgtttaggaacatgcctgagatccttcatcatctcacaacagaccgcaacactcagatccatgcatgccggcatcccaaggcagaggaatattttcagtggagcaaattaccctgtggaattacttccagaaatagaattccactccacataatcagcattaagccatccaccatgtggtttggagaaaggagcagaaaaacaaatgtaattgtgaggactggagagagttcatacagagcttgtttttcttttcactcctcctacagtgagattaaagatttcttgagctacctctgtcctgtgaacgcatatccaaatgtcattccagttggcacaactatggataaagttgtcgaaatcttaaagcctttatgccggtcttcccaaagtacggagccaaagtataaaccactgggaaaactgaagagagctagaacagttcaccgagactcagaggaggaagatgactatctctttgatgatcctctgccaatacctttaaggcacaaagttccatacccggaaacttttcaccctgaggtattttcaatgactgcagtatcagaaaagcagcctgaaaaactgagacaaaccccaggatgctgcagagcagagtgtatgcagagctctcgtttcacaaactttgtagattgtgaagaatccaacagtgaaagtgaagaagaagtaggaatcccagcttcactgcaaggagatctgggctctgtacttcacctgcaaaaggctgatggggatgtaccccagtgggaagtattctttaaaagaaatgatgaaatcacagatgagagtttggaaaacttcccttcctccacagtggcagggggatctcagtcaccaaagcttttcagtgactctgatggagaatcaactcacatctcctcccagaattcttcccagtcaacacacataacagaacaaggaagtcaaggctgggacagccaatctgatactgttttgttatcttcccaagagagaaacagtggggatattacttccttggacaaagctgactacagaccaacaatcaaagagaatattcctgcctctctcatggaacaaaatgtaatttgcccaaaggatacttactctgatttgaaaagcagagataaagatgtgacaatagttcctagtactggagaaccaactactctaagcagtgagacacatatacccgaggaaaaaagtttgctaaatcttagcacaaatgcagattcccagagctcttctgattttgaagttccctcaactccagaagctgagttacctaaacgagagcatttacaatatttatatgagaagctggcaactggtgagagtatagcagtcaaaaaaagaaaatgctcactcttagatacctaagaattcaaagcgtttcaacctagagcaaccactaaaaaacctgcacagagatgacagtcaatattacaatagagaaaatacagtacttaaaaatgttcaaataacctggttgggtgtggtggctcacacttgtaatcccagcactttgaggtgggcaatggcttgagcccaggagttcgacaccagcctggccaacacagtgaaatgtgtctctacttacaaaaaaaaaaaaaaaaaaaaaa

SEQ ID NO: 127524 - DNA, 833 bp, Homo sapiens
  Payload ID: 4959
  Gene Symbol: DCLRE1C
  Gene Name: DNA cross-link repair 1C
  ENST ID: ENST00000378241
  CDS Start-End: 581-833
gcggcgctatgagttctttcgaggggcagatggccgagtatccaactatctccatagaccgcttcgatagggagaacctgagggcccgcgcctacttcctgtcccactgccacaaagatcacatgaaaggattaagagcccctaccttgaaaagaaggttggagtgcagatgaggaaactgaggaaccagagaggttaaattagttgcccagtgtcacacagccagtaagtggcaggaccaggattccagccagcttgaaggtttatctatactgttcacctgtgactaaggagttgttgttaacgagcccgaaatacagattttggaagaaacgaatttgctggtctcccgctttggctctgaagcacatgcacctgccccaggactcggaggagctgcacacgggcacccagcagaagctgatgttgctgcggccctgccccagactctgagttaagccagaagatatctattgaaatcgagactcctacccagatatctttagtggatgaagcatcaggagagaaggaagagattgttgtgactctcttaccagctggtcactgtccgggatcagttatgtttttatttcagggcaataatggaactgtcctgtacacaggagacttcagattggcgcaaggagaagctgctagaatggagcttctgcactccgggggcagagtcaaagacatccaaagtgtatatttggatactacgttctgtgatccaagattttaccaaattccaagtcgggaggagtgtttaagtggagtcttagagctggtccgaagctggatcactcggagcccgtaccatgttgtgtggctga

SEQ ID NO: 127525 - DNA, 1933 bp, Homo sapiens
  Payload ID: 4959
  Gene Symbol: DCLRE1C
  Gene Name: DNA cross-link repair 1C
  ENST ID: ENST00000378242
  CDS Start-End: 676-1713
aggagtaaataagtgcaattcttttgttgttcttttttggagatgaggtgtctctgtgttgcccaggctggcctcaaatccctgggcttaagcaatcctcctgcctcagccttgagtagctgggatcacagacatgtaccactgtgcccagctaagaaatgcaattctgagaccttgggtttttgtgtatattatagttaatgcccagctaaattctaacttatttgaaaagggatttgttaaacataagcaactgaccttcttggacaaggaaagcaatatattaaaaaagagaaaaaaaaaagaatctttgagtcccattggtgattctcagctcttactgtggatcagaatcacctggggaatatttaaatgtactgatttctaggcccactagtactcagtgttcaggagatctttgggagtgaggcccaggcattggatatttttttcccaagaggtccctggtgatccccacgtgcagccagcattgagaaccacagccataagagagttctgcttctctttccccagcctccctttatctcccctaacaacctgtttcatcgtagagattgttgatccatgtgattttcctttttctagattaaagatttcttgagctacctctgtcctgtgaacgcatatccaaatgtcattccagttggcacaactatggataaagttgtcgaaatcttaaagcctttatgccggtcttcccaaagtacggagccaaagtataaaccactgggaaaactgaagagagctagaacagttcaccgagactcagaggaggaagatgactatctctttgatgatcctctgccaatacctttaaggcacaaagttccatacccggaaacttttcaccctgaggtattttcaatgactgcagtatcagaaaagcagcctgaaaaactgagacaaaccccaggatgctgcagagcagagtgtatgcagagctctcgtttcacaaactttgtagattgtgaagaatccaacagtgaaagtgaagaagaagtaggaatcccagcttcactgcaaggagatctgggctctgtacttcacctgcaaaaggctgatggggatgtaccccagtgggaagtattctttaaaagaaatgatgaaatcacagatgagagtttggaaaacttcccttcctccacagtggcagggggatctcagtcaccaaagcttttcagtgactctgatggagaatcaactcacatctcctcccagaattcttcccagtcaacacacataacagaacaaggaagtcaaggctgggacagccaatctgatactgttttgttatcttcccaagagagaaacagtggggatattacttccttggacaaagctgactacagaccaacaatcaaagagaatattcctgcctctctcatggaacaaaatgtaatttgcccaaaggatacttactctgatttgaaaagcagagataaagatgtgacaatagttcctagtactggagaaccaactactctaagcagtgagacacatatacccgaggaaaaaagtttgctaaatcttagcacaaatgcagattcccagagctcttctgattttgaagttccctcaactccagaagctgagttacctaaacgagagcatttacaatatttatatgagaagctggcaactggtgagagtatagcagtcaaaaaaagaaaatgctcactcttagatacctaagaattcaaagcgtttcaacctagagcaaccactaaaaaacctgcacagagatgacagtcaatattacaatagagaaaatacagtacttaaaaatgttcaaataacctggttgggtgtggtggctcacacttgtaatcccagcactttgaggtgggcaatggcttgagcccaggagttcgacaccagcctggccaacacagtgaaatgtgtctctacttac

SEQ ID NO: 127526 - DNA, 2637 bp, Homo sapiens
  Payload ID: 4959
  Gene Symbol: DCLRE1C
  Gene Name: DNA cross-link repair 1C
  Uniprot ID: Q96SD1
  ENST ID: ENST00000378246
  CDS Start-End: 375-2108
gcttcccggaagtggcggcgcggtcagggctggccttggcttcagctgcggttttggggtcccggactctgggatcggcggcgctatgagttctttcgaggggcagatggccgagtatccaactatctccatagaccgcttcgatagggagaacctgagggcccgcgcctacttcctgtcccactgccacaaagatcacatgaaaggattaagagcccctaccttgaaaagaaggttggagtgcagcttgaaggtttatctatactgttcacctgtgactaaggagttgttgttaacgagcccgaaatacagattttggaagaaacgaattatatctattgaaatcgagactcctacccagatatctttagtggatgaagcatcaggagaggtttttatttcagggcaataatggaactgtcctgtacacaggagacttcagattggcgcaaggagaagctgctagaatggagcttctgcactccgggggcagagtcaaagacatccaaagtgtatatttggatactacgttctgtgatccaagattttaccaaattccaagtcgggaggagtgtttaagtggagtcttagagctggtccgaagctggatcactcggagcccgtaccatgttgtgtggctgaactgcaaagcggcttatggctatgaatatctgttcaccaaccttagtgaagaattaggagtccaggttcatgtgaataagctagacatgtttaggaacatgcctgagatccttcatcatctcacaacagaccgcaacactcagatccatgcatgccggcatcccaaggcagaggaatattttcagtggagcaaattaccctgtggaattacttccagaaatagaattccactccacataatcagcattaagccatccaccatgtggtttggagaaaggagcagaaaaacaaatgtaattgtgaggactggagagagttcatacagagcttgtttttcttttcactcctcctacagtgagattaaagatttcttgagctacctctgtcctgtgaacgcatatccaaatgtcattccagttggcacaactatggataaagttgtcgaaatcttaaagcctttatgccggtcttcccaaagtacggagccaaagtataaaccactgggaaaactgaagagagctagaacagttcaccgagactcagaggaggaagatgactatctctttgatgatcctctgccaatacctttaaggcacaaagttccatacccggaaacttttcaccctgaggtattttcaatgactgcagtatcagaaaagcagcctgaaaaactgagacaaaccccaggatgctgcagagcagagtgtatgcagagctctcgtttcacaaactttgtagattgtgaagaatccaacagtgaaagtgaagaagaagtaggaatcccagcttcactgcaaggagatctgggctctgtacttcacctgcaaaaggctgatggggatgtaccccagtgggaagtattctttaaaagaaatgatgaaatcacagatgagagtttggaaaacttcccttcctccacagtggcagggggatctcagtcaccaaagcttttcagtgactctgatggagaatcaactcacatctcctcccagaattcttcccagtcaacacacataacagaacaaggaagtcaaggctgggacagccaatctgatactgttttgttatcttcccaagagagaaacagtggggatattacttccttggacaaagctgactacagaccaacaatcaaagagaatattcctgcctctctcatggaacaaaatgtaatttgcccaaaggatacttactctgatttgaaaagcagagataaagatgtgacaatagttcctagtactggagaaccaactactctaagcagtgagacacatatacccgaggaaaaaagtttgctaaatcttagcacaaatgcagattcccagagctcttctgattttgaagttccctcaactccagaagctgagttacctaaacgagagcatttacaatatttatatgagaagctggcaactggtgagagtatagcagtcaaaaaaagaaaatgctcactcttagatacctaagaattcaaagcgtttcaacctagagcaaccactaaaaaacctgcacagagatgacagtcaatattacaatagagaaaatacagtacttaaaaatgttcaaataacctggttgggtgtggtggctcacacttgtaatcccagcactttgaggtgggcaatggcttgagcccaggagttcgacaccagcctggccaacacagtgaaatgtgtctctacttacaaaaaaaaaaaaaaaaaaaaaagccaggcatggtggtgggctactctggaggcccttgaggatcacttgagcccaggagattgaggctgcagtgagccatgactgtgccactgcacctctagtctgggtgacagagcaagaccctgtttaaaaaagaaaaaggccaggcacggtggctcatgcctgtaatcccagctacgcaggaggccaaggcaggagaatcacttgaacctgggaggtggtggttgcagtgagctgagattgtgtcattgcactccagcctgggcaacaagagcaaaactctgtctc

SEQ ID NO: 127527 - DNA, 2246 bp, Homo sapiens
  Payload ID: 4959
  Gene Symbol: DCLRE1C
  Gene Name: DNA cross-link repair 1C
  Uniprot ID: Q96SD1
  ENST ID: ENST00000378249
  CDS Start-End: 276-2009
gcggttttggggtcccggactctgggatcggcggcgctatgagttctttcgaggggcagatggccgagtatccaactatctccatagaccgcttcgatagggagaacctgagggcccgcgcctacttcctgtcccactgccacaaagcttgaaggtttatctatactgttcacctgtgactaaggagttgttgttaacgagcccgaaatacagattttggaagaaacgaattatatctattgaaatcgagactcctacccagatatctttagtggatgaagcatcaggagaggtttttatttcagggcaataatggaactgtcctgtacacaggagacttcagattggcgcaaggagaagctgctagaatggagcttctgcactccgggggcagagtcaaagacatccaaagtgtatatttggatactacgttctgtgatccaagattttaccaaattccaagtcgggaggagtgtttaagtggagtcttagagctggtccgaagctggatcactcggagcccgtaccatgttgtgtggctgaactgcaaagcggcttatggctatgaatatctgttcaccaaccttagtgaagaattaggagtccaggttcatgtgaataagctagacatgtttaggaacatgcctgagatccttcatcatctcacaacagaccgcaacactcagatccatgcatgccggcatcccaaggcagaggaatattttcagtggagcaaattaccctgtggaattacttccagaaatagaattccactccacataatcagcattaagccatccaccatgtggtttggagaaaggagcagaaaaacaaatgtaattgtgaggactggagagagttcatacagagcttgtttttcttttcactcctcctacagtgagattaaagatttcttgagctacctctgtcctgtgaacgcatatccaaatgtcattccagttggcacaactatggataaagttgtcgaaatcttaaagcctttatgccggtcttcccaaagtacggagccaaagtataaaccactgggaaaactgaagagagctagaacagttcaccgagactcagaggaggaagatgactatctctttgatgatcctctgccaatacctttaaggcacaaagttccatacccggaaacttttcaccctgaggtattttcaatgactgcagtatcagaaaagcagcctgaaaaactgagacaaaccccaggatgctgcagagcagagtgtatgcagagctctcgtttcacaaactttgtagattgtgaagaatccaacagtgaaagtgaagaagaagtaggaatcccagcttcactgcaaggagatctgggctctgtacttcacctgcaaaaggctgatggggatgtaccccagtgggaagtattctttaaaagaaatgatgaaatcacagatgagagtttggaaaacttcccttcctccacagtggcagggggatctcagtcaccaaagcttttcagtgactctgatggagaatcaactcacatctcctcccagaattcttcccagtcaacacacataacagaacaaggaagtcaaggctgggacagccaatctgatactgttttgttatcttcccaagagagaaacagtggggatattacttccttggacaaagctgactacagaccaacaatcaaagagaatattcctgcctctctcatggaacaaaatgtaatttgcccaaaggatacttactctgatttgaaaagcagagataaagatgtgacaatagttcctagtactggagaaccaactactctaagcagtgagacacatatacccgaggaaaaaagtttgctaaatcttagcacaaatgcagattcccagagctcttctgattttgaagttccctcaactccagaagctgagttacctaaacgagagcatttacaatatttatatgagaagctggcaactggtgagagtatagcagtcaaaaaaagaaaatgctcactcttagatacctaagaattcaaagcgtttcaacctagagcaaccactaaaaaacctgcacagagatgacagtcaatattacaatagagaaaatacagtacttaaaaatgttcaaataacctggttgggtgtggtggctcacacttgtaatcccagcactttgaggtgggcaatggcttgagcccaggagttcgacaccagcctggccaacacagtgaaatgtgtctctacttacaaaaaaaaaaaaaaaaa

SEQ ID NO: 127528 - DNA, 2485 bp, Homo sapiens
  Payload ID: 4959
  Gene Symbol: DCLRE1C
  Gene Name: DNA cross-link repair 1C
  Uniprot ID: Q96SD1
  ENST ID: ENST00000378254
  CDS Start-End: 530-2248
gcggttttggggtcccggactctgggatcggcggcgctatgagttctttcgaggggcagatggccgagtatccaactatctccatagaccgcttcgatagggagaacctgagggcccgcgcctacttcctgtcccactgccacaaagatcacatgaaaggattaagagcccctaccttgaaaagaaggttggagtgcagacacacctgatcacatacaagcgcgtatttccaagtaacaatggtgagggaccactgttggaggaggtccagggacaccgtgtttccacccccaccttgtgctcttggtggcactgaaatggtgtgcatagcttgaaggtttatctatactgttcacctgtgactaaggagttgttgttaacgagcccgaaatacagattttggaagaaacgaattatatctattgaaatcgagactcctacccagatatctttagtggatgaagcatcaggagagaaggaagagattgttgtgactctcttaccagctggtcactgtccgggatcagttatgtttttatttcagggcaataatggaactgtcctgtacacaggagacttcagattggcgcaaggagaagctgctagaatggagcttctgcactccgggggcagagtcaaagacatccaaagtgtatatttggatactacgttctgtgatccaagattttaccaaattccaagtcgggaggagtgtttaagtggagtcttagagctggtccgaagctggatcactcggagcccgtaccatgttgtgtggctgaactgcaaagcggcttatggctatgaatatctgttcaccaaccttagtgaagaattaggagtccaggttcatgtgaataagctagacatgtttaggaacatgcctgagatccttcatcatctcacaacagaccgcaacactcagatccatgcatgccggcatcccaaggcagaggaatattttcagtggagcaaattaccctgtggaattacttccagaaatagaattccactccacataatcagcattaagccatccaccatgtggtttggagaaaggagcagaaaaacaaatgtaattgtgaggactggagagagttcatacagagcttgtttttcttttcactcctcctacagtgagattaaagatttcttgagctacctctgtcctgtgaacgcatatccaaatgtcattccagttggcacaactatggataaagttgtcgaaatcttaaagcctttatgccggtcttcccaaagtacggagccaaagtataaaccactgggaaaactgaagagagctagaacagttcaccgagactcagaggaggaagatgactatctctttgatgatcctctgccaatacctttaaggcacaaagttccatacccggaaacttttcaccctgaggtattttcaatgactgcagtatcagaaaagcagcctgaaaaactgagacaaaccccaggatgctgcagagcagagtgtatgcagagctctcgtttcacaaactttgtagattgtgaagaatccaacagtgaaagtgaagaagaagtaggaatcccagcttcactgcaaggagatctgggctctgtacttcacctgcaaaaggctgatggggatgtaccccagtgggaagtattctttaaaagaaatgatgaaatcacagatgagagtttggaaaacttcccttcctccacagtggcagggggatctcagtcaccaaagcttttcagtgactctgatggagaatcaactcacatctcctcccagaattcttcccagtcaacacacataacagaacaaggaagtcaaggctgggacagccaatctgatactgttttgttatcttcccaagagagaaacagtggggatattacttccttggacaaagctgactacagaccaacaatcaaagagaatattcctgcctctctcatggaacaaaatgtaatttgcccaaaggatacttactctgatttgaaaagcagagataaagatgtgacaatagttcctagtactggagaaccaactactctaagcagtgagacacatatacccgaggaaaaaagtttgctaaatcttagcacaaatgcagattcccagagctcttctgattttgaagttccctcaactccagaagctgagttacctaaacgagagcatttacaatatttatatgagaagctggcaactggtgagagtatagcagtcaaaaaaagaaaatgctcactcttagatacctaagaattcaaagcgtttcaacctagagcaaccactaaaaaacctgcacagagatgacagtcaatattacaatagagaaaatacagtacttaaaaatgttcaaataacctggttgggtgtggtggctcacacttgtaatcccagcactttgaggtgggcaatggcttgagcccaggagttcgacaccagcctggccaacacagtgaaatgtgtctctacttacaaaaaaaaaaaaaaaaa

SEQ ID NO: 127529 - DNA, 2807 bp, Homo sapiens
  Payload ID: 4959
  Gene Symbol: DCLRE1C
  Gene Name: DNA cross-link repair 1C
  Uniprot ID: Q96SD1
  ENST ID: ENST00000378255
  CDS Start-End: 852-2570
gcggttttggggtcccggactctgggatcggcggcgctatgagttctttcgaggggcagatggccgagtatccaactatctccatagaccgcttcgatagggagaacctgagggcccgcgcctacttcctgtcccactgccacaaagatcacatgaaaggattaagagcccctaccttgaaaagaaggttggagtgcagacacacctgatcacatacaagcgcgtatttccaagtaacaatggtgagggaccactgttggaggaggtccagggacaccgtgtttccacccccaccttgtgctcttggtggcactgaaatggtgtgcatagcttgaaggtttatctatactgttcacctgtgactaaggagttgttgttaacgagcccgaaatacagattttggaagaaacgaattagcagtcacaacagcagggttgttcctgttgtctctggcattcagcttgaagttactacaggtcagcccggccagcagtcaggaaggaaagctggaagagaagtggaggggaacagagacaaactggaaggcagaatggcccactaggacagaccgaaacccacttctgtctctcacttcctctggcctcaatagtgctggtctcccgctttggctctgaagcacatgcacctgccccaggactcggaggagctgcacacgggcacccagcagaagctgatgttgctgcggccctgccccagactctgagttaagccagaagatatctattgaaatcgagactcctacccagatatctttagtggatgaagcatcaggagagaaggaagagattgttgtgactctcttaccagctggtcactgtccgggatcagttatgtttttatttcagggcaataatggaactgtcctgtacacaggagacttcagattggcgcaaggagaagctgctagaatggagcttctgcactccgggggcagagtcaaagacatccaaagtgtatatttggatactacgttctgtgatccaagattttaccaaattccaagtcgggaggagtgtttaagtggagtcttagagctggtccgaagctggatcactcggagcccgtaccatgttgtgtggctgaactgcaaagcggcttatggctatgaatatctgttcaccaaccttagtgaagaattaggagtccaggttcatgtgaataagctagacatgtttaggaacatgcctgagatccttcatcatctcacaacagaccgcaacactcagatccatgcatgccggcatcccaaggcagaggaatattttcagtggagcaaattaccctgtggaattacttccagaaatagaattccactccacataatcagcattaagccatccaccatgtggtttggagaaaggagcagaaaaacaaatgtaattgtgaggactggagagagttcatacagagcttgtttttcttttcactcctcctacagtgagattaaagatttcttgagctacctctgtcctgtgaacgcatatccaaatgtcattccagttggcacaactatggataaagttgtcgaaatcttaaagcctttatgccggtcttcccaaagtacggagccaaagtataaaccactgggaaaactgaagagagctagaacagttcaccgagactcagaggaggaagatgactatctctttgatgatcctctgccaatacctttaaggcacaaagttccatacccggaaacttttcaccctgaggtattttcaatgactgcagtatcagaaaagcagcctgaaaaactgagacaaaccccaggatgctgcagagcagagtgtatgcagagctctcgtttcacaaactttgtagattgtgaagaatccaacagtgaaagtgaagaagaagtaggaatcccagcttcactgcaaggagatctgggctctgtacttcacctgcaaaaggctgatggggatgtaccccagtgggaagtattctttaaaagaaatgatgaaatcacagatgagagtttggaaaacttcccttcctccacagtggcagggggatctcagtcaccaaagcttttcagtgactctgatggagaatcaactcacatctcctcccagaattcttcccagtcaacacacataacagaacaaggaagtcaaggctgggacagccaatctgatactgttttgttatcttcccaagagagaaacagtggggatattacttccttggacaaagctgactacagaccaacaatcaaagagaatattcctgcctctctcatggaacaaaatgtaatttgcccaaaggatacttactctgatttgaaaagcagagataaagatgtgacaatagttcctagtactggagaaccaactactctaagcagtgagacacatatacccgaggaaaaaagtttgctaaatcttagcacaaatgcagattcccagagctcttctgattttgaagttccctcaactccagaagctgagttacctaaacgagagcatttacaatatttatatgagaagctggcaactggtgagagtatagcagtcaaaaaaagaaaatgctcactcttagatacctaagaattcaaagcgtttcaacctagagcaaccactaaaaaacctgcacagagatgacagtcaatattacaatagagaaaatacagtacttaaaaatgttcaaataacctggttgggtgtggtggctcacacttgtaatcccagcactttgaggtgggcaatggcttgagcccaggagttcgacaccagcctggccaacacagtgaaatgtgtctctacttacaaaaaaaaaaaaaaaaa

SEQ ID NO: 127530 - DNA, 2463 bp, Homo sapiens
  Payload ID: 4959
  Gene Symbol: DCLRE1C
  Gene Name: DNA cross-link repair 1C
  Uniprot ID: Q96SD1
  ENST ID: ENST00000378258
  CDS Start-End: 508-2226
tcagggctggccttggcttcagctgcggttttggggtcccggactctgggatcggcggcgctatgagttctttcgaggggcagatggccgagtatccaactatctccatagaccgcttcgatagggagaacctgagggcccgcgcctacttcctgtcccactgccacaaagatcacatgaaaggattaagagcccctaccttgaaaagaaggttggagtgcagatgaggaaactgaggaaccagagaggttaaattagttgcccagtgtcacacagccagtaagtggcaggaccaggattccagccagcttgaaggtttatctatactgttcacctgtgactaaggagttgttgttaacgagcccgaaatacagattttggaagaaacgaattatatctattgaaatcgagactcctacccagatatctttagtggatgaagcatcaggagagaaggaagagattgttgtgactctcttaccagctggtcactgtccgggatcagttatgtttttatttcagggcaataatggaactgtcctgtacacaggagacttcagattggcgcaaggagaagctgctagaatggagcttctgcactccgggggcagagtcaaagacatccaaagtgtatatttggatactacgttctgtgatccaagattttaccaaattccaagtcgggaggagtgtttaagtggagtcttagagctggtccgaagctggatcactcggagcccgtaccatgttgtgtggctgaactgcaaagcggcttatggctatgaatatctgttcaccaaccttagtgaagaattaggagtccaggttcatgtgaataagctagacatgtttaggaacatgcctgagatccttcatcatctcacaacagaccgcaacactcagatccatgcatgccggcatcccaaggcagaggaatattttcagtggagcaaattaccctgtggaattacttccagaaatagaattccactccacataatcagcattaagccatccaccatgtggtttggagaaaggagcagaaaaacaaatgtaattgtgaggactggagagagttcatacagagcttgtttttcttttcactcctcctacagtgagattaaagatttcttgagctacctctgtcctgtgaacgcatatccaaatgtcattccagttggcacaactatggataaagttgtcgaaatcttaaagcctttatgccggtcttcccaaagtacggagccaaagtataaaccactgggaaaactgaagagagctagaacagttcaccgagactcagaggaggaagatgactatctctttgatgatcctctgccaatacctttaaggcacaaagttccatacccggaaacttttcaccctgaggtattttcaatgactgcagtatcagaaaagcagcctgaaaaactgagacaaaccccaggatgctgcagagcagagtgtatgcagagctctcgtttcacaaactttgtagattgtgaagaatccaacagtgaaagtgaagaagaagtaggaatcccagcttcactgcaaggagatctgggctctgtacttcacctgcaaaaggctgatggggatgtaccccagtgggaagtattctttaaaagaaatgatgaaatcacagatgagagtttggaaaacttcccttcctccacagtggcagggggatctcagtcaccaaagcttttcagtgactctgatggagaatcaactcacatctcctcccagaattcttcccagtcaacacacataacagaacaaggaagtcaaggctgggacagccaatctgatactgttttgttatcttcccaagagagaaacagtggggatattacttccttggacaaagctgactacagaccaacaatcaaagagaatattcctgcctctctcatggaacaaaatgtaatttgcccaaaggatacttactctgatttgaaaagcagagataaagatgtgacaatagttcctagtactggagaaccaactactctaagcagtgagacacatatacccgaggaaaaaagtttgctaaatcttagcacaaatgcagattcccagagctcttctgattttgaagttccctcaactccagaagctgagttacctaaacgagagcatttacaatatttatatgagaagctggcaactggtgagagtatagcagtcaaaaaaagaaaatgctcactcttagatacctaagaattcaaagcgtttcaacctagagcaaccactaaaaaacctgcacagagatgacagtcaatattacaatagagaaaatacagtacttaaaaatgttcaaataacctggttgggtgtggtggctcacacttgtaatcccagcactttgaggtgggcaatggcttgagcccaggagttcgacaccagcctggccaacacagtgaaatgtgtctctacttacaaaaaaaaaaaaaaaaa

SEQ ID NO: 127531 - DNA, 2354 bp, Homo sapiens
  Payload ID: 4959
  Gene Symbol: DCLRE1C
  Gene Name: DNA cross-link repair 1C
  Uniprot ID: Q96SD1
  ENST ID: ENST00000378278
  CDS Start-End: 39-2117
gcggttttggggtcccggactctgggatcggcggcgctatgagttctttcgaggggcagatggccgagtatccaactatctccatagaccgcttcgatagggagaacctgagggcccgcgcctacttcctgtcccactgccacaaagatcacatgaaaggattaagagcccctaccttgaaaagaaggttggagtgcagcttgaaggtttatctatactgttcacctgtgactaaggagttgttgttaacgagcccgaaatacagattttggaagaaacgaattatatctattgaaatcgagactcctacccagatatctttagtggatgaagcatcaggagagaaggaagagattgttgtgactctcttaccagctggtcactgtccgggatcagttatgtttttatttcagggcaataatggaactgtcctgtacacaggagacttcagattggcgcaaggagaagctgctagaatggagcttctgcactccgggggcagagtcaaagacatccaaagtgtatatttggatactacgttctgtgatccaagattttaccaaattccaagtcgggaggagtgtttaagtggagtcttagagctggtccgaagctggatcactcggagcccgtaccatgttgtgtggctgaactgcaaagcggcttatggctatgaatatctgttcaccaaccttagtgaagaattaggagtccaggttcatgtgaataagctagacatgtttaggaacatgcctgagatccttcatcatctcacaacagaccgcaacactcagatccatgcatgccggcatcccaaggcagaggaatattttcagtggagcaaattaccctgtggaattacttccagaaatagaattccactccacataatcagcattaagccatccaccatgtggtttggagaaaggagcagaaaaacaaatgtaattgtgaggactggagagagttcatacagagcttgtttttcttttcactcctcctacagtgagattaaagatttcttgagctacctctgtcctgtgaacgcatatccaaatgtcattccagttggcacaactatggataaagttgtcgaaatcttaaagcctttatgccggtcttcccaaagtacggagccaaagtataaaccactgggaaaactgaagagagctagaacagttcaccgagactcagaggaggaagatgactatctctttgatgatcctctgccaatacctttaaggcacaaagttccatacccggaaacttttcaccctgaggtattttcaatgactgcagtatcagaaaagcagcctgaaaaactgagacaaaccccaggatgctgcagagcagagtgtatgcagagctctcgtttcacaaactttgtagattgtgaagaatccaacagtgaaagtgaagaagaagtaggaatcccagcttcactgcaaggagatctgggctctgtacttcacctgcaaaaggctgatggggatgtaccccagtgggaagtattctttaaaagaaatgatgaaatcacagatgagagtttggaaaacttcccttcctccacagtggcagggggatctcagtcaccaaagcttttcagtgactctgatggagaatcaactcacatctcctcccagaattcttcccagtcaacacacataacagaacaaggaagtcaaggctgggacagccaatctgatactgttttgttatcttcccaagagagaaacagtggggatattacttccttggacaaagctgactacagaccaacaatcaaagagaatattcctgcctctctcatggaacaaaatgtaatttgcccaaaggatacttactctgatttgaaaagcagagataaagatgtgacaatagttcctagtactggagaaccaactactctaagcagtgagacacatatacccgaggaaaaaagtttgctaaatcttagcacaaatgcagattcccagagctcttctgattttgaagttccctcaactccagaagctgagttacctaaacgagagcatttacaatatttatatgagaagctggcaactggtgagagtatagcagtcaaaaaaagaaaatgctcactcttagatacctaagaattcaaagcgtttcaacctagagcaaccactaaaaaacctgcacagagatgacagtcaatattacaatagagaaaatacagtacttaaaaatgttcaaataacctggttgggtgtggtggctcacacttgtaatcccagcactttgaggtgggcaatggcttgagcccaggagttcgacaccagcctggccaacacagtgaaatgtgtctctacttacaaaaaaaaaaaaaaaaa

SEQ ID NO: 127532 - DNA, 3532 bp, Homo sapiens
  Payload ID: 4959
  Gene Symbol: DCLRE1C
  Gene Name: DNA cross-link repair 1C
  Uniprot ID: Q96SD1
  ENST ID: ENST00000378289
  CDS Start-End: 423-1727
cggaacgaagaatgatttctaagcgcagttccgcagcccactcacctcgtcggctggggccacctgctctgggagtttcgatttcccttcccgcgactgcacctccacagacatgggcaacgccttaccagagcaacacctgtgtttgttgggcgggaatgagccttgcactgggcagggctcagggcccatcgcgtgcagcgaagcgcgggtgatttaaacccaagcagcgggcgcctagaacccgaccggatgctccttgactttgcccccggtctccggactcctctgattggacgtggctgcgttcggccgcccaatggcgaggcagcgcgcggcttcccggaagtggcggcgcggtcagggctggccttggcttcagctgcggttttggggtcccggactctgggatcggcggcgctatgagttctttcgaggggcagatggccgagtatccaactatctccatagaccgcttcgatagggagaacctgagggcccgcgcctacttcctgtcccactgccacaaagatcacatgaaaggattaagagcccctaccttgaaaagaaggttggagtgcagcttgaaggtttatctatactgttcacctgtgactaaggagttgttgttaacgagcccgaaatacagattttggaagaaacgaattatatctattgaaatcgagactcctacccagatatctttagtggatgaagcatcaggagagaaggaagagattgttgtgactctcttaccagctggtcactgtccgggatcagttatgtttttatttcagggcaataatggaactgtcctgtacacaggagacttcagattggcgcaaggagaagctgctagaatggagcttctgcactccgggggcagagtcaaagacatccaaagtgtatatttggatactacgttctgtgatccaagattttaccaaattccaagtcgggaggagtgtttaagtggagtcttagagctggtccgaagctggatcactcggagcccgtaccatgttgtgtggctgaactgcaaagcggcttatggctatgaatatctgttcaccaaccttagtgaagaattaggagtccaggttcatgtgaataagctagacatgtttaggaacatgcctgagatccttcatcatctcacaacagaccgcaacactcagatccatgcatgccggcatcccaaggcagaggaatattttcagtggagcaaattaccctgtggaattacttccagaaatagaattccactccacataatcagcattaagccatccaccatgtggtttggagaaaggagcagaaaaacaaatgtaattgtgaggactggagagagttcatacagagcttgtttttcttttcactcctcctacagtgagattaaagatttcttgagctacctctgtcctgtgaacgcatatccaaatgtcattccagttggcacaactatggataaagttgtcgaaatcttaaagcctttatgccggtcttcccaaagtacggagccaaagtataaaccactgggaaaactgaagagagctagaacagttcaccgagactcagggtctcactctgtcactcaggctagaatgcggtggtgccatcatgactccctgtatcctttaactcctgggatcaagcgatcttcctgcctcagcctcctgactagctggatcacaggtgcataccgccatgcccagctaatgatttagtttttatagagatgtggggtctcactatgttgcccacactggtctggaactcctgggctcaagtgagcctccagccttgacctccccaagtgctgggattaactgtaactggttgatttatgactttttaaacaggatttgagcagtacattggaacactgcattactttcattataattaggatgttcaaaaagctatacaactatagctctctacaggacacaactgaatgttaaggactaaatctgcaagtatatgctctaaatatgatccaggcacatttttcctataacttatatatatgcagttacaaatggaaaattgttaaaaatacaggggagaagctatgttaactttggaatggaaggttttgtttttgtagaatatgttattttcatgcaattctgtaagtctaagatcgtcatctacagttctgctcttaagaacacaagttttatgacacgctcggcttaagaaaccaaaagtgtctaaagtactttatgttaccaaccaaatttggctgctgcactcattaagaatgcaacttaaaaaattttggttaacaaaaagagtaatttgattatacaagatcttgtatactgaataatttataataatctaccactgtctaaaagtgtaagaatcaaaacagccatctaatttagtttcagaattatagatgaatacagataattataggtgacccaattccaactaaaaaatccagagttgacaactccagatatgtagccatgcttgtgtctttctagtcacagctcaacctacccttcagtttgaagcagtgtggtgccatggtgaagactactgattttagagctttgaatctcggttcttattactatgtgacctgtgtgaccttgggcaaggtactcaatttctctacaataatggacataacagtactacttctcaaaaaaaaaaaaaaaaaaaaaaaaaaaagaaacagtactacctcactgagttttggagaggattagtgaattaatacatcaagtgcttagaatagtatgtgacacacggcaaatactttttacatttatatatatatatacatatatatgatttgtatacaaataaatttgctagtatttgtatggtagttttgagaatggtcttcacagttcaaaagtaagttacagattatggatgcaataaatgcttgtgtatattttacaaaactcataaatatagtatctttcatgttgatccaaaatagagttctgccaactacatttaatcatatttggtcaaatagatgaagtaaattaaaactttcaagtttcaaagcagcatgtgttacatctgagtttcttcttaggacttttgggtaaaaacagttgtcatattttaaattttacaaatcctaggtttgactagtaggaatgtgtatttgttgaaagatgactatatcaatttgttttaacgtatattttttattcatataaaagttttttatttctaaatatgccagtgaactcttctcctaaatctgaataaatttctacatatctgcaaatgaaaatatcaaaatgtaccaagtatctcttaaagagataaaaaggtaattttccaaaagtataaaccttgcatgtccatcatttactacgtggcaaatgaaacatacctctccaacatattccatgacaaaactcattcttttaatcttcacaagggtctttacaccccagccacgtccattgctagttcgaaagatgcaaagcgaatactgtgtgcctttttgtacaatcctattgggacaatcaggaccacactgacaccttga

SEQ ID NO: 127533 - DNA, 2761 bp, Homo sapiens
  Payload ID: 4959
  Gene Symbol: DCLRE1C
  Gene Name: DNA cross-link repair 1C
  Uniprot ID: Q96SD1
  ENST ID: ENST00000396817
  CDS Start-End: 806-2524
gcggttttggggtcccggactctgggatcggcggcgctatgagttctttcgaggggcagatggccgagtatccaactatctccatagaccgcttcgatagggagaacctgagggcccgcgcctacttcctgtcccactgccacaaagatcacatgaaaggattaagagcccctaccttgaaaagaaggttggagtgcagatgaggaaactgaggaaccagagaggttaaattagttgcccagtgtcacacagccagtaagtggcaggaccaggattccagccagcttgaaggtttatctatactgttcacctgtgactaaggagttgttgttaacgagcccgaaatacagattttggaagaaacgaattagcagtcacaacagcagggttgttcctgttgtctctggcattcagcttgaagttactacaggtcagcccggccagcagtcaggaaggaaagctggaagagaagtggaggggaacagagacaaactggaaggcagaatggcccactaggacagaccgaaacccacttctgtctctcacttcctctggcctcaatagtgctggtctcccgctttggctctgaagcacatgcacctgccccaggactcggaggagctgcacacgggcacccagcagaagctgatgttgctgcggccctgccccagactctgagttaagccagaagatatctattgaaatcgagactcctacccagatatctttagtggatgaagcatcaggagagaaggaagagattgttgtgactctcttaccagctggtcactgtccgggatcagttatgtttttatttcagggcaataatggaactgtcctgtacacaggagacttcagattggcgcaaggagaagctgctagaatggagcttctgcactccgggggcagagtcaaagacatccaaagtgtatatttggatactacgttctgtgatccaagattttaccaaattccaagtcgggaggagtgtttaagtggagtcttagagctggtccgaagctggatcactcggagcccgtaccatgttgtgtggctgaactgcaaagcggcttatggctatgaatatctgttcaccaaccttagtgaagaattaggagtccaggttcatgtgaataagctagacatgtttaggaacatgcctgagatccttcatcatctcacaacagaccgcaacactcagatccatgcatgccggcatcccaaggcagaggaatattttcagtggagcaaattaccctgtggaattacttccagaaatagaattccactccacataatcagcattaagccatccaccatgtggtttggagaaaggagcagaaaaacaaatgtaattgtgaggactggagagagttcatacagagcttgtttttcttttcactcctcctacagtgagattaaagatttcttgagctacctctgtcctgtgaacgcatatccaaatgtcattccagttggcacaactatggataaagttgtcgaaatcttaaagcctttatgccggtcttcccaaagtacggagccaaagtataaaccactgggaaaactgaagagagctagaacagttcaccgagactcagaggaggaagatgactatctctttgatgatcctctgccaatacctttaaggcacaaagttccatacccggaaacttttcaccctgaggtattttcaatgactgcagtatcagaaaagcagcctgaaaaactgagacaaaccccaggatgctgcagagcagagtgtatgcagagctctcgtttcacaaactttgtagattgtgaagaatccaacagtgaaagtgaagaagaagtaggaatcccagcttcactgcaaggagatctgggctctgtacttcacctgcaaaaggctgatggggatgtaccccagtgggaagtattctttaaaagaaatgatgaaatcacagatgagagtttggaaaacttcccttcctccacagtggcagggggatctcagtcaccaaagcttttcagtgactctgatggagaatcaactcacatctcctcccagaattcttcccagtcaacacacataacagaacaaggaagtcaaggctgggacagccaatctgatactgttttgttatcttcccaagagagaaacagtggggatattacttccttggacaaagctgactacagaccaacaatcaaagagaatattcctgcctctctcatggaacaaaatgtaatttgcccaaaggatacttactctgatttgaaaagcagagataaagatgtgacaatagttcctagtactggagaaccaactactctaagcagtgagacacatatacccgaggaaaaaagtttgctaaatcttagcacaaatgcagattcccagagctcttctgattttgaagttccctcaactccagaagctgagttacctaaacgagagcatttacaatatttatatgagaagctggcaactggtgagagtatagcagtcaaaaaaagaaaatgctcactcttagatacctaagaattcaaagcgtttcaacctagagcaaccactaaaaaacctgcacagagatgacagtcaatattacaatagagaaaatacagtacttaaaaatgttcaaataacctggttgggtgtggtggctcacacttgtaatcccagcactttgaggtgggcaatggcttgagcccaggagttcgacaccagcctggccaacacagtgaaatgtgtctctacttacaaaaaaaaaaaaaaaaa

SEQ ID NO: 127534 - DNA, 901 bp, Homo sapiens
  Payload ID: 4959
  Gene Symbol: DCLRE1C
  Gene Name: DNA cross-link repair 1C
  ENST ID: ENST00000418843
  CDS Start-End: 550-901
gactctgggatcggcggcgctatgagttctttcgaggggcagatggccgagtatccaactatctccatagaccgcttcgatagggagaacctgagggcccgcgcctacttcctgtcccactgccacaaagatcacatgaaaggattaagagcccctaccttgaaaagaaggttggagtgcagacacacctgatcacatacaagcgcgtatttccaagtaacaatggtgagggaccactgttggaggaggtccagggacaccgtgtttccacccccaccttgtgctcttggtggcactgaaatggtgtgcatagcttgaaggtttatctatactgttcacctgtgactaaggagttgttgttaacgagcccgaaatacagattttggaagaaacgaattatatctattgaaatcgagactcctacccagatatctttagtggatgaagcatcaggagagaaggaagagattgttgtgactctcttaccagctggtcactgtccgggatcagttatgagacttcagattggcgcaaggagaagctgctagaatggagcttctgcactccgggggcagagtcaaagacatccaaagtgtatatttggatactacgttctgtgatccaagattttaccaaattccaagtcgggaggagtgtttaagtggagtcttagagctggtccgaagctggatcactcggagcccgtaccatgttgtgtggctgaactgcaaagcggcttatggctatgaatatctgttcaccaaccttagtgaagaattaggagtccaggttcatgtgaataagctagacatgtttaggaacatgcctgagatccttcatcatctcacaacagaccgcaacactcagatccatgcatgccggcatcccaaggcagaggaat

SEQ ID NO: 127535 - DNA, 877 bp, Homo sapiens
  Payload ID: 4959
  Gene Symbol: DCLRE1C
  Gene Name: DNA cross-link repair 1C
  ENST ID: ENST00000456122
  CDS Start-End: 706-877
ggcggcgctatgagttctttcgaggggcagatggccgagtatccaactatctccatagaccgcttcgatagggagaacctgagggcccgcgcctacttcctgtcccactgccacaaagatcacatgaaaggattaagagcccctaccttgaaaagaaggttggagtgcagatgaggaaactgaggaaccagagaggttaaattagttgcccagtgtcacacagccagtaagtggcaggaccaggattccagccagcttgaaggtttatctatactgttcacctgtgactaaggagttgttgttaacgagcccgaaatacagattttggaagaaacgaattagcagtcacaacagcagggttgttcctgttgtctctggcattcagcttgaagttactacaggtcagcccggccagcagtcaggaaggaaagctggaagagaagtggaggggaacagagacaaactggaaggcagaatggcccactaggacagaccgaaacccacttctgtctctcacttcctctggcctcaatagtgctggtctcccgctttggctctgaagcacatgcacctgccccaggactcggaggagctgcacacgggcacccagcagaagctgatgttgctgcggccctgccccagactctgagttaagccagaagatatctattgaaatcgagactcctacccagatatctttagtggatgaagcatcaggagaggtttttatttcagggcaataatggaactgtcctgtacacaggagacttcagattggcgcaaggagaagctgctagaatggagcttctgcactccgggggcagagtcaaagacatccaaagtgtatatttggatactacgttctgtgatccaagat

SEQ ID NO: 127536 - DNA, 3367 bp, Homo sapiens
  Payload ID: 4960
  Gene Symbol: DDIAS
  Gene Name: DNA damage-induced apoptosis suppressor
  Uniprot ID: Q8IXT1
  ENST ID: ENST00000329143
  CDS Start-End: 51-3047
tgccagtcatcccaatggctattttgttttgcagaccacggtgtgaacacatgaacagaagacgaaaatttcttctagcctcagtacttgctctccagaattcaagttttatatatccatcatgtcagaagtgcttctctaggataatcctggtctccaaaaggtctaattgtccaaaatgtggctctactggtgaatctggaaatgccaattacagatacaaactttccttaaaagttgcagaatcaaacaaattgtttgttattactgtatttggaagttgcttagatacattttttggtcttactgccactggtttgcacaggtacattcaggatcctaataaaattccagaaacactggacaatgatacaactcagaatctattaactaaagcagttgaaacttgctttgttggacaaagctttatttttggagtgacgaattttgaaaaccaacctggacaaggttcagatgccagtaacttcttacagcaatgctctgaccacaaaagaaaagccaaagcactagtggcttgccagattgttctaccagacccaggtattgcaggctttactgtcattgactacttccatcaacttttgcagacttttaatttcaggaaacttcagtgtgactctcaggcacctaacaatcacttacttgctttagatcactcaaatagtgatctcagcagcatatatacttctgacagcacttctgattttttcaagtcctgcagcaaggatactttttcaaaattctggcagccatcacttgaattcacttgcattgtttcacaactaacagataatgatgatttttcagcttcagaacaaagtaaggcctttggtactcttcagcagaacagaaagtccatctccattgcagaggccactggttccagtagctgccatgatcccattcaggattcatggagccttgtttcatatatggataaaaagagtacagcagaaaagttgggtaaagaacttggcttacaagctaaggagctgagtgcagttcacagcagtcatcatgaaattggagttaatgactctaatttattctctttggaaatgcgagagccccttgagtcaagtaatacaaaatccttccacagtgcagtggaaattaaaaataggtcccagcatgagctaccatgttttcagcatcatggtatagataccccaactagccttcagaagagatctgcatgttgtccaccttcgttactcagacttgaagagacagccagcagttcccaggatggtgaccctcaaatttgggatgatctgccattctctgaaagcctgaacaagtttctggcagttcttgaaagtgagattgctgtaacccaggcagatgtcagtagtaggaaacatcatgtagataatgacattgataaatttcatgcagaccacagcaggttatctgtgactccccagagaactactggagccctgcatacaccacctatagctttaagatcatcacaagtaatagtcaaagcaaactgtagcaaagatgacttccttttcaactgtaaaggaaatctaagtcctagtgttgaaaaggagtcacaaccagataacaaagtagaggctgtctctgtaaatcataatggaagagatatgtcagaatattttttaccgaatccttacctgtcagctctgtcttcatcttcaaaagatttagaaacaatagttactcttaagaagactatcagaatctcaccacacagggagagtgaccattctagtctaaataacaaatatttgaatggatgtggagaaatatcagtttcagaaatgaatgaaaagttgacaactctgtgttataggaagtataatgatgtctctgatctttgcaaattagaaaataaacaatattgtaggtggtccaagaaccaagatgacagttttacaatttgcaggaaacttacatatcctttagaaactctttgcaatagtccaaatagaagtacaaatacattgaaagaaatgccttggggacatatcaataacaacgtaacacagagctattctattggttatgaaggtagctatgatgcctctgctgatctctttgatgatattgctaaagaaatggacattgcaactgagattaccaaaaaatcacaggatattttgttaaaatggggaacatctttggcagaaagtcacccttcagagtctgatttttcactgagatcactttctgaagacttcatccagccttcacaaaaattatccttgcaaagcctatctgactctaggcattcaagaacatgctctccaacacctcattttcaatcagattcagaatataattttgaaaatagtcaagactttgttccatgttcacagtcaactccaatttcagggttccaccaaacaagaattcatgggataaacagagctttcaaaaaacctgtattttattcagatcttgatggtaactatgaaaaaataaggattttccctgaaaatgacaaacagcaagccagcccaagctgtccaaaaaatataaaaacacctagccagaaaatcagaagccctattgtatctggtgtttcacaaccagacgttttcaatcactacccttttgctgagtgccatgaaactgatagtgatgaatgggtccctcctaccacacaaaaaatatttccttcagatatgcttggattccaaggcataggtctagggaaatgccttgctgcctatcatttccctgatcaacaagagttaccaagaaagaaactgaaacatattagacaaggaaccaataaaggtttaattaagaagaaattaaagaatatgcttgcagcagttgttacgaaaaagaaaactcataaatataactgtaaaagttcaggctggatttccaaatgtccagacattcaagtcttagcagcacctcagctgcaccctattcttggacctgattcttgttcagaagtcaaatgttgccttccattttcagaaaaaggcccaccttcagtgtgtgaaactcgaagtgcttggtcacctgaattgttttcataaaaagtcacctgaacccaattcctgaacttttaaatctgtttggaaatgtttgccttcaggggtacggaaagcattctttacattttgaacacttggagagaagcaaattgaaaacaggactctgctgggagctactgtgccttttaaaatataaagccattgttttccccagggttttatctagaatactatgattaggtagttgagcactttatcttatactgtttattgtactttaataatattgttaagattgtttttgaaagtattaatgtttgttaaaatcacatatacatccagaaataaagactttgcaaacc

SEQ ID NO: 127537 - DNA, 870 bp, Homo sapiens
  Payload ID: 4960
  Gene Symbol: DDIAS
  Gene Name: DNA damage-induced apoptosis suppressor
  ENST ID: ENST00000532764
  CDS Start-End: 194-870
agattcgattggaaggctgccggcgtgctactgagttcggccggtccgagtcactgtgcgtcgcctgggcccgttcctggtcttctcccccagggtcttgctctgtcacccaggctggagtgccatggcatcatcatagctcactatggccttgatcctcctgccttagcctcccaagcagctggtattacagatgtatcaaatgagcacactgaaatctaataaagtgatatttcagctaaaaaagaacaatttccaccaatttaggttctttaaaagattcatatggagttttgctcttgttgcccaggctgaagtgccatggtgcaatctcggctcactgcaacctccgcatcctagaccacggtgtgaacacatgaacagaagacgaaaatttcttctagcctcagtacttgctctccagaattcaagttttatatatccatcatgtcagaagtgcttctctaggataatcctggtctccaaaaggtctaattgtccaaaatgtggctctactggtgaatctggaaatgccaattacagatacaaactttccttaaaagttgcagaatcaaacaaattgtttgttattactgtatttggaagttgcttagatacattttttggtcttactgccactggtttgcacaggtacattcaggatcctaataaaattccagaaacactggacaatgatacaactcagaatctattaactaaagcagttgaaacttgctttgttggacaaagctttatttttggagtgacgaattttgaaaaccaacctggacaaggttcagatgccagtaacttcttacagcaatgctctgaccacaaaagaaaagccaaagcactagtggcttgccagat

SEQ ID NO: 127538 - DNA, 3278 bp, Homo sapiens
  Payload ID: 4960
  Gene Symbol: DDIAS
  Gene Name: DNA damage-induced apoptosis suppressor
  ENST ID: ENST00000528759
  CDS Start-End: 242-442
aaagcgttacttccggcggaaaaggacgcgggagattcgattggaaggctgccggcgtgctactgagttcggccggtccgagtcactgtgcgtcgcctgggcccgttcctggtcttctcccccagggtcttgctctgtcacccaggctggagtgccatggcatcatcatagctcactatggccttgatcctcctgccttagcctcccaagcagctggtattacagaccacggtgtgaacacatgaacagaagacgaaaatttcttctagcctcagtacttgctctccagaattcaagttttatatatccatcatgtcagaagtgcttctctaggataatcctggtctccaaaagaattttgaaaaccaacctggacaaggttcagatgccagtaacttcttacagcaatgctctgaccacaaaagaaaagccaaagcactagtggcttgccagattgttctaccagacccaggtattgcaggctttactgtcattgactacttccatcaacttttgcagacttttaatttcaggaaacttcagtgtgactctcaggcacctaacaatcacttacttgctttagatcactcaaatagtgatctcagcagcatatatacttctgacagcacttctgattttttcaagtcctgcagcaaggatactttttcaaaattctggcagccatcacttgaattcacttgcattgtttcacaactaacagataatgatgatttttcagcttcagaacaaagtaaggcctttggtactcttcagcagaacagaaagtccatctccattgcagaggccactggttccagtagctgccatgatcccattcaggattcatggagccttgtttcatatatggataaaaagagtacagcagaaaagttgggtaaagaacttggcttacaagctaaggagctgagtgcagttcacagcagtcatcatgaaattggagttaatgactctaatttattctctttggaaatgcgagagccccttgagtcaagtaatacaaaatccttccacagtgcagtggaaattaaaaataggtcccagcatgagctaccatgttttcagcatcatggtatagataccccaactagccttcagaagagatctgcatgttgtccaccttcgttactcagacttgaagagacagccagcagttcccaggatggtgaccctcaaatttgggatgatctgccattctctgaaagcctgaacaagtttctggcagttcttgaaagtgagattgctgtaacccaggcagatgtcagtagtaggaaacatcatgtagataatgacattgataaatttcatgcagaccacagcaggttatctgtgactccccagagaactactggagccctgcatacaccacctatagctttaagatcatcacaagtaatagtcaaagcaaactgtagcaaagatgacttccttttcaactgtaaaggaaatctaagtcctagtgttgaaaaggagtcacaaccagataacaaagtagaggctgtctctgtaaatcataatggaagagatatgtcagaatattttttaccgaatccttacctgtcagctctgtcttcatcttcaaaagatttagaaacaatagttactcttaagaagactatcagaatctcaccacacagggagagtgaccattctagtctaaataacaaatatttgaatggatgtggagaaatatcagtttcagaaatgaatgaaaagttgacaactctgtgttataggaagtataatgatgtctctgatctttgcaaattagaaaataaacaatattgtaggtggtccaagaaccaagatgacagttttacaatttgcaggaaacttacatatcctttagaaactctttgcaatagtccaaatagaagtacaaatacattgaaagaaatgccttggggacatatcaataacaacgtaacacagagctattctattggttatgaaggtagctatgatgcctctgctgatctctttgatgatattgctaaagaaatggacattgcaactgagattaccaaaaaatcacaggatattttgttaaaatggggaacatctttggcagaaagtcacccttcagagtctgatttttcactgagatcactttctgaagacttcatccagccttcacaaaaattatccttgcaaagcctatctgactctaggcattcaagaacatgctctccaacacctcattttcaatcagattcagaatataattttgaaaatagtcaagactttgttccatgttcacagtcaactccaatttcagggttccaccaaacaagaattcatgggataaacagagctttcaaaaaacctgtattttattcagatcttgatggtaactatgaaaaaataaggattttccctgaaaatgacaaacagcaagccagcccaagctgtccaaaaaatataaaaacacctagccagaaaatcagaagccctattgtatctggtgtttcacaaccagacgttttcaatcactacccttttgctgagtgccatgaaactgatagtgatgaatgggtccctcctaccacacaaaaaatatttccttcagatatgcttggattccaaggcataggtctagggaaatgccttgctgcctatcatttccctgatcaacaagagttaccaagaaagaaactgaaacatattagacaaggaaccaataaaggtttaattaagaagaaattaaagaatatgcttgcagcagttgttacgaaaaagaaaactcataaatataactgtaaaagttcaggctggatttccaaatgtccagacattcaagtcttagcagcacctcagctgcaccctattcttggacctgattcttgttcagaagtcaaatgttgccttccattttcagaaaaaggcccaccttcagtgtgtgaaactcgaagtgcttggtcacctgaattgttttcataaaaagtcacctgaacccaattcctgaacttttaaatctgtttggaaatgtttgccttcaggggtacggaaagcattctttacattttgaacacttggagagaagcaaattgaaaacaggactctgctgggagctactgtgccttttaaaatataaagccattgttttccccagggttttatctagaatactatgattaggtagttgagcactttatcttatactgtttattgtactttaataatattgttaagattgtttttgaaagtattaatgtttgttaaaatcacatatacatccagaaataaagactttgcaaacc

SEQ ID NO: 127539 - DNA, 560 bp, Homo sapiens
  Payload ID: 4960
  Gene Symbol: DDIAS
  Gene Name: DNA damage-induced apoptosis suppressor
  ENST ID: ENST00000528262
  CDS Start-End: 191-560
aaactgtcatggcgctggtggcagtgtagcagtgaggacaaccagaggtcactctcatcaccatcttagttttgggtcttgctctgtcacccaggctggagtgccatggcatcatcatagctcactatggccttgatcctcctgccttagcctcccaagcagctggtattacagaccacggtgtgaacacatgaacagaagacgaaaatttcttctagcctcagtacttgctctccagaattcaagttttatatatccatcatgtcagaagtgcttctctaggataatcctggtctccaaaaggtctaattgtccaaaatgtggctctactggtgaatctggaaatgccaattacagatacaaactttccttaaaagttgcagaatcaaacaaattgtttgttattactgtatttggaagttgcttagatacattttttggtcttactgccactggtttgcacaggtacattcaggatcctaataaaattccagaaacactggacaatgatacaactcagaatctattaactaaagcagttgaaacttgctttgttggac

SEQ ID NO: 127540 - DNA, 889 bp, Homo sapiens
  Payload ID: 4960
  Gene Symbol: DDIAS
  Gene Name: DNA damage-induced apoptosis suppressor
  ENST ID: ENST00000532277
  CDS Start-End: 664-889
gtgactgtcgtgtccaattacagaaaagcctgaatcaagagtatgcagccaaaactactaccaaattattggtaatgggaggagaaaatttaaacagaactgggatttgggaccaccttctggaagatgttagccaaaaaccgaacagatcctaggcatcaaggggtgtgaatttcgagtcaccccgccagaccccagggcgctgcggctcactccacactttcccgggaaccctacgcccaggaggctcagcgaagctccaaaaccaattttacggactgtactactgatccacctgtcggggagaaagactctacccgcagtttgacgaaaatggtcgtttccagatgcttgtaggatttcctcgctaagctccaccctctgcggcgccttcttctgattggctctgagtaatcagagccaaagcgttacttccggcggaaaaggacgcgggagattcgattggaaggctgccggcgtgctactgagttcggccggtccgagtcactgtgcgtcgcctgggcccgttcctggtcttctcccccagggtcttgctctgtcacccaggctggagtgccatggcatcatcatagctcactatggccttgatcctcctgccttagcctcccaagcagctggtattacagaccacggtgtgaacacatgaacagaagacgaaaatttcttctagcctcagtacttgctctccagaattcaagttttatatatccatcatgtcagaagtgcttctctaggataatcctggtctccaaaaggtctaattgtccaaaatgtggctctactggtgaatctggaaatgccaattacagatacaaactttccttaaaagttgcagaatcaaacaaattgtttgttattactgtatttg

SEQ ID NO: 127541 - DNA, 331 bp, Homo sapiens
  Payload ID: 4960
  Gene Symbol: DDIAS
  Gene Name: DNA damage-induced apoptosis suppressor
  ENST ID: ENST00000532589
  CDS Start-End: 104-331
gattggaaggctgccggcgtgctactgagttcggccggtccgagtcactgtgcgtcgcctgggcccgttcctggtcttctcccccagaccacggtgtgaacacatgaacagaagacgaaaatttcttctagcctcagtacttgctctccagaattcaagttttatatatccatcatgtcagaagtgcttctctaggataatcctggtctccaaaaggtctaattgtccaaaatgtggctctactggtgaatctggaaatgccaattacagatacaaactttccttaaaagttgcagaatcaaacaaattgtttgttattactgtatttgga

SEQ ID NO: 127542 - DNA, 3533 bp, Homo sapiens
  Payload ID: 4960
  Gene Symbol: DDIAS
  Gene Name: DNA damage-induced apoptosis suppressor
  Uniprot ID: Q8IXT1
  ENST ID: ENST00000533655
  CDS Start-End: 213-3209
gggagattcgattggaaggctgccggcgtgctactgagttcggccggtccgagtcactgtgcgtcgcctgggcccgttcctggtcttctcccccagggtcttgctctgtcacccaggctggagtgccatggcatcatcatagctcactatggccttgatcctcctgccttagcctcccaagcagctggtattacagaccacggtgtgaacacatgaacagaagacgaaaatttcttctagcctcagtacttgctctccagaattcaagttttatatatccatcatgtcagaagtgcttctctaggataatcctggtctccaaaaggtctaattgtccaaaatgtggctctactggtgaatctggaaatgccaattacagatacaaactttccttaaaagttgcagaatcaaacaaattgtttgttattactgtatttggaagttgcttagatacattttttggtcttactgccactggtttgcacaggtacattcaggatcctaataaaattccagaaacactggacaatgatacaactcagaatctattaactaaagcagttgaaacttgctttgttggacaaagctttatttttggagtgacgaattttgaaaaccaacctggacaaggttcagatgccagtaacttcttacagcaatgctctgaccacaaaagaaaagccaaagcactagtggcttgccagattgttctaccagacccaggtattgcaggctttactgtcattgactacttccatcaacttttgcagacttttaatttcaggaaacttcagtgtgactctcaggcacctaacaatcacttacttgctttagatcactcaaatagtgatctcagcagcatatatacttctgacagcacttctgattttttcaagtcctgcagcaaggatactttttcaaaattctggcagccatcacttgaattcacttgcattgtttcacaactaacagataatgatgatttttcagcttcagaacaaagtaaggcctttggtactcttcagcagaacagaaagtccatctccattgcagaggccactggttccagtagctgccatgatcccattcaggattcatggagccttgtttcatatatggataaaaagagtacagcagaaaagttgggtaaagaacttggcttacaagctaaggagctgagtgcagttcacagcagtcatcatgaaattggagttaatgactctaatttattctctttggaaatgcgagagccccttgagtcaagtaatacaaaatccttccacagtgcagtggaaattaaaaataggtcccagcatgagctaccatgttttcagcatcatggtatagataccccaactagccttcagaagagatctgcatgttgtccaccttcgttactcagacttgaagagacagccagcagttcccaggatggtgaccctcaaatttgggatgatctgccattctctgaaagcctgaacaagtttctggcagttcttgaaagtgagattgctgtaacccaggcagatgtcagtagtaggaaacatcatgtagataatgacattgataaatttcatgcagaccacagcaggttatctgtgactccccagagaactactggagccctgcatacaccacctatagctttaagatcatcacaagtaatagtcaaagcaaactgtagcaaagatgacttccttttcaactgtaaaggaaatctaagtcctagtgttgaaaaggagtcacaaccagataacaaagtagaggctgtctctgtaaatcataatggaagagatatgtcagaatattttttaccgaatccttacctgtcagctctgtcttcatcttcaaaagatttagaaacaatagttactcttaagaagactatcagaatctcaccacacagggagagtgaccattctagtctaaataacaaatatttgaatggatgtggagaaatatcagtttcagaaatgaatgaaaagttgacaactctgtgttataggaagtataatgatgtctctgatctttgcaaattagaaaataaacaatattgtaggtggtccaagaaccaagatgacagttttacaatttgcaggaaacttacatatcctttagaaactctttgcaatagtccaaatagaagtacaaatacattgaaagaaatgccttggggacatatcaataacaacgtaacacagagctattctattggttatgaaggtagctatgatgcctctgctgatctctttgatgatattgctaaagaaatggacattgcaactgagattaccaaaaaatcacaggatattttgttaaaatggggaacatctttggcagaaagtcacccttcagagtctgatttttcactgagatcactttctgaagacttcatccagccttcacaaaaattatccttgcaaagcctatctgactctaggcattcaagaacatgctctccaacacctcattttcaatcagattcagaatataattttgaaaatagtcaagactttgttccatgttcacagtcaactccaatttcagggttccaccaaacaagaattcatgggataaacagagctttcaaaaaacctgtattttattcagatcttgatggtaactatgaaaaaataaggattttccctgaaaatgacaaacagcaagccagcccaagctgtccaaaaaatataaaaacacctagccagaaaatcagaagccctattgtatctggtgtttcacaaccagacgttttcaatcactacccttttgctgagtgccatgaaactgatagtgatgaatgggtccctcctaccacacaaaaaatatttccttcagatatgcttggattccaaggcataggtctagggaaatgccttgctgcctatcatttccctgatcaacaagagttaccaagaaagaaactgaaacatattagacaaggaaccaataaaggtttaattaagaagaaattaaagaatatgcttgcagcagttgttacgaaaaagaaaactcataaatataactgtaaaagttcaggctggatttccaaatgtccagacattcaagtcttagcagcacctcagctgcaccctattcttggacctgattcttgttcagaagtcaaatgttgccttccattttcagaaaaaggcccaccttcagtgtgtgaaactcgaagtgcttggtcacctgaattgttttcataaaaagtcacctgaacccaattcctgaacttttaaatctgtttggaaatgtttgccttcaggggtacggaaagcattctttacattttgaacacttggagagaagcaaattgaaaacaggactctgctgggagctactgtgccttttaaaatataaagccattgttttccccagggttttatctagaatactatgattaggtagttgagcactttatcttatactgtttattgtactttaataatattgttaagattgtttttgaaagtattaatgtttgttaaaatcacatatacatccagaaataaagactttgcaaaccaaaa

SEQ ID NO: 127543 - DNA, 1830 bp, Homo sapiens
  Payload ID: 4960
  Gene Symbol: DDIAS
  Gene Name: DNA damage-induced apoptosis suppressor
  Uniprot ID: Q8IXT1
  ENST ID: ENST00000525361
  CDS Start-End: 456-992
aaagcgttacttccggcggaaaaggacgcgggagattcgattggaaggctgccggcgtgctactgagttcggccggtccgagtcactgtgcgtcgcctgggcccgttcctggtcttctcccccagggtcttgctctgtcacccaggctggagtgccatggcatcatcatagctcactatggccttgatcctcctgccttagcctcccaagcagctggtattacagatggagttttgctcttgttgcccaggctgaagtgccatggtgcaatctcggctcactgcaacctccgcatcctaggttcaagcaattctcctgccgcagcctcctgagtagctgggattacaggcaccccccaccatgctcagctactttttgtatttagtggagatggggtttcaccatgttggccaggctggtctcaaactccctacctcagaccacggtgtgaacacatgaacagaagacgaaaatttcttctagcctcagtacttgctctccagaattcaagttttatatatccatcatgtcagaagtgcttctctaggataatcctggtctccaaaaggtctaattgtccaaaatgtggctctactggtgaatctggaaatgccaattacagatacaaactttccttaaaagttgcagaatcaaacaaattgtttgttattactgtatttggaagttgcttagatacattttttggtcttactgccactggtttgcacaggtacattcaggatcctaataaaattccagaaacactggacaatgatacaactcagaatctattaactaaagcagttgaaacttgctttgttggacaaagctttatttttggagtgacgaattttgaaaaccaacctggacaaggttcagatgccagtaacttcttacagcaatgctctgaccacaaaagaaaagccaaagcactagtggcttgccagattgttctaccagacccagccacccaagatgctaaaacaaaataagaccaaggggaagaagatggctggggcccctgctgtcatgaagaagcaagaagccaagaaagtggtgaatctcccctgtttgagaaaaggcctaagaattttagcactggacaggacatccaccccaaagggatctcactcactttgtcaaatggcctcattatattaggttgcagcagcaaagaactatcctctgtaggtcactggaagtgcctcttgtgattaaccagtttacccaggccttggacctcctaacagctgctcagcttcttaagctggcccacgagtacagaccagtgacaaagcaagagaagaagcaggaattgttggcccatgctgacaggaatgctgccagcaatggagacatccccactaagagttcacctgtccttcaagcaggggttaatactgtcaccaactcaatggtgaacaagaagtctcagctggtgctgactgcacaagatatggatcccatcaagctggttgtcttcctgccagccctgtgttgtaaaatgggggtcccttactgtgttatcaaagagaaggcaaggccgggaagtttagtccacaggaggacctgcatcattgtcaccttcacacaggttaaatggaaaaaacaaggagctttagctaaactttgggagcttcaggatcaattacaatgacagatataatgagatccaccatcaatggggaggcaacatcctgggtccaaaatctgtggcttacaatgccaagccagaaaagacaaaggctaaaaaacatgccactaagcttagttaaatgcacactgttgagttttctgtacagaaagataataaaaaattctccttcagcc

SEQ ID NO: 127544 - DNA, 607 bp, Homo sapiens
  Payload ID: 4960
  Gene Symbol: DDIAS
  Gene Name: DNA damage-induced apoptosis suppressor
  ENST ID: ENST00000524921
  CDS Start-End: 242-604
aaagcgttacttccggcggaaaaggacgcgggagattcgattggaaggctgccggcgtgctactgagttcggccggtccgagtcactgtgcgtcgcctgggcccgttcctggtcttctcccccagggtcttgctctgtcacccaggctggagtgccatggcatcatcatagctcactatggccttgatcctcctgccttagcctcccaagcagctggtattacagaccacggtgtgaacacatgaacagaagacgaaaatttcttctagcctcagtacttgctctccagaattcaagttttatatatccatcatgtcagaagtgcttctctaggataatcctggtctccaaaaggtctaattgtccaaaatgtggctctactggtgaatctggaaatgccaattacagatacaaactttccttaaaagttgcagaatcaaacaaattgtttgttattactgtatttggaagttgcttagatacattttttggtcttactgccactggtttgcacagaattttgaaaaccaacctggacaaggttcagatgccagtaacttcttacagcaatgctctgaccacaaaagaaaagccaaagcactagtgg

SEQ ID NO: 127545 - DNA, 961 bp, Homo sapiens
  Payload ID: 4960
  Gene Symbol: DDIAS
  Gene Name: DNA damage-induced apoptosis suppressor
  ENST ID: ENST00000525388
  CDS Start-End: 202-564
aaggctgccggcgtgctactgagttcggccggtccgagtcactgtgcgtcgcctgggcccgttcctggtcttctcccccagatagggtcttgctctgtcacccaggctggagtgccatggcatcatcatagctcactatggccttgatcctcctgccttagcctcccaagcagctggtattacagaccacggtgtgaacacatgaacagaagacgaaaatttcttctagcctcagtacttgctctccagaattcaagttttatatatccatcatgtcagaagtgcttctctaggataatcctggtctccaaaaggtctaattgtccaaaatgtggctctactggtgaatctggaaatgccaattacagatacaaactttccttaaaagttgcagaatcaaacaaattgtttgttattactgtatttggaagttgcttagatacattttttggtcttactgccactggtttgcacagaattttgaaaaccaacctggacaaggttcagatgccagtaacttcttacagcaatgctctgaccacaaaagaaaagccaaagcactagtggcttgccagattgttctaccagacccaggtattgcaggctttactgtcattgactacttccatcaacttttgcagacttttaatttcaggaaacttcagtgtgactctcaggcacctaacaatcacttacttgctttagatcactcaaatagtgatctcagcagcatatatacttctgacagcacttctgattttttcaagtcctgcagcaaggatactttttcaaaattctggcagccatcacttgaattcacttgcattgtttcacaactaacagataatgatgatttttcagcttcagaacaaagtaaggcctttggtactcttcagcagaacagaaagtccatctccattgcagaggccactggttccagtagctgccatgatcccattca

SEQ ID NO: 127546 - DNA, 3105 bp, Homo sapiens
  Payload ID: 4961
  Gene Symbol: DFFB
  Gene Name: DNA fragmentation factor, 40kDa, beta polypeptide (caspase-activated DNase)
  ENST ID: ENST00000338895
  CDS Start-End: 338-1426
acaaggggagggctccgctactctggccctcagggttgtgtagtttccggggccacggcacctgggcacaccaggtggcgtcgcgcctttgctttcctgagccttctgagtaaggtaatgtggtgtccgtggggcgacgcctgcgcacaagaccgcgtcgggcctcacttttcccaggccttctgggtaatgtagtttccgggatcggcacccggcctgtgccagcttgcagagctcaccaggtgcagacccctgcggccagggcgaggacggatctgagcagctgggcagcaggtgccaccgcctgtgggacccagagggcttgaggacatctgcaatgctccagaagcccaagagcgtgaagctgcgggccctgcgcagcccgaggaagttcggcgtggctggccggagctgccaggaggtgctgcgcaagggctgtctccgcttccagctccctgagcgcggttcccggctgtgcctgtacgaggatggcacggagctgacggaagattacttccccagtgttcccgacaacgccgagctggtgctgctcaccttgggccaggcctggcagggctgtgagtggcaaggactttggaggatgtgtcttctgctggaccggcaccttttgtttgtcccattggtggcagatgtgagcgacatcaggcgcttcctcagtgcatttcacgagccacaggtggggctcatccaggccgcccagcagctgctgtgtgatgagcaggccccacagaggcagaggctgctggctgacctcctgcacaacgtcagccagaacatcgcggccgagacccgggctgaggacccgccgtggtttgaaggcttggagtcccgatttcagagcaagtctggctatctgagatacagctgtgagagccggatccggagttacctgagggaggtgagctcctacccctccacggtgggtgcggaggctcaggaggaattcctgcgggtcctcggctccatgtgccagaggctccggtccatgcagtacaatggcagctacttcgacagaggagccaagggcggcagccgcctctgcacaccggaaggctggttctcctgccagggtccctttgacatggacagctgcttatcaagacactccatcaacccctacagtaacagggagagcaggatcctcttcagcacctggaacctggatcacataatagaaaagaaacgcaccatcattcctacactggtggaagcaattaaggaacaagatggaagagaagtggactgggagtatttttatggcctgctttttacctcagagaacctaaaactagtgcacattgtctgccataagaaaaccacccacaagctcaactgtgacccaagcagaatctacaaaccccagacaaggttgaagcggaagcagcctgtgcggaaacgccagtgacacgtacacaccacgtcctggtctttgtttgaggcctgacgtgggcatcattttaacaggtgccttttttgtttttttgtttttcgtttttttggtcactccagtagctcctggaaaaaaccttaaaaaatgtttcctccaaatctgatttcattacatttctgaattgttggggttttttttgttgttttgttttgttttgtagatggagtttcacttttgttgcccaggctggagtgtagtggcgcgatctcggctcagcctcccgagtagctgggattacaggcatgtgccaccacgcccggctaatgtttgtatttttagtagagacggggtttcaccatgttggtcaggctggtctcaaactcctgacctcaggtgatccgcccacctcagcctcccaaagtgctgggatgacaggtgtgagccactgcgcccagcctgaatcatttcttataccttctgacagcccaacttccagaggacagctctggggtactcgttggatgtctgtgagtacctggtcatacgggtcagtagggataagaattgtctctgggctgaggaattcttctgttctctggtttcaccagcgttgggtttgctcatgtaatgtggtcaccatactcaaatggtgtcatggctgaagttggccaccttgcttgagggacaagttgtttatgtatcagctctctgctgggtctccctttccatggcaaatgggcagctccatcctcttgactcttctaaatgcccaaaagaggtgtcatgctttgggggtacgatgtttatactccgtaaagaacatacaaggacattcactgctgatttttttttttgtttgtttgagacagggtctcactctgtcgctcaggctggagtgcagtgatgcaatcttggctcactgcaacctccgcctctcaggttcaagtggttctccttcctcagcctcccaagtagctgggattacaggcacctaccaccagggccagctaatttttgtatgtttagtagaaacggggtttcaccatgttggccaggctgttctcgaactcctgacctcaggtgatctgcccgcctcggtctcccaaagtgctgggattacaggcatgagccactgcacctgacctgctgaattgtttataatggcaagaaataggaaaccccccaatgtctgttgaacagctatcacgttgaaccacgtgaaactgctgttttctaggccaaaaatggtgagcgatcatttatttcatgattcaacctgatacatttacatagtgcaaaactgtgtcacagtttcaggcttttatgaggaaagcgtttctgtgtagaaactggaagctgttcagggcatcggcagctgaaccctgctccgttggtcagcgttactatcatctcggatcatatggagctcatgtcagccgtgtgggtggcgggtgcacagagacggtctggaaggaaacacgcggatctgaacagcagtaatcctgggggatacgggggttgggctagattacagagggctcattttctacgtcatgtattttatgatacttgaattttttgaaatgggcatttattttataacatgttaaaatgtactttttaaattaagtcattttgtaatatttgaatttttacatttgttgtacaatcaggaaaagcaataaagatttttc

SEQ ID NO: 127547 - DNA, 3005 bp, Homo sapiens
  Payload ID: 4961
  Gene Symbol: DFFB
  Gene Name: DNA fragmentation factor, 40kDa, beta polypeptide (caspase-activated DNase)
  Uniprot ID: O76075
  ENST ID: ENST00000339350
  CDS Start-End: 132-482
ggcacccggcctgtgccagcttgcagagctcaccaggtgcagacccctgcggccagggcgaggacggatctgagcagctgggcagcaggtgccaccgcctgtgggacccagagggcttgaggacatctgcaatgctccagaagcccaagagcgtgaagctgcgggccctgcgcagcccgaggaagttcggcgtggctggccggagctgccaggaggtgctgcgcaagggctgtctccgcttccagctccctgagcgcggttcccggctgtgcctgtacgaggatggcacggagctgacggaagattacttccccagtgttcccgacaacgccgagctggtgctgctcaccttgggccaggcctggcagggctctgttggtgtcagggcaaggacaaagacccgggacacctcaagtctgagtcctggtgattgccaggccctggggaatgggggaagatgtggtcagaggctcttcttgtgaccggggcaggatgtgtcttctgctggaccggcaccttttgtttgtcccattggtggcagatgtgagcgacatcaggcgcttcctcagtgcatttcacgagccacaggtggggctcatccaggccgcccagcagctgctgtgtgatgagcaggccccacagaggcagaggctgctggctgacctcctgcacaacgtcagccagaacatcgcggccgagacccgggctgaggacccgccgtggtttgaaggcttggagtcccgatttcagagcaagtctggctatctgagatacagctgtgagagccggatccggagttacctgagggaggtgagctcctacccctccacggtgggtgcggaggctcaggaggaattcctgcgggtcctcggctccatgtgccagaggctccggtccatgcagtacaatggcagctacttcgacagaggagccaagggcggcagccgcctctgcacaccggaaggctggttctcctgccagggtccctttgacatggacagctgcttatcaagacactccatcaacccctacagtaacagggagagcaggatcctcttcagcacctggaacctggatcacataatagaaaagaaacgcaccatcattcctacactggtggaagcaattaaggaacaagatggaagagaagtggactgggagtatttttatggcctgctttttacctcagagaacctaaaactagtgcacattgtctgccataagaaaaccacccacaagctcaactgtgacccaagcagaatctacaaaccccagacaaggttgaagcggaagcagcctgtgcggaaacgccagtgacacgtacacaccacgtcctggtctttgtttgaggcctgacgtgggcatcattttaacaggtgccttttttgtttttttgtttttcgtttttttggtcactccagtagctcctggaaaaaaccttaaaaaatgtttcctccaaatctgatttcattacatttctgaattgttggggttttttttgttgttttgttttgttttgtagatggagtttcacttttgttgcccaggctggagtgtagtggcgcgatctcggctcagcctcccgagtagctgggattacaggcatgtgccaccacgcccggctaatgtttgtatttttagtagagacggggtttcaccatgttggtcaggctggtctcaaactcctgacctcaggtgatccgcccacctcagcctcccaaagtgctgggatgacaggtgtgagccactgcgcccagcctgaatcatttcttataccttctgacagcccaacttccagaggacagctctggggtactcgttggatgtctgtgagtacctggtcatacgggtcagtagggataagaattgtctctgggctgaggaattcttctgttctctggtttcaccagcgttgggtttgctcatgtaatgtggtcaccatactcaaatggtgtcatggctgaagttggccaccttgcttgagggacaagttgtttatgtatcagctctctgctgggtctccctttccatggcaaatgggcagctccatcctcttgactcttctaaatgcccaaaagaggtgtcatgctttgggggtacgatgtttatactccgtaaagaacatacaaggacattcactgctgatttttttttttgtttgtttgagacagggtctcactctgtcgctcaggctggagtgcagtgatgcaatcttggctcactgcaacctccgcctctcaggttcaagtggttctccttcctcagcctcccaagtagctgggattacaggcacctaccaccagggccagctaatttttgtatgtttagtagaaacggggtttcaccatgttggccaggctgttctcgaactcctgacctcaggtgatctgcccgcctcggtctcccaaagtgctgggattacaggcatgagccactgcacctgacctgctgaattgtttataatggcaagaaataggaaaccccccaatgtctgttgaacagctatcacgttgaaccacgtgaaactgctgttttctaggccaaaaatggtgagcgatcatttatttcatgattcaacctgatacatttacatagtgcaaaactgtgtcacagtttcaggcttttatgaggaaagcgtttctgtgtagaaactggaagctgttcagggcatcggcagctgaaccctgctccgttggtcagcgttactatcatctcggatcatatggagctcatgtcagccgtgtgggtggcgggtgcacagagacggtctggaaggaaacacgcggatctgaacagcagtaatcctgggggatacgggggttgggctagattacagagggctcattttctacgtcatgtattttatgatacttgaattttttgaaatgggcatttattttataacatgttaaaatgtactttttaaattaagtcattttgtaatatttgaatttttacatttgttgtacaatcaggaaaagcaataaagatttttcaaaaataga

SEQ ID NO: 127548 - DNA, 572 bp, Homo sapiens
  Payload ID: 4961
  Gene Symbol: DFFB
  Gene Name: DNA fragmentation factor, 40kDa, beta polypeptide (caspase-activated DNase)
  ENST ID: ENST00000341385
  CDS Start-End: 1-249
atgctccagaagcccaagagcgtgaagctgcgggccctgcgcagcccgaggaagttcggcgtggctggccggagctgccaggaggtgctgcgcaagggctgtctccgcttccagctccctgagcgcggttcccggctgtgcctgtacgaggatggcacggagctgacggaagattacttccccagtgttcccgacaacgccgagctggtgctgctcaccttgggccaggcctggcagggctgtgagtgatggacagctgcttatcaagacactccatcaacccctacagtaacagggagagcaggatcctcttcagcacctggaacctggatcacataatagaaaagaaacgcaccatcattcctacactggtggaagcaattaaggaacaagatggaagagaagtggactgggagtatttttatggcctgctttttacctcagagaacctaaaactagtgcacattgtctgccataagaaaaccacccacaagctcaactgtgacccaagcagaatctacaaaccccagacaaggttgaagcggaagcagcctgtgcggaaacgccagtga

SEQ ID NO: 127549 - DNA, 2842 bp, Homo sapiens
  Payload ID: 4961
  Gene Symbol: DFFB
  Gene Name: DNA fragmentation factor, 40kDa, beta polypeptide (caspase-activated DNase)
  ENST ID: ENST00000378206
  CDS Start-End: 88-330
ccctgcggccagggcgaggacggatctgagcagctgggcagcaggtgccaccgcctgtgggacccagagggcttgaggacatctgcaatgctccagaagcccaagagcgtgaagctgcgggccctgcgcagcccgaggaagttcggcgtggctggccggagctgccaggaggtgctgcgcaagggctgtctccgcttccagctccctgagcgcggttcccggctgtgcctgtacgaggatggcacggagctgacggaagattacttccccagtgttcccgacaacgccgagctggtgctgctcaccttgggccaggcctggcagggctgatgtgtcttctgctggaccggcaccttttgtttgtcccattggtggcagatgtgagcgacatcaggcgcttcctcagtgcatttcacgagccacaggtggggctcatccaggccgcccagcagctgctgtgtgatgagcaggccccacagaggcagaggctgctggctgacctcctgcacaacgtcagccagaacatcgcggccgagacccgggctgaggacccgccgtggtttgaaggcttggagtcccgatttcagagcaagtctggctatctgagatacagctgtgagagccggatccggagttacctgagggaggtgagctcctacccctccacggtgggtgcggaggctcaggaggaattcctgcgggtcctcggctccatgtgccagaggctccggtccatgcagtacaatggcagctacttcgacagaggagccaagggcggcagccgcctctgcacaccggaaggctggttctcctgccagggtccctttgacatggacagctgcttatcaagacactccatcaacccctacagtaacagggagagcaggatcctcttcagcacctggaacctggatcacataatagaaaagaaacgcaccatcattcctacactggtggaagcaattaaggaacaagatggaagagaagtggactgggagtatttttatggcctgctttttacctcagagaacctaaaactagtgcacattgtctgccataagaaaaccacccacaagctcaactgtgacccaagcagaatctacaaaccccagacaaggttgaagcggaagcagcctgtgcggaaacgccagtgacacgtacacaccacgtcctggtctttgtttgaggcctgacgtgggcatcattttaacaggtgccttttttgtttttttgtttttcgtttttttggtcactccagtagctcctggaaaaaaccttaaaaaatgtttcctccaaatctgatttcattacatttctgaattgttggggttttttttgttgttttgttttgttttgtagatggagtttcacttttgttgcccaggctggagtgtagtggcgcgatctcggctcagcctcccgagtagctgggattacaggcatgtgccaccacgcccggctaatgtttgtatttttagtagagacggggtttcaccatgttggtcaggctggtctcaaactcctgacctcaggtgatccgcccacctcagcctcccaaagtgctgggatgacaggtgtgagccactgcgcccagcctgaatcatttcttataccttctgacagcccaacttccagaggacagctctggggtactcgttggatgtctgtgagtacctggtcatacgggtcagtagggataagaattgtctctgggctgaggaattcttctgttctctggtttcaccagcgttgggtttgctcatgtaatgtggtcaccatactcaaatggtgtcatggctgaagttggccaccttgcttgagggacaagttgtttatgtatcagctctctgctgggtctccctttccatggcaaatgggcagctccatcctcttgactcttctaaatgcccaaaagaggtgtcatgctttgggggtacgatgtttatactccgtaaagaacatacaaggacattcactgctgatttttttttttgtttgtttgagacagggtctcactctgtcgctcaggctggagtgcagtgatgcaatcttggctcactgcaacctccgcctctcaggttcaagtggttctccttcctcagcctcccaagtagctgggattacaggcacctaccaccagggccagctaatttttgtatgtttagtagaaacggggtttcaccatgttggccaggctgttctcgaactcctgacctcaggtgatctgcccgcctcggtctcccaaagtgctgggattacaggcatgagccactgcacctgacctgctgaattgtttataatggcaagaaataggaaaccccccaatgtctgttgaacagctatcacgttgaaccacgtgaaactgctgttttctaggccaaaaatggtgagcgatcatttatttcatgattcaacctgatacatttacatagtgcaaaactgtgtcacagtttcaggcttttatgaggaaagcgtttctgtgtagaaactggaagctgttcagggcatcggcagctgaaccctgctccgttggtcagcgttactatcatctcggatcatatggagctcatgtcagccgtgtgggtggcgggtgcacagagacggtctggaaggaaacacgcggatctgaacagcagtaatcctgggggatacgggggttgggctagattacagagggctcattttctacgtcatgtattttatgatacttgaattttttgaaatgggcatttattttataacatgttaaaatgtactttttaaattaagtcattttgtaatatttgaatttttacatttgttgtacaatcaggaaaagcaataaagatttttcaaaaataga

SEQ ID NO: 127550 - DNA, 3028 bp, Homo sapiens
  Payload ID: 4961
  Gene Symbol: DFFB
  Gene Name: DNA fragmentation factor, 40kDa, beta polypeptide (caspase-activated DNase)
  Uniprot ID: O76075
  ENST ID: ENST00000378209
  CDS Start-End: 324-1340
ccgctactctggccctcagggttgtgtagtttccggggccacggcacctgggcacaccaggtggcgtcgcgcctttgctttcctgagccttctgagtaaggtaatgtggtgtccgtggggcgacgcctgcgcacaagaccgcgtcgggcctcacttttcccaggccttctgggtaatgtagtttccgggatcggcacccggcctgtgccagcttgcagagctcaccaggtgcagacccctgcggccagggcgaggacggatctgagcagctgggcagcaggtgccaccgcctgtgggacccagagggcttgaggacatctgcaatgctccagaagcccaagagcgtgaagctgcgggccctgcgcagcccgaggaagttcggcgtggctggccggagctgccaggaggtgctgcgcaagggctgtctccgcttccagctccctgagcgcggttcccggctgtgcctgtacgaggatggcacggagctgacggaagattacttccccagtgttcccgacaacgccgagctggtgctgctcaccttgggccaggcctggcagggctatgtgagcgacatcaggcgcttcctcagtgcatttcacgagccacaggtggggctcatccaggccgcccagcagctgctgtgtgatgagcaggccccacagaggcagaggctgctggctgacctcctgcacaacgtcagccagaacatcgcggccgagacccgggctgaggacccgccgtggtttgaaggcttggagtcccgatttcagagcaagtctggctatctgagatacagctgtgagagccggatccggagttacctgagggaggtgagctcctacccctccacggtgggtgcggaggctcaggaggaattcctgcgggtcctcggctccatgtgccagaggctccggtccatgcagtacaatggcagctacttcgacagaggagccaagggcggcagccgcctctgcacaccggaaggctggttctcctgccagggtccctttgacatggacagctgcttatcaagacactccatcaacccctacagtaacagggagagcaggatcctcttcagcacctggaacctggatcacataatagaaaagaaacgcaccatcattcctacactggtggaagcaattaaggaacaagatggaagagaagtggactgggagtatttttatggcctgctttttacctcagagaacctaaaactagtgcacattgtctgccataagaaaaccacccacaagctcaactgtgacccaagcagaatctacaaaccccagacaaggttgaagcggaagcagcctgtgcggaaacgccagtgacacgtacacaccacgtcctggtctttgtttgaggcctgacgtgggcatcattttaacaggtgccttttttgtttttttgtttttcgtttttttggtcactccagtagctcctggaaaaaaccttaaaaaatgtttcctccaaatctgatttcattacatttctgaattgttggggttttttttgttgttttgttttgttttgtagatggagtttcacttttgttgcccaggctggagtgtagtggcgcgatctcggctcagcctcccgagtagctgggattacaggcatgtgccaccacgcccggctaatgtttgtatttttagtagagacggggtttcaccatgttggtcaggctggtctcaaactcctgacctcaggtgatccgcccacctcagcctcccaaagtgctgggatgacaggtgtgagccactgcgcccagcctgaatcatttcttataccttctgacagcccaacttccagaggacagctctggggtactcgttggatgtctgtgagtacctggtcatacgggtcagtagggataagaattgtctctgggctgaggaattcttctgttctctggtttcaccagcgttgggtttgctcatgtaatgtggtcaccatactcaaatggtgtcatggctgaagttggccaccttgcttgagggacaagttgtttatgtatcagctctctgctgggtctccctttccatggcaaatgggcagctccatcctcttgactcttctaaatgcccaaaagaggtgtcatgctttgggggtacgatgtttatactccgtaaagaacatacaaggacattcactgctgatttttttttttgtttgtttgagacagggtctcactctgtcgctcaggctggagtgcagtgatgcaatcttggctcactgcaacctccgcctctcaggttcaagtggttctccttcctcagcctcccaagtagctgggattacaggcacctaccaccagggccagctaatttttgtatgtttagtagaaacggggtttcaccatgttggccaggctgttctcgaactcctgacctcaggtgatctgcccgcctcggtctcccaaagtgctgggattacaggcatgagccactgcacctgacctgctgaattgtttataatggcaagaaataggaaaccccccaatgtctgttgaacagctatcacgttgaaccacgtgaaactgctgttttctaggccaaaaatggtgagcgatcatttatttcatgattcaacctgatacatttacatagtgcaaaactgtgtcacagtttcaggcttttatgaggaaagcgtttctgtgtagaaactggaagctgttcagggcatcggcagctgaaccctgctccgttggtcagcgttactatcatctcggatcatatggagctcatgtcagccgtgtgggtggcgggtgcacagagacggtctggaaggaaacacgcggatctgaacagcagtaatcctgggggatacgggggttgggctagattacagagggctcattttctacgtcatgtattttatgatacttgaattttttgaaatgggcatttattttataacatgttaaaatgtactttttaaattaagtcattttgtaatatttgaatttttacatttgttgtacaatcaggaaaagcaataaagatttttcaaaaataga

SEQ ID NO: 127551 - DNA, 3152 bp, Homo sapiens
  Payload ID: 4961
  Gene Symbol: DFFB
  Gene Name: DNA fragmentation factor, 40kDa, beta polypeptide (caspase-activated DNase)
  Uniprot ID: O76075
  ENST ID: ENST00000491998
  CDS Start-End: 324-1136
ccgctactctggccctcagggttgtgtagtttccggggccacggcacctgggcacaccaggtggcgtcgcgcctttgctttcctgagccttctgagtaaggtaatgtggtgtccgtggggcgacgcctgcgcacaagaccgcgtcgggcctcacttttcccaggccttctgggtaatgtagtttccgggatcggcacccggcctgtgccagcttgcagagctcaccaggtgcagacccctgcggccagggcgaggacggatctgagcagctgggcagcaggtgccaccgcctgtgggacccagagggcttgaggacatctgcaatgctccagaagcccaagagcgtgaagctgcgggccctgcgcagcccgaggaagttcggcgtggctggccggagctgccaggaggtgctgcgcaagggctgtctccgcttccagctccctgagcgcggttcccggctgtgcctgtacgaggatggcacggagctgacggaagattacttccccagtgttcccgacaacgccgagctggtgctgctcaccttgggccaggcctggcagggctatgtgagcgacatcaggcgcttcctcagtgcatttcacgagccacaggtggggctcatccaggccgcccagcagctgctgtgtgatgagcaggccccacagaggcagaggctgctggctgacctcctgcacaacgtcagccagaacatcgcggccgagacccgggctgaggacccgccgtggtttgaaggcttggagtcccgatttcagagcaagtctggctatctgagatacagctgtgagagccggatccggagttacctgagggaggtgagctcctacccctccacggtgggtgcggaggctcaggaggaattcctgcgggtcctcggctccatgtgccagaggctccggtccatgcagtacaatggcagctacttcgacagaggagccaagggcggcagccgcctctgcacaccggaaggctggttctcctgccagggtccctttgacatggacagctgcttatcaagacactccatcaacccctacagtaacagggagagcaggatcctcttcagcacctggaacctggatcacatagatggagtcttgctctgtggcccaggctaaagtgcagtggcaggatcatggctcactgaagccctgaactcctggcctcaagcaatcctcctgcctcagcctcctgagtcgctgggactacagaatagaaaagaaacgcaccatcattcctacactggtggaagcaattaaggaacaagatggaagagaagtggactgggagtatttttatggcctgctttttacctcagagaacctaaaactagtgcacattgtctgccataagaaaaccacccacaagctcaactgtgacccaagcagaatctacaaaccccagacaaggttgaagcggaagcagcctgtgcggaaacgccagtgacacgtacacaccacgtcctggtctttgtttgaggcctgacgtgggcatcattttaacaggtgccttttttgtttttttgtttttcgtttttttggtcactccagtagctcctggaaaaaaccttaaaaaatgtttcctccaaatctgatttcattacatttctgaattgttggggttttttttgttgttttgttttgttttgtagatggagtttcacttttgttgcccaggctggagtgtagtggcgcgatctcggctcagcctcccgagtagctgggattacaggcatgtgccaccacgcccggctaatgtttgtatttttagtagagacggggtttcaccatgttggtcaggctggtctcaaactcctgacctcaggtgatccgcccacctcagcctcccaaagtgctgggatgacaggtgtgagccactgcgcccagcctgaatcatttcttataccttctgacagcccaacttccagaggacagctctggggtactcgttggatgtctgtgagtacctggtcatacgggtcagtagggataagaattgtctctgggctgaggaattcttctgttctctggtttcaccagcgttgggtttgctcatgtaatgtggtcaccatactcaaatggtgtcatggctgaagttggccaccttgcttgagggacaagttgtttatgtatcagctctctgctgggtctccctttccatggcaaatgggcagctccatcctcttgactcttctaaatgcccaaaagaggtgtcatgctttgggggtacgatgtttatactccgtaaagaacatacaaggacattcactgctgatttttttttttgtttgtttgagacagggtctcactctgtcgctcaggctggagtgcagtgatgcaatcttggctcactgcaacctccgcctctcaggttcaagtggttctccttcctcagcctcccaagtagctgggattacaggcacctaccaccagggccagctaatttttgtatgtttagtagaaacggggtttcaccatgttggccaggctgttctcgaactcctgacctcaggtgatctgcccgcctcggtctcccaaagtgctgggattacaggcatgagccactgcacctgacctgctgaattgtttataatggcaagaaataggaaaccccccaatgtctgttgaacagctatcacgttgaaccacgtgaaactgctgttttctaggccaaaaatggtgagcgatcatttatttcatgattcaacctgatacatttacatagtgcaaaactgtgtcacagtttcaggcttttatgaggaaagcgtttctgtgtagaaactggaagctgttcagggcatcggcagctgaaccctgctccgttggtcagcgttactatcatctcggatcatatggagctcatgtcagccgtgtgggtggcgggtgcacagagacggtctggaaggaaacacgcggatctgaacagcagtaatcctgggggatacgggggttgggctagattacagagggctcattttctacgtcatgtattttatgatacttgaattttttgaaatgggcatttattttataacatgttaaaatgtactttttaaattaagtcattttgtaatatttgaatttttacatttgttgtacaatcaggaaaagcaataaagatttttcaaaaataga

SEQ ID NO: 127552 - DNA, 2923 bp, Homo sapiens
  Payload ID: 4961
  Gene Symbol: DFFB
  Gene Name: DNA fragmentation factor, 40kDa, beta polypeptide (caspase-activated DNase)
  ENST ID: ENST00000477548
  CDS Start-End: 132-443
ggcacccggcctgtgccagcttgcagagctcaccaggtgcagacccctgcggccagggcgaggacggatctgagcagctgggcagcaggtgccaccgcctgtgggacccagagggcttgaggacatctgcaatgctccagaagcccaagagcgtgaagctgcgggccctgcgcagcccgaggaagttcggcgtggctggccggagctgccaggaggtgctgcgcaagggctgtctccgcttccagctccctgagcgcggttcccggctgtgcctgtacgaggatggcacggagctgacggaagattacttccccagtgttcccgacaacgccgagctggtgctgctcaccttgggccaggcctggcagggctggtttcgccatgtttcccaggatagtctcacactcctgggctcaagctgtcctcctgccttggtctcctaaagtgctgggattacagatgtgagcgacatcaggcgcttcctcagtgcatttcacgagccacaggtggggctcatccaggccgcccagcagctgctgtgtgatgagcaggccccacagaggcagaggctgctggctgacctcctgcacaacgtcagccagaacatcgcggccgagacccgggctgaggacccgccgtggtttgaaggcttggagtcccgatttcagagcaagtctggctatctgagatacagctgtgagagccggatccggagttacctgagggaggtgagctcctacccctccacggtgggtgcggaggctcaggaggaattcctgcgggtcctcggctccatgtgccagaggctccggtccatgcagtacaatggcagctacttcgacagaggagccaagggcggcagccgcctctgcacaccggaaggctggttctcctgccagggtccctttgacatggacagctgcttatcaagacactccatcaacccctacagtaacagggagagcaggatcctcttcagcacctggaacctggatcacataatagaaaagaaacgcaccatcattcctacactggtggaagcaattaaggaacaagatggaagagaagtggactgggagtatttttatggcctgctttttacctcagagaacctaaaactagtgcacattgtctgccataagaaaaccacccacaagctcaactgtgacccaagcagaatctacaaaccccagacaaggttgaagcggaagcagcctgtgcggaaacgccagtgacacgtacacaccacgtcctggtctttgtttgaggcctgacgtgggcatcattttaacaggtgccttttttgtttttttgtttttcgtttttttggtcactccagtagctcctggaaaaaaccttaaaaaatgtttcctccaaatctgatttcattacatttctgaattgttggggttttttttgttgttttgttttgttttgtagatggagtttcacttttgttgcccaggctggagtgtagtggcgcgatctcggctcagcctcccgagtagctgggattacaggcatgtgccaccacgcccggctaatgtttgtatttttagtagagacggggtttcaccatgttggtcaggctggtctcaaactcctgacctcaggtgatccgcccacctcagcctcccaaagtgctgggatgacaggtgtgagccactgcgcccagcctgaatcatttcttataccttctgacagcccaacttccagaggacagctctggggtactcgttggatgtctgtgagtacctggtcatacgggtcagtagggataagaattgtctctgggctgaggaattcttctgttctctggtttcaccagcgttgggtttgctcatgtaatgtggtcaccatactcaaatggtgtcatggctgaagttggccaccttgcttgagggacaagttgtttatgtatcagctctctgctgggtctccctttccatggcaaatgggcagctccatcctcttgactcttctaaatgcccaaaagaggtgtcatgctttgggggtacgatgtttatactccgtaaagaacatacaaggacattcactgctgatttttttttttgtttgtttgagacagggtctcactctgtcgctcaggctggagtgcagtgatgcaatcttggctcactgcaacctccgcctctcaggttcaagtggttctccttcctcagcctcccaagtagctgggattacaggcacctaccaccagggccagctaatttttgtatgtttagtagaaacggggtttcaccatgttggccaggctgttctcgaactcctgacctcaggtgatctgcccgcctcggtctcccaaagtgctgggattacaggcatgagccactgcacctgacctgctgaattgtttataatggcaagaaataggaaaccccccaatgtctgttgaacagctatcacgttgaaccacgtgaaactgctgttttctaggccaaaaatggtgagcgatcatttatttcatgattcaacctgatacatttacatagtgcaaaactgtgtcacagtttcaggcttttatgaggaaagcgtttctgtgtagaaactggaagctgttcagggcatcggcagctgaaccctgctccgttggtcagcgttactatcatctcggatcatatggagctcatgtcagccgtgtgggtggcgggtgcacagagacggtctggaaggaaacacgcggatctgaacagcagtaatcctgggggatacgggggttgggctagattacagagggctcattttctacgtcatgtattttatgatacttgaattttttgaaatgggcatttattttataacatgttaaaatgtactttttaaattaagtcattttgtaatatttgaatttttacatttgttgtacaatcaggaaaagcaataaagatttttcaaaaataga

SEQ ID NO: 127553 - DNA, 686 bp, Homo sapiens
  Payload ID: 4961
  Gene Symbol: DFFB
  Gene Name: DNA fragmentation factor, 40kDa, beta polypeptide (caspase-activated DNase)
  ENST ID: ENST00000461150
  CDS Start-End: 1-235
aatagaaaagaaacgcaccatcattcctacactggtggaagcaattaaggaacaagatggaagagaagtggactgggagtatttttatggcctgctttttacctcagagaacctaaaactagtgcacattgtctgccataagaaaaccacccacaagctcaactgtgacccaagcagaatctacaaaccccagacaaggttgaagcggaagcagcctgtgcggaaacgccagtgacacgtacacaccacgtcctggtctttgtttgaggcctgacgtgggcatcattttaacagtttcaggcttttatgaggaaagcgtttctgtgtagaaactggaagctgttcagggcatcggcagctgaaccctgctccgttggtcagcgttactatcatctcggatcatatggagctcatgtcagccgtgtgggtggcgggtgcacagagacggtctggaaggaaacacgcggatctgaacagcagtaatcctgggggatacgggggttgggctagattacagagggctcattttctacgtcatgtattttatgatacttgaattttttgaaatgggcatttattttataacatgttaaaatgtactttttaaattaagtcattttgtaatatttgaatttttacatttgttgtacaatcaggaaaagcaataaagatttttcaaaaataga

SEQ ID NO: 127554 - DNA, 2986 bp, Homo sapiens
  Payload ID: 4961
  Gene Symbol: DFFB
  Gene Name: DNA fragmentation factor, 40kDa, beta polypeptide (caspase-activated DNase)
  ENST ID: ENST00000468793
  CDS Start-End: 145-492
agtttccgggatcggcacccggcctgtgccagcttgcagagctcaccaggtgcagacccctgcggccagggcgaggacggatctgagcagctgggcagcaggtgccaccgcctgtgggacccagagggcttgaggacatctgcaatgctccagaagcccaagagcgtgaagctgcgggccctgcgcagcccgaggaagttcggcgtggctggccggagctgccaggaggtgctgcgcaagggctgtctccgcttccagctccctgagcgcggttcccggctgtgcctgtacgaggatggcacggagctgacggaagattacttccccagtgttcccgacaacgccgagctggtgctgctcaccttgggccaggcctggcagggctgtgagtggcaaggactttggagatgtgagcgacatcaggcgcttcctcagtgcatttcacgagccacaggtggggctcatccaggccgcccagcagctgctgtgtgatgagcaggccccacagaggcagaggctgctggctgacctcctgcacaacgtcagccagaacatcgcggccgagacccgggctgaggacccgccgtggtttgaaggctggagtgcagtggcgtgatcttggctcaccgcaacctctgcctccctgcaccctctgcctcccaggttaaagcgattctcctgcctcagcctcccgagtagctgggattacaggcttggagtcccgatttcagagcaagtctggctatctgagatacagctgtgagagccggatccggagttacctgagggaggtgagctcctacccctccacggtgggtgcggaggctcaggaggaattcctgcgggtcctcggctccatgtgccagaggctccggtccatgcagtacaatggcagctacttcgacagaggagccaagggcggcagccgcctctgcacaccggaaggctggttctcctgccagggtccctttgacatggacagctgcttatcaagacactccatcaacccctacagtaacagggagagcaggatcctcttcagcacctggaacctggatcacataatagaaaagaaacgcaccatcattcctacactggtggaagcaattaaggaacaagatggaagagaagtggactgggagtatttttatggcctgctttttacctcagagaacctaaaactagtgcacattgtctgccataagaaaaccacccacaagctcaactgtgacccaagcagaatctacaaaccccagacaaggttgaagcggaagcagcctgtgcggaaacgccagtgacacgtacacaccacgtcctggtctttgtttgaggcctgacgtgggcatcattttaacaggtgccttttttgtttttttgtttttcgtttttttggtcactccagtagctcctggaaaaaaccttaaaaaatgtttcctccaaatctgatttcattacatttctgaattgttggggttttttttgttgttttgttttgttttgtagatggagtttcacttttgttgcccaggctggagtgtagtggcgcgatctcggctcagcctcccgagtagctgggattacaggcatgtgccaccacgcccggctaatgtttgtatttttagtagagacggggtttcaccatgttggtcaggctggtctcaaactcctgacctcaggtgatccgcccacctcagcctcccaaagtgctgggatgacaggtgtgagccactgcgcccagcctgaatcatttcttataccttctgacagcccaacttccagaggacagctctggggtactcgttggatgtctgtgagtacctggtcatacgggtcagtagggataagaattgtctctgggctgaggaattcttctgttctctggtttcaccagcgttgggtttgctcatgtaatgtggtcaccatactcaaatggtgtcatggctgaagttggccaccttgcttgagggacaagttgtttatgtatcagctctctgctgggtctccctttccatggcaaatgggcagctccatcctcttgactcttctaaatgcccaaaagaggtgtcatgctttgggggtacgatgtttatactccgtaaagaacatacaaggacattcactgctgatttttttttttgtttgtttgagacagggtctcactctgtcgctcaggctggagtgcagtgatgcaatcttggctcactgcaacctccgcctctcaggttcaagtggttctccttcctcagcctcccaagtagctgggattacaggcacctaccaccagggccagctaatttttgtatgtttagtagaaacggggtttcaccatgttggccaggctgttctcgaactcctgacctcaggtgatctgcccgcctcggtctcccaaagtgctgggattacaggcatgagccactgcacctgacctgctgaattgtttataatggcaagaaataggaaaccccccaatgtctgttgaacagctatcacgttgaaccacgtgaaactgctgttttctaggccaaaaatggtgagcgatcatttatttcatgattcaacctgatacatttacatagtgcaaaactgtgtcacagtttcaggcttttatgaggaaagcgtttctgtgtagaaactggaagctgttcagggcatcggcagctgaaccctgctccgttggtcagcgttactatcatctcggatcatatggagctcatgtcagccgtgtgggtggcgggtgcacagagacggtctggaaggaaacacgcggatctgaacagcagtaatcctgggggatacgggggttgggctagattacagagggctcattttctacgtcatgtattttatgatacttgaattttttgaaatgggcatttattttataacatgttaaaatgtactttttaaattaagtcattttgtaatatttgaatttttacatttgttgtacaatcaggaaaagcaataaagatttttcaaaaataga

SEQ ID NO: 127555 - DNA, 2731 bp, Homo sapiens
  Payload ID: 4961
  Gene Symbol: DFFB
  Gene Name: DNA fragmentation factor, 40kDa, beta polypeptide (caspase-activated DNase)
  ENST ID: ENST00000475969
  CDS Start-End: 5-352
tgcaatgctccagaagcccaagagcgtgaagctgcgggccctgcgcagcccgaggaagttcggcgtggctggccggagctgccaggaggtgctgcgcaagggctgtctccgcttccagctccctgagcgcggttcccggctgtgcctgtacgaggatggcacggagctgacggaagattacttccccagtgttcccgacaacgccgagctggtgctgctcaccttgggccaggcctggcagggctgtgagtggcaaggactttggagatgtgagcgacatcaggcgcttcctcagtgcatttcacgagccacaggtggggctcatccaggccgcccagcagctgctgtgtgatgagcaggccccacagaggcagaggctgctggctgacctcctgcacaacgtcagccagaacatcgcggccgagacccgggctgaggacccgccgtggtttgaaggcttggagtcccgatttcagagcaagtctggctatctgagatacagctgtgagagccggatccggagttacctgagggaggtgagctcctacccctccacggtgggtgcggaggctcaggaggaattcctgcgggtcctcggctccatgtgccagaggctccggtccatgcagtacaatggcagctacttcgacagaggagccaagggcggcagccgcctctgcacaccggaaggctggttctcctgccagggtccctttgacatggacagctgcttatcaagacactccatcaacccctacagtaacagggagagcaggatcctcttcagcacctggaacctggatcacataatagaaaagaaacgcaccatcattcctacactggtggaagcaattaaggaacaagatggaagagaagtggactgggagtatttttatggcctgctttttacctcagagaacctaaaactagtgcacattgtctgccataagaaaaccacccacaagctcaactgtgacccaagcagaatctacaaaccccagacaaggttgaagcggaagcagcctgtgcggaaacgccagtgacacgtacacaccacgtcctggtctttgtttgaggcctgacgtgggcatcattttaacaggtgccttttttgtttttttgtttttcgtttttttggtcactccagtagctcctggaaaaaaccttaaaaaatgtttcctccaaatctgatttcattacatttctgaattgttggggttttttttgttgttttgttttgttttgtagatggagtttcacttttgttgcccaggctggagtgtagtggcgcgatctcggctcagcctcccgagtagctgggattacaggcatgtgccaccacgcccggctaatgtttgtatttttagtagagacggggtttcaccatgttggtcaggctggtctcaaactcctgacctcaggtgatccgcccacctcagcctcccaaagtgctgggatgacaggtgtgagccactgcgcccagcctgaatcatttcttataccttctgacagcccaacttccagaggacagctctggggtactcgttggatgtctgtgagtacctggtcatacgggtcagtagggataagaattgtctctgggctgaggaattcttctgttctctggtttcaccagcgttgggtttgctcatgtaatgtggtcaccatactcaaatggtgtcatggctgaagttggccaccttgcttgagggacaagttgtttatgtatcagctctctgctgggtctccctttccatggcaaatgggcagctccatcctcttgactcttctaaatgcccaaaagaggtgtcatgctttgggggtacgatgtttatactccgtaaagaacatacaaggacattcactgctgatttttttttttgtttgtttgagacagggtctcactctgtcgctcaggctggagtgcagtgatgcaatcttggctcactgcaacctccgcctctcaggttcaagtggttctccttcctcagcctcccaagtagctgggattacaggcacctaccaccagggccagctaatttttgtatgtttagtagaaacggggtttcaccatgttggccaggctgttctcgaactcctgacctcaggtgatctgcccgcctcggtctcccaaagtgctgggattacaggcatgagccactgcacctgacctgctgaattgtttataatggcaagaaataggaaaccccccaatgtctgttgaacagctatcacgttgaaccacgtgaaactgctgttttctaggccaaaaatggtgagcgatcatttatttcatgattcaacctgatacatttacatagtgcaaaactgtgtcacagtttcaggcttttatgaggaaagcgtttctgtgtagaaactggaagctgttcagggcatcggcagctgaaccctgctccgttggtcagcgttactatcatctcggatcatatggagctcatgtcagccgtgtgggtggcgggtgcacagagacggtctggaaggaaacacgcggatctgaacagcagtaatcctgggggatacgggggttgggctagattacagagggctcattttctacgtcatgtattttatgatacttgaattttttgaaatgggcatttattttataacatgttaaaatgtactttttaaattaagtcattttgtaatatttgaatttttacatttgttgtacaatcaggaaaagcaataaagatttttcaaaaataga

SEQ ID NO: 127556 - DNA, 649 bp, Homo sapiens
  Payload ID: 4961
  Gene Symbol: DFFB
  Gene Name: DNA fragmentation factor, 40kDa, beta polypeptide (caspase-activated DNase)
  ENST ID: ENST00000625756
  CDS Start-End: 338-649
acaaggggagggctccgctactctggccctcagggttgtgtagtttccggggccacggcacctgggcacaccaggtggcgtcgcgcctttgctttcctgagccttctgagtaaggtaatgtggtgtccgtggggcgacgcctgcgcacaagaccgcgtcgggcctcacttttcccaggccttctgggtaatgtagtttccgggatcggcacccggcctgtgccagcttgcagagctcaccaggtgcagacccctgcggccagggcgaggacggatctgagcagctgggcagcaggtgccaccgcctgtgggacccagagggcttgaggacatctgcaatgctccagaagcccaagagcgtgaagctgcgggccctgcgcagcccgaggaagttcggcgtggctggccggagctgccaggaggtgctgcgcaagggctgtctccgcttccagctccctgagcgcggttcccggctgtgcctgtacgaggatggcacggagctgacggaagattacttccccagtgttcccgacaacgccgagctggtgctgctcaccttgggccaggcctggcagggctggtttcgccatgtttcccaggatagtctcacactcctgggctcaagctgtcctcctgccttggtctcctaa

SEQ ID NO: 127557 - DNA, 1403 bp, Homo sapiens
  Payload ID: 4962
  Gene Symbol: DFFA
  Gene Name: DNA fragmentation factor, 45kDa, alpha polypeptide
  Uniprot ID: O00273
  ENST ID: ENST00000377036
  CDS Start-End: 31-837
cgaaggtgggcaggtcccaccttgtggaggatggaggtgaccggggacgccggggtaccagaatctggcgagatccggactctaaagccgtgtctgctgcgccgcaactacagccgcgaacagcacggcgtggccgcctcctgcctcgaagacctgaggagcaaggcctgtgacattctggccattgataagtccctgacaccagtcaccctggtcctggcagaggatggcaccatagtggatgatgacgattactttctgtgtctaccttccaatactaagtttgtggcattggctagtaatgagaaatgggcatacaacaattcagatggaggtacagcttggatttcccaagagtcctttgatgtagatgaaacagacagcggggcagggttgaagtggaagaatgtggccaggcagctgaaagaagatctgtccagcatcatcctcctatcagaggaggacctccagatgcttgttgacgctccctgctcagacctggctcaggaactacgtcagagttgtgccaccgtccagcggctgcagcacacactccaacaggtgcttgaccaaagagaggaagtgcgtcagtccaagcagctcctgcagctgtacctccaggctttggagaaagagggcagcctcttgtcaaagcaggaagagtccaaagctgcctttggtgaggaggtggatgcagtagacacgggtatcagcagagagacctcctcggacgttgcgctggcgagccacatccttactgcactgagggagaagcaggctccagagctgagcttatctagtcaggatttggaggtgggcggaaaccagggtcactgagctacagaggaggacatgccctgggatgtagtagtatcatgcagaggtgtgtgggcccttttgttcacctctgcagactgtgaatcctagctgccagtttgcctattatatgccaaggcatttgcaaaaatctcattaatctaaatcaaaatagctttaaagaaaaatgcatacacttcctcagatcatcaaacagactctggtccaaggttggtaatgaaatgactgttcctgacagggaggaatagcagggcccaatcttctgagatggcttctgggtctttccatggtcagagaagatctatagtccgtcctgaggtctgtcaatgtcacaggaaaaggcaaacttgaggggatcgtcgcctgctggctaagaccagggagctaaaaacttgaggaagggaacctgcctgggtgggtgctacttctgattcattgtccttgtccctgtcataagtacctccctattgtagatagaagggaaggaaactgttgacttgagcttggctaaatttcctgaaggtggaggaccttagagttgctccaagtaaactttccaaggactt

SEQ ID NO: 127558 - DNA, 6032 bp, Homo sapiens
  Payload ID: 4962
  Gene Symbol: DFFA
  Gene Name: DNA fragmentation factor, 45kDa, alpha polypeptide
  Uniprot ID: O00273
  ENST ID: ENST00000377038
  CDS Start-End: 69-1064
gagtagaaggaccgccgctccggcctcccgcgacttctcgaaggtgggcaggtcccaccttgtggaggatggaggtgaccggggacgccggggtaccagaatctggcgagatccggactctaaagccgtgtctgctgcgccgcaactacagccgcgaacagcacggcgtggccgcctcctgcctcgaagacctgaggagcaaggcctgtgacattctggccattgataagtccctgacaccagtcaccctggtcctggcagaggatggcaccatagtggatgatgacgattactttctgtgtctaccttccaatactaagtttgtggcattggctagtaatgagaaatgggcatacaacaattcagatggaggtacagcttggatttcccaagagtcctttgatgtagatgaaacagacagcggggcagggttgaagtggaagaatgtggccaggcagctgaaagaagatctgtccagcatcatcctcctatcagaggaggacctccagatgcttgttgacgctccctgctcagacctggctcaggaactacgtcagagttgtgccaccgtccagcggctgcagcacacactccaacaggtgcttgaccaaagagaggaagtgcgtcagtccaagcagctcctgcagctgtacctccaggctttggagaaagagggcagcctcttgtcaaagcaggaagagtccaaagctgcctttggtgaggaggtggatgcagtagacacgggtatcagcagagagacctcctcggacgttgcgctggcgagccacatccttactgcactgagggagaagcaggctccagagctgagcttatctagtcaggatttggagttggttaccaaggaagaccccaaagcactggctgttgccttgaactgggacataaagaagacggagactgttcaggaggcctgtgagcgggagctcgccctgcgcctgcagcagacgcagagcttgcattctctccggagcatctcagcaagcaaggcctcaccacctggtgacctgcagaatcctaagcgagccagacaggatcccacatagcagcagcgggaagtgtgccaaggaagctctgtggcgttgtgttattggtagacaccctcagcctcatcatttgactacctatgtactactctaccccctgccttagagcaccttccagagaagctattccaggtctcaacatacgccgttccaccaattttttttttagccccaccagcttcaggacttctgccaattttgaatgatatagctgcaccaacaatatcccgcctcctctaattacatatgatgttctctgttcaaaagtaattggcagtgattggccaggcgcagtggctcacgcctgtaatcccagcactgggaggccgaggggggcggatcgtgaagtcaggagatcgagaccatcctggctaacatggtgaaaccctgtctctactaaaaatacaaaaaaaattagccagccatggtggcgggcgcctgtaatcccagctacttgggaggctgaggcaggagaatggcatgaacctgggaggcagagcttgcagtgagctgagattgcgccactgcactccagcctgggcaacagagcgagactccgtctcaaaaaaaaaaaaaaaaaaagtaattggcagtgactatgggcgcactgcctaacatttagccctgccccatatggaacatgttaaaaaaaaaaaaagccaggccgagcgtgttggctcacgcttgtaatcccagcactttgggaggccgaggcgggtggatcacgaggtcaggagatcgagaccatcctggctaacacagtgaaacgtgtttttactaaaagtacaaaaaactagctgggcgtggtggcaggagcctgtagtcccagctactcgggaggctgaggcaggagaattgcttgaaccggggaggcagaagttgcagtgagccgagattatgccactgtactccagcctgggtgacagagtgacactctgtctcaaaaaaaaaaaaaaaaaggacaggcacgacagtggctcacacctttgatcccagcactttggaggccgatgcaggcggatcacatgaggtcaggagttcaagaccaacctggccaatatggtgaaaccccgtctctactaaaaatacaaaaattagctgggcatgatggcgggtgcctgtaatcccagctactcggtaggcagaggttgcagtgagctgagagcgcaccactgcactccagcctgggtgacagagctagactccgtatctcaagaaaaaaaaaaagttttgttttgtttttttgagacagagtctcactctgtcacctagtctggagtgcagtggcacattctcggctcactgcaacccccacctcccaggttcaagcgattctcctgtttcagcctcctgagcagctgggattacaggcacgtgccaccatgcccggctaatttttgtatttttagtagagacagggttttgtcacattggccaggctggtctcaaactcctgacctcaggtgatccacccacctcagcctcccaaagtgctgggattacaggtgtgagccaccacccctggccagaaaaaaaagcttttaaataaagtaattgtcagcttaggcaacatagcaagaccctgtctctacaaaaaaaaaatttaagttagccaggcatggtggcactgacctataatcctagctactctggaggctaaggcgagagtatcacttgagcccaggagctcaaggctgatcatgccaccatactccagcctggatgatagagtaagaccctacttttttttttttttttttaaaaaggtaaccatcaagggcaatgaaaagaaatggtcgtatttccaattcattatccttattctgaagatagtacggcagaattttaagcagagatagtggtgaagatggtgacattatagagtgttgactatggccacaatcttgtttctccagttaatgaatttttttatgtgtttgtttaaagatacatattaagcttgtagaccatagggacatacggagagtccattgctaatatctcactcagtattgtgaaattctatctcaccaccgtgaaactcttcagttttctaattgctttatcagcagggggtataaaaggtcatgaaagcaatttccacatgctgtggctccaggtctctgggtgtgaagcagagcaagcctggtttgtcctcctcctgtctccacacagacggcttctgcaggtttggtaatctacagtacactccttgcagggaaaaggtgatgagtcatcatggacttatttgaccactttttatgcatgcttagaggaaaacagaatactgttaagagattcatctgctagttattaagtaaagaaatatcacaataggccgggcgcagtggctcacacctgtaatcccagcattttgggaggccaaggtgggcggatcacctgaggtcaggagttcgagaccagcctagccaacatggtgaaaccccgtctctactgaaattataaaaaattagccgggtgtagtggtacacgcctgtagtcccagttacttgggaggctgaggcatgagaattgcttgaacccaggaagtggaggtggaggtgagccgaaattgtgccactgtactccagcctgcaacagagtgagacactgtcacacaaaaaagaaagaaatatcacaatatgtcacaataggccgggcgcagtggctcacacctgcagtcccagcactttgggaggccaaggcagatggatcacctgaggtcaggagtttgagaccagcctggccaacgtgacaaaacccagtctactaaaaatacaaaaattagccaggcgtgatggtgggcacctgtaatcccagctactcaggaggctgagacatgagaatcgcttgaacccaggaggtggagattgcactgagctgagatcctgccactgggctccagcctgggtgacagaatgagactctgtctttaaaaaaaaaaaaaaaagaaaatcacaataagtcctagggtaaagatgggggtacagaaaacaattaaatagaacaaaaacaactgtttccttttcctgtgattcaagaagggcttagatcttctactcagcatccttttactaatgccctccattggctctcaccccaacatttccttttttatagcttattttgtaatgcctccttaattatcctttaatagaagccaccgctgataagctacctacactcatacagaagcattaatataatgccccagatgtactgtttcagggcaaaaaggaaaataatttccaacaaagtggtgtgtgtttcactgtcagatgcttgcacttacacacggaatcgctgtgcatccgacagaggctgattggcacatggggcacggggattgtcagctcaaacaccgtcagcagcgttgcccttggaaatgggatttcccagaacagtaaacgtgtctgtccttgatttacagagtagctacattcctaggaaatccagggtacattaaaactcaccatgttacccaggctggtctcaaactccaggcctcaagcaatcctcccacatcagcttcccagaattttgggattacaggcatgagccaccacacccagccagaatattttatttctgttagacacacagagcgttcgttgactcgtctgggcgttagtgttaatattctgtacttgaagcaagcccaccaagcggctgaactgggtggataatggaaaatgtcctgtggatttgggagtgagacaaaccggcttgagtctaacctctcagttagtctaaggctccaagcttgaaagggttaaatgaagtactatatttgttttgtttcgttttcgttttgtttgaggctttgctctgttgcccaggctggagtgtagtggcacaatctctgctcactgcaacctccatctcccaggttcaggcgattctcttgcctcagcctccagagtagctgggattacaggtgcccgccaccacacccggctaagttttttttggtatttttagtagacacagggtttcaccatgttggctagactggtctcaaactcctgacctcaagtgatccacctgccttggcctcccaaagtgctgggagtataggtggtgagccaccacgcctggcctaaatgaagtaccacatgaccgacagaccgacctggggaacatagcaagaccccatctctacaaaaatgtaaaaaataaaaattagccgggtgtagtggtacatgcctgtaatcctagatactcgggaggctaaggcagaaggatcacttgagcccaggagttcgaggctacaatgagctgtgatcgtgccactgcactccatcctgggtggcagagtgaggccctgtctcaaaataaataatccagtcccccccaagaaaggaatgaagtgctataatgagaaaaatcctagtacctaacatatagtagacagtggagagtggttctctttcgtttctcaggggcagacagatggggtgctggagtcctctatcaaagagtcagagctctatcccagatgtgtaatgaacgtggtcacagacatattgtcccattaccatttaccttccctataaccactgtgcctccagccttgtagaatagacacataggagcgcagcaatacgtctaaaaataggagtgagagagggcagggcatgcccgttcttgtggtagaagaaaagaatgtcaaagaaagcagctgggactaatgaactttacattagccatattccattatttcagcttaagtcaaatgtcggtcctcatgaggcaactggctttgacaggagctacgctaattaccacttaccaacctttaatttctgggtaaaagcaaaagagaaaaactaatggatttttcattttccagagagacaagaataaaataatagtagtctgtagaaaaaagaaaacctgcatcaattacaagaattattaatgtatctttaataaataaccacattatttagctgtttaatttcctaa

SEQ ID NO: 127559 - DNA, 744 bp, Homo sapiens
  Payload ID: 4962
  Gene Symbol: DFFA
  Gene Name: DNA fragmentation factor, 45kDa, alpha polypeptide
  ENST ID: ENST00000476658
  CDS Start-End: 22-501
gcaggtcccaccttgtggaggatggaggtgaccggggacgccggggtaccagaatctggcgagatccggactctaaagccgtgtctgctgcgccgcaactacagccgcgaacagcacggcgtggccgcctcctgcctcgaagacctgaggagcaaggcctgtgacattctggccattgataagtccctgacaccagtcaccctggtcctggcagaggatggcaccatagtggatgatgacgattactttctgtgtctaccttccaatactaagtttgtggcattggctagtaatgagaaatgggcatacaacaattcagatggaggtacagcttggatttcccaagagtcctttgatgtagatgaaacagacagcggggcagggttgaagtggaagaatgtggccaggcagctgaaagaagatctgtccagcatcatcctcctatcagaggaggacctccagagtccaaagctgcctttggtgaggaggtggatgcagtagacacgggtatcagcagagagacctcctcggacgttgcgctggcgagccacatccttactgcactgagggagaagcaggctccagagctgagcttatctagtcaggatttggaggtgggcggaaaccagggtcactgagctacagaggaggacatgccctgggatgtagtagtatcatgcagagttggttaccaaggaagaccccaaagcactggctgttgccttgaactgggacataaagaag

SEQ ID NO: 127560 - DNA, 2371 bp, Homo sapiens
  Payload ID: 4963
  Gene Symbol: DMC1
  Gene Name: DNA meiotic recombinase 1
  Uniprot ID: Q14565
  ENST ID: ENST00000216024
  CDS Start-End: 278-1300
gcccctcgtcgccctctgtaggcctgctccctccccgcccttccaccctcaccctgcgccccgccccggccccttggtcctcgccccgccctcctcgtttggcgccaaaccctgtggtcaacggcgcgcgggtctccaggctccgtgttctaggcccgagttagaatcctgtcagctgaggaggtcgggcggggcagaggggcttcaccttgaaaatctcggggagactgtgggtacgagggggaagtgattatttttctgttgcccacttttcaatatgaaggaggatcaagttgtggcggaagaaccaggattccaagatgaagaggaatctttgtttcaagatattgacctgttacagaaacatggaattaacgtggctgacattaagaaactgaaatcagtaggaatctgtaccatcaaaggtatacagatgacaacaagaagagctctatgcaatgtcaaaggactctcagaagccaaagtagacaagattaaagaggcagcgaacaaactaattgaaccaggattcttgactgcatttgagtatagtgaaaagaggaaaatggttttccatatcaccaccgggagccaggaatttgataagttactaggaggtggaattgaaagtatggcaattacagaagcttttggagaatttcgtactggaaaaacccagctttctcataccctctgtgtgacagctcaacttccaggagctggtggctacccaggaggaaagattatcttcattgatacagaaaatactttccgtccagatcgccttagggacattgctgatcgctttaatgtagaccatgatgcagtactggacaacgtactttatgcacgtgcatatactagtgaacatcagatggagctacttgattatgtagcagcaaagttccatgaagaagctggcatcttcaagctattgattatcgattcaataatggcactttttcgagtggatttcagtggccgtggggagttggccgaacggcagcaaaaattggcccagatgttgtcacgactccaaaaaatctcagaagaatataacgtggctgtttttgtgaccaatcaaatgactgccgatccaggagcaactatgacctttcaggcagatcccaaaaaacccattgggggacacattctggctcatgcttcaacaacaagaataagcttgcgaaagggaagaggagagctcagaattgccaagatttatgacagtcctgagatgcctgaaaatgaagccaccttcgcaataactgctggaggaattggggatgccaaggagtaggtggtgaattgatgcaaattgcttcttagtgcttattaggagctgaagaaatggaaaagcagtctccaatttcacatcttgaaatagaggttttttcccacatgttactaaagaaaagtcagcaaagagatttaaatcttatatttatcttaaaagtccctgatttatgataactatacattgtatgtaaattcagggatatgtatatgtatgtttgtgtgtgtgtgtgtttgtgtgtgtatacctgacatatatagtagatatatatacctattgaaattctctcactctgtgtatgtatatatacctatggaaaactagttgttgggaaaggagtacgtgattccctccctttcacttttcaaagtgagccactaaacagaaagtctaagagttcagaaatgtcccattctcctaaggactttcccttcaccatttttctagggtatagtgccactgacttacatagctagatgtttttccacaagaggatttaagggaggaatgtttataggacacacacacaaaagctctttctatttataatatcaaactgcatattcacctttatagcaacagaaaacagacattaaattaagccaaattttaaatcatttgactttgacaagcagaaattacttttaaaaaatgtatttatggctgggcgtggtggctcacacctgtaatcccagcactttgggaggccgaggcaggtggatcacttgaggtcaggagttcaagaccagcctggccaacatggagaaaccccatctctactaaaaatacaaaaattagccaagtgcagtggcatgtgcttgtaatcccagctactctggaggctgaggcaggagaattgcttgaacccaggaggcagagattgcggtgagccaagatggcaccactgcactccagcctaggtgacagagtgagactccgtctcaaaaaaaaaaaaaaaacttttttaaaatgttaaaattaatttaaatgtaaaatttctgaatactaatcttagaaatgtgtaaaagatattattttgattgttaaacaaataaaatcctgttttcaaaatgc

SEQ ID NO: 127561 - DNA, 721 bp, Homo sapiens
  Payload ID: 4963
  Gene Symbol: DMC1
  Gene Name: DNA meiotic recombinase 1
  ENST ID: ENST00000439567
  CDS Start-End: 112-721
ccgagttagaatcctgtcagctgaggaggtcgggcggggcagaggggcttcaccttgaaaatctcggggagactgtggaagtgattatttttctgttgcccacttttcaatatgaaggaggatcaagttgtggcggaagaaccaggattccaagatgaagaggaatctttgtttcaagatattgacctgttacagaaacatggaattaacgtggctgacattaagaaactgaaatcagtaggaatctgtaccatcaaaggtatacagatgacaacaagaagagctctatgcaatgtcaaaggactctcagaagccaaagtagacaagattaaagaggcagcgaacaaactaattgaaccaggattcttgactgcatttgagtatagtgaaaagaggaaaatggttttccatatcaccaccgggagccaggaatttgataagttactaggaggtggaattgaaagtatggcaattacagaagcttttggagaatttcgtactggaaaaacccagctttctcataccctctgtggtgaacatcagatggagctacttgattatgtagcagcaaagttccatgaagaagctggcatcttcaagctattgattatcgattcaataatggcactttttcgagtggatttcagtggccgtggggagttggccgaacggcagcaaaaattggcccagatgttgtcacgactccaaaaaatctcagaag

SEQ ID NO: 127562 - DNA, 569 bp, Homo sapiens
  Payload ID: 4963
  Gene Symbol: DMC1
  Gene Name: DNA meiotic recombinase 1
  ENST ID: ENST00000415483
  CDS Start-End: 154-569
ctcatctttccaagctaaatgcttctcttactgtccttctagtccttgttgactttgaaatgaaatcagaggcccctggacaaaggactacttcttacataatatttcttattttcccagaagtgattatttttctgttgcccacttttcaatatgaaggaggatcaagttgtggcggaagaaccaggattccaagatgaagaggaatctttgtttcaagatattgacctgttacagaaacatggaattaacgtggctgacattaagaaactgaaatcagtaggaatctgtaccatcaaaggtatacagatgacaacaagaagagctctatgcaatgtcaaaggactctcagaagccaaagtagacaagattaaagaggcagcgaacaaactaattgaaccaggattcttgactgcatttgagtatagtgaaaagaggaaaatggttttccatatcaccaccgggagccaggaatttgataagttactaggaggtggaattgaaagtatggcaattacagaagcttttggagaatttcgtactggaaaaacccagctttctcataccct

SEQ ID NO: 127563 - DNA, 2082 bp, Homo sapiens
  Payload ID: 4963
  Gene Symbol: DMC1
  Gene Name: DNA meiotic recombinase 1
  Uniprot ID: Q14565
  ENST ID: ENST00000428462
  CDS Start-End: 154-1011
ctcatctttccaagctaaatgcttctcttactgtccttctagtccttgttgactttgaaatgaaatcagaggcccctggacaaaggactacttcttacataatatttcttattttcccagaagtgattatttttctgttgcccacttttcaatatgaaggaggatcaagttgtggcggaagaaccaggattccaagatgaagaggaatctttgtttcaagatattgacctgttacagaaacatggaattaacgtggctgacattaagaaactgaaatcagtaggaatctgtaccatcaaaggtatacagatgacaacaagaagagctctatgcaatgtcaaaggactctcagaagccaaagtagacaagattaaagaggcagcgaacaaactaattgaaccaggattcttgactgcatttgagtatagtgaaaagaggaaaatggttttccatatcaccaccgggagccaggaatttgataagttactaggaggtggaattgaaagtatggcaattacagaagcttttggagaatttcgtactggaaaaacccagctttctcataccctctgtggtgaacatcagatggagctacttgattatgtagcagcaaagttccatgaagaagctggcatcttcaagctattgattatcgattcaataatggcactttttcgagtggatttcagtggccgtggggagttggccgaacggcagcaaaaattggcccagatgttgtcacgactccaaaaaatctcagaagaatataacgtggctgtttttgtgaccaatcaaatgactgccgatccaggagcaactatgacctttcaggcagatcccaaaaaacccattgggggacacattctggctcatgcttcaacaacaagaataagcttgcgaaagggaagaggagagctcagaattgccaagatttatgacagtcctgagatgcctgaaaatgaagccaccttcgcaataactgctggaggaattggggatgccaaggagtaggtggtgaattgatgcaaattgcttcttagtgcttattaggagctgaagaaatggaaaagcagtctccaatttcacatcttgaaatagaggttttttcccacatgttactaaagaaaagtcagcaaagagatttaaatcttatatttatcttaaaagtccctgatttatgataactatacattgtatgtaaattcagggatatgtatatgtatgtttgtgtgtgtgtgtgtttgtgtgtgtatacctgacatatatagtagatatatatacctattgaaattctctcactctgtgtatgtatatatacctatggaaaactagttgttgggaaaggagtacgtgattccctccctttcacttttcaaagtgagccactaaacagaaagtctaagagttcagaaatgtcccattctcctaaggactttcccttcaccatttttctagggtatagtgccactgacttacatagctagatgtttttccacaagaggatttaagggaggaatgtttataggacacacacacaaaagctctttctatttataatatcaaactgcatattcacctttatagcaacagaaaacagacattaaattaagccaaattttaaatcatttgactttgacaagcagaaattacttttaaaaaatgtatttatggctgggcgtggtggctcacacctgtaatcccagcactttgggaggccgaggcaggtggatcacttgaggtcaggagttcaagaccagcctggccaacatggagaaaccccatctctactaaaaatacaaaaattagccaagtgcagtggcatgtgcttgtaatcccagctactctggaggctgaggcaggagaattgcttgaacccaggaggcagagattgcggtgagccaagatggcaccactgcactccagcctaggtgacagagtgagactccgtctcaaaaaaaaaaaaaaaacttttttaaaatgttaaaattaatttaaatgtaaaatttctgaatactaatcttagaaatgtgtaaaagatattattttgattgttaaacaaataaaatcctgttttcaaaatgc

SEQ ID NO: 127564 - DNA, 1595 bp, Homo sapiens
  Payload ID: 4963
  Gene Symbol: DMC1
  Gene Name: DNA meiotic recombinase 1
  ENST ID: ENST00000616615
  CDS Start-End: 176-673
cgccaaaccctgtggtcaacggcgcgcgggtctccaggctccgtgttctaggcccgagttagaatcctgtcagctgaggaggtcgggcggggcagaggggcttcaccttgaaaatctcggggagactgtgggtacgagggggaagtgattatttttctgttgcccacttttcaatatgaaggaggatcaagttgtggcggaagaaccaggattccaagatgaagaggaatctttgtttcaagatattgacctgttacagaaacatggaattaacgtggctgacattaagaaactgaaatcagtaggaatctgtaccatcaaaggtatacagatgacaacaagaagagctctatgcaatgtcaaaggactctcagaagccaaagtagacaagattaaagaggcagcgaacaaactaattgaaccaggattcttgactgcatttgagtatagtgaaaagaggaaaatggttttccatatcaccaccgggagccaggaatttgataagttactaggaggtggaattgaaagtatggcaattacagaagcttttggagaatttcgtactggaaaaacccagctttctcataccctctgtgtgacagctcaacttccaggagctggtggctacccaggaggaaagattatcttcattgatacagaaaatactttgtaacctttttatttaaagttgctaacataatagtgtgatataggaatgttaccactgaagagtttgtctgagatatacaatctttgtagtcattccataaaccagtagtaatgagacaaaccaaagggaaaacaattactgtttaagttctccaatcactttgtatttaatgaggtttcacttcttcatatgggtttatgagacaaaacaaatacatgagaggaaattatatcatcatttttaatcctcttacttctctaaagatgttgcttaatagttagaaaaaagatttttttttttttgagacggaatctccctgttgcccaggctggagtccagtggggcaatctcggctcactgcaacctccatctcttgggttcaatcaattctcctgcctcagcctaccgagtagctgggattacaggtgtgtgccaccacacctggctaatttttttgtatttttagtagagacagggttttgacatgttgaccaggctgttctggaactcctgacctcaggtgatccacctgcctcagcctcccacagtgctaggattacaggcgtgagccacgatgcccggcctgcaatttggattttactaagaacaataggaatacttaggagctaagtcatatgcaagagagagtggagaagaacagctgggtgggggtgcagggcactgtggcaagggccacattggagtgttctcattctttccgtgtctcatacttatactgctgtctcttgatagttttctttttatatgtttatattttgcctccttaattatgttttaaatttacctagggcataggttgtcttaggactccttatatcctccataatgctttgccttggtaattgattaatatggtaattaattccatatggtaattggttaataaatatttataattgatctg

SEQ ID NO: 127565 - DNA, 1552 bp, Homo sapiens
  Payload ID: 4964
  Gene Symbol: DMAP1
  Gene Name: DNA methyltransferase 1 associated protein 1
  Uniprot ID: Q9NPF5
  ENST ID: ENST00000315913
  CDS Start-End: 86-1489
acgggggagtggtagtgggggctgcagctgccggacccaggcactgacccttgacctccggtggctcccccatctctcaggcgcgatggctacgggcgcggatgtacgggacattctagaactcgggggtccagaaggggatgcagcctctgggaccatcagcaagaaggacattatcaacccggacaagaaaaaatccaagaagtcctctgagacactgactttcaagaggcccgagggcatgcaccgggaagtctatgccttgctctactctgacaagaaggatgcacccccactgctacccagtgacactggccagggataccgtacagtgaaggccaagttgggctccaagaaggtgcggccttggaagtggatgccattcaccaacccggcccgcaaggacggagcaatgttcttccactggcgacgtgcagcggaggagggcaaggactacccctttgccaggttcaataagactgtgcaggtgcctgtgtactcggagcaggagtaccagctttatctccacgatgatgcttggactaaggcagaaactgaccacctctttgacctcagccgccgctttgacctgcgttttgttgttatccatgaccggtatgaccaccagcagttcaagaagcgttctgtggaagacctgaaggagcggtactaccacatctgtgctaagcttgccaacgtgcgggctgtgccaggcacagaccttaagataccagtatttgatgctgggcacgaacgacggcggaaggaacagcttgagcgtctctacaaccggaccccagagcaggtggcagaggaggagtacctgctacaggagctgcgcaagattgaggcccggaagaaggagcgggagaaacgcagccaggacctgcagaagctgatcacagcggcagacaccactgcagagcagcggcgcacggaacgcaaggcccccaaaaagaagctaccccagaaaaaggaggctgagaagccggctgttcctgagactgcaggcatcaagtttccagacttcaagtctgcaggtgtcacgctgcggagccaacggatgaagctgccaagctctgtgggacagaagaagatcaaggccctggaacagatgctgctggagcttggtgtggagctgagcccgacacctacggaggagctggtgcacatgttcaatgagctgcgaagcgacctggtgctgctctacgagctcaagcaggcctgtgccaactgcgagtatgagctgcagatgctgcggcaccgtcatgaggcactggcccgggctggtgtgctagggggccctgccacaccagcatcaggcccaggcccggcctctgctgagccggcagtgactgaacccggacttggtcctgaccccaaggacaccatcattgatgtggtgggcgcacccctcacgcccaattcgagaaagcgacgggagtcggcctccagctcatcttccgtgaagaaagccaagaagccgtgagaggccccacggggtgtgggcgacgctgttatgtaaatagagctgctgagttggaccaggctg

SEQ ID NO: 127566 - DNA, 1545 bp, Homo sapiens
  Payload ID: 4964
  Gene Symbol: DMAP1
  Gene Name: DNA methyltransferase 1 associated protein 1
  Uniprot ID: Q9NPF5
  ENST ID: ENST00000361745
  CDS Start-End: 79-1482
accgccggaagtttctgccgcggctttgcggggacgggggagtggtagtgggggctgcagctgccggacccaggcgcgatggctacgggcgcggatgtacgggacattctagaactcgggggtccagaaggggatgcagcctctgggaccatcagcaagaaggacattatcaacccggacaagaaaaaatccaagaagtcctctgagacactgactttcaagaggcccgagggcatgcaccgggaagtctatgccttgctctactctgacaagaaggatgcacccccactgctacccagtgacactggccagggataccgtacagtgaaggccaagttgggctccaagaaggtgcggccttggaagtggatgccattcaccaacccggcccgcaaggacggagcaatgttcttccactggcgacgtgcagcggaggagggcaaggactacccctttgccaggttcaataagactgtgcaggtgcctgtgtactcggagcaggagtaccagctttatctccacgatgatgcttggactaaggcagaaactgaccacctctttgacctcagccgccgctttgacctgcgttttgttgttatccatgaccggtatgaccaccagcagttcaagaagcgttctgtggaagacctgaaggagcggtactaccacatctgtgctaagcttgccaacgtgcgggctgtgccaggcacagaccttaagataccagtatttgatgctgggcacgaacgacggcggaaggaacagcttgagcgtctctacaaccggaccccagagcaggtggcagaggaggagtacctgctacaggagctgcgcaagattgaggcccggaagaaggagcgggagaaacgcagccaggacctgcagaagctgatcacagcggcagacaccactgcagagcagcggcgcacggaacgcaaggcccccaaaaagaagctaccccagaaaaaggaggctgagaagccggctgttcctgagactgcaggcatcaagtttccagacttcaagtctgcaggtgtcacgctgcggagccaacggatgaagctgccaagctctgtgggacagaagaagatcaaggccctggaacagatgctgctggagcttggtgtggagctgagcccgacacctacggaggagctggtgcacatgttcaatgagctgcgaagcgacctggtgctgctctacgagctcaagcaggcctgtgccaactgcgagtatgagctgcagatgctgcggcaccgtcatgaggcactggcccgggctggtgtgctagggggccctgccacaccagcatcaggcccaggcccggcctctgctgagccggcagtgactgaacccggacttggtcctgaccccaaggacaccatcattgatgtggtgggcgcacccctcacgcccaattcgagaaagcgacgggagtcggcctccagctcatcttccgtgaagaaagccaagaagccgtgagaggccccacggggtgtgggcgacgctgttatgtaaatagagctgctgagttggaccaggctg

SEQ ID NO: 127567 - DNA, 1730 bp, Homo sapiens
  Payload ID: 4964
  Gene Symbol: DMAP1
  Gene Name: DNA methyltransferase 1 associated protein 1
  Uniprot ID: Q9NPF5
  ENST ID: ENST00000372289
  CDS Start-End: 264-1667
ggggagtggtagtgggggctgcagctgccggacccaggtgcggaagtgcgagggcccaggtggctgaaggggccgttaggaacatccaagcggtggggcacaggcagatccccgacctgacctggaccacccttctcctcttggcccgccccttcaactcgcctccgcttaggtctggattggccccgccccctgacctgagcctggtccttcttcaggcactgacccttgacctccggtggctcccccatctctcaggcgcgatggctacgggcgcggatgtacgggacattctagaactcgggggtccagaaggggatgcagcctctgggaccatcagcaagaaggacattatcaacccggacaagaaaaaatccaagaagtcctctgagacactgactttcaagaggcccgagggcatgcaccgggaagtctatgccttgctctactctgacaagaaggatgcacccccactgctacccagtgacactggccagggataccgtacagtgaaggccaagttgggctccaagaaggtgcggccttggaagtggatgccattcaccaacccggcccgcaaggacggagcaatgttcttccactggcgacgtgcagcggaggagggcaaggactacccctttgccaggttcaataagactgtgcaggtgcctgtgtactcggagcaggagtaccagctttatctccacgatgatgcttggactaaggcagaaactgaccacctctttgacctcagccgccgctttgacctgcgttttgttgttatccatgaccggtatgaccaccagcagttcaagaagcgttctgtggaagacctgaaggagcggtactaccacatctgtgctaagcttgccaacgtgcgggctgtgccaggcacagaccttaagataccagtatttgatgctgggcacgaacgacggcggaaggaacagcttgagcgtctctacaaccggaccccagagcaggtggcagaggaggagtacctgctacaggagctgcgcaagattgaggcccggaagaaggagcgggagaaacgcagccaggacctgcagaagctgatcacagcggcagacaccactgcagagcagcggcgcacggaacgcaaggcccccaaaaagaagctaccccagaaaaaggaggctgagaagccggctgttcctgagactgcaggcatcaagtttccagacttcaagtctgcaggtgtcacgctgcggagccaacggatgaagctgccaagctctgtgggacagaagaagatcaaggccctggaacagatgctgctggagcttggtgtggagctgagcccgacacctacggaggagctggtgcacatgttcaatgagctgcgaagcgacctggtgctgctctacgagctcaagcaggcctgtgccaactgcgagtatgagctgcagatgctgcggcaccgtcatgaggcactggcccgggctggtgtgctagggggccctgccacaccagcatcaggcccaggcccggcctctgctgagccggcagtgactgaacccggacttggtcctgaccccaaggacaccatcattgatgtggtgggcgcacccctcacgcccaattcgagaaagcgacgggagtcggcctccagctcatcttccgtgaagaaagccaagaagccgtgagaggccccacggggtgtgggcgacgctgttatgtaaatagagctgctgagttggaccaggctg

SEQ ID NO: 127568 - DNA, 396 bp, Homo sapiens
  Payload ID: 4964
  Gene Symbol: DMAP1
  Gene Name: DNA methyltransferase 1 associated protein 1
  ENST ID: ENST00000372290
  CDS Start-End: 1-396
attatcaacccggacaagaaaaaatccaagaagtcctctgagacactgactttcaagaggcccgagggcatgcaccgggaagtctatgccttgctctactctgacaagaaggatgcacccccactgctacccagtgacactggccagggataccgtacagtgaaggccaagttgggctccaagaaggtgcggccttggaagtggatgccattcaccaacccggcccgcaaggacggagcaatgttcttccactggcgacgtgcagcggaggagggcaaggactacccctttgccaggttcaataaggagtaccagctttatctccacgatgatgcttggactaaggcagaaactgaccacctctttgacctcagccgccgctttgacctgcgtttt

SEQ ID NO: 127569 - DNA, 599 bp, Homo sapiens
  Payload ID: 4964
  Gene Symbol: DMAP1
  Gene Name: DNA methyltransferase 1 associated protein 1
  ENST ID: ENST00000436069
  CDS Start-End: 147-599
cgcggctttgcggggacgggggagtggtagtgggggctgcagctgccggacccaggtctggattggccccgccccctgacctgagcctggtccttcttcaggcactgacccttgacctccggtggctcccccatctctcaggcgcgatggctacgggcgcggatgtacgggacattctagaactcgggggtccagaaggggatgcagcctctgggaccatcagcaagaaggacattatcaacccggacaagaaaaaatccaagaagtcctctgagacactgactttcaagaggcccgagggcatgcaccgggaagtctatgccttgctctactctgacaagaacaagggctcctgcttgcttagcaggatgcaggaggacctgaagtcttttgctccaggacatgactttcttgctataggggatgcacccccactgctacccagtgacactggccagggataccgtacagtgaaggccaagttgggctccaagaaggtgcggccttggaagtggatgccattcaccaacccggcccgcaaggacggagcaatgttcttccactggcgacgtgcagcggaggagggcaaggactacccc

SEQ ID NO: 127570 - DNA, 909 bp, Homo sapiens
  Payload ID: 4964
  Gene Symbol: DMAP1
  Gene Name: DNA methyltransferase 1 associated protein 1
  ENST ID: ENST00000440641
  CDS Start-End: 198-909
gccgcggctttgcggggacgggggagtggtagtgggggctgcagctgccggacccaggtgcggaagtgcgagggcccaggtggctgaaggggccgttaggaacatccaagcggtggggcacaggcagatccccgacctgacctggaccacccttctcctcttggcccgccccttcaactcgcctccgcttaggcgcgatggctacgggcgcggatgtacgggacattctagaactcgggggtccagaaggggatgcagcctctgggaccatcagcaagaaggacattatcaacccggacaagaaaaaatccaagaagtcctctgagacactgactttcaagaggcccgagggcatgcaccgggaagtctatgccttgctctactctgacaagaaggatgcacccccactgctacccagtgacactggccagggataccgtacagtgaaggccaagttgggctccaagaaggtgcggccttggaagtggatgccattcaccaacccggcccgcaaggacggagcaatgttcttccactggcgacgtgcagcggaggagggcaaggactacccctttgccaggttcaataagactgtgcaggtgcctgtgtactcggagcaggagtaccagctttatctccacgatgatgcttggactaaggcagaaactgaccacctctttgacctcagccgccgctttgacctgcgttttgttgttatccatgaccggtatgaccaccagcagttcaagaagcgttctgtggaagacctgaaggagcggtactaccacatctgtgctaagcttgccaacgtgcgggctgtgccaggcacagaccttaagataccagtatttgatgctgggcacgaacgacggcggaaggaacagcttgagcgtctctacaaccggaccc

SEQ ID NO: 127571 - DNA, 957 bp, Homo sapiens
  Payload ID: 4964
  Gene Symbol: DMAP1
  Gene Name: DNA methyltransferase 1 associated protein 1
  ENST ID: ENST00000437511
  CDS Start-End: 101-957
cgcggctttgcggggacgggggagtggtagtgggggctgcagctgccggacccaggcactgacccttgacctccggtggctcccccatctctcaggcgcgatggctacgggcgcggatgtacgggacattctagaactcgggggtccagaaggggatgcagcctctgggaccatcagcaagaaggacattatcaacccggacaagaaaaaatccaagaagtcctctgagacactgactttcaagaggcccgagggcatgcaccgggaagtctatgccttgctctactctgacaagaacaagggctcctgcttgcttagcaggatgcaggaggacctgaagtcttttgctccaggacatgactttcttgctataggggatgcacccccactgctacccagtgacactggccagggataccgtacagtgaaggccaagttgggctccaagaaggtgcggccttggaagtggatgccattcaccaacccggcccgcaaggacggagcaatgttcttccactggcgacgtgcagcggaggagggcaaggactacccctttgccaggttcaataagactgtgcaggtgcctgtgtactcggagcaggagtaccagctttatctccacgatgatgcttggactaaggcagaaactgaccacctctttgacctcagccgccgctttgacctgcgttttgttgttatccatgaccggtatgaccaccagcagttcaagaagcgttctgtggaagacctgaaggagcggtactaccacatctgtgctaagcttgccaacgtgcgggctgtgccaggcacagaccttaagataccagtatttgatgctgggcacgaacgacggcggaaggaacagcttgagcgtctctacaaccggaccccagagcaggtggcagaggaggagtacctgctacaggagctgcgcaagattgaggcccggaagaagga

SEQ ID NO: 127572 - DNA, 1066 bp, Homo sapiens
  Payload ID: 4964
  Gene Symbol: DMAP1
  Gene Name: DNA methyltransferase 1 associated protein 1
  ENST ID: ENST00000446292
  CDS Start-End: 161-1066
ccggaagtttctgccgcggctttgcggggacgggggagtggtagtgggggctgcagctgccggacccaggtctggattggccccgccccctgacctgagcctggtccttcttcaggcactgacccttgacctccggtggctcccccatctctcaggcgcgatggctacgggcgcggatgtacgggacattctagaactcgggggtccagaaggggatgcagcctctgggaccatcagcaagaaggacattatcaacccggacaagaaaaaatccaagaagtcctctgagacactgactttcaagaggcccgagggcatgcaccgggaagtctatgccttgctctactctgacaagaaggatgcacccccactgctacccagtgacactggccagggataccgtacagtgaaggccaagttgggctccaagaaggtgcggccttggaagtggatgccattcaccaacccggcccgcaaggacggagcaatgttcttccactggcgacgtgcagcggaggagggcaaggactacccctttgccaggttcaataagactgtgcaggtgcctgtgtactcggagcaggagtaccagctttatctccacgatgatgcttggactaaggcagaaactgaccacctctttgacctcagccgccgctttgacctgcgttttgttgttatccatgaccggtatgaccaccagcagttcaagaagcgttctgtggaagacctgaaggagcggtactaccacatctgtgctaagcttgccaacgtgcgggctgtgccaggcacagaccttaagataccagtatttgatgctgggcacgaacgacggcggaaggaacagcttgagcgtctctacaaccggaccccagagcaggtggcagaggaggagtacctgctacaggagctgcgcaagattgaggcccggaagaaggagcgggagaaacgcagccaggacctgcagaagctgatcacagcggcagacaccactgcagagcagcggcgcacggaacgcaaggcccccaaaaagaagctaccccagaaaaaggaggctgagaagccg

SEQ ID NO: 127573 - DNA, 1972 bp, Homo sapiens
  Payload ID: 4965
  Gene Symbol: DNTT
  Gene Name: DNA nucleotidylexotransferase
  Uniprot ID: P04053
  ENST ID: ENST00000371174
  CDS Start-End: 103-1632
gtgagatgacatcaaaacccttcgtgtaggagggtggcagtctccctcccttctggagacaccaccagatgggccagccagaggcagcagcagcctcttcccatggatccaccacgagcgtcccacttgagccctcggaagaagagaccccggcagacgggtgccttgatggcctcctctcctcaagacatcaaatttcaagatttggtcgtcttcattttggagaagaaaatgggaaccacccgcagagcgttcctcatggagctggcccgcaggaaagggttcagggttgaaaatgagctcagtgattctgtcacccacatcgtagcagagaacaactcgggttcggatgttctggagtggcttcaagcacagaaagtacaagtcagctcacaaccagagctcctcgatgtctcctggctgatcgaatgcataagagcagggaaaccggtggaaatgacaggaaaacaccagcttgttgtgagaagagactattcagatagcaccaacccaggccccccgaagactccaccaattgctgtacaaaagatctcccagtatgcgtgtcagagaagaaccactttaaacaactgtaaccagatattcacggatgcctttgatatactggctgaaaactgtgagtttagagaaaatgaagactcctgtgtgacatttatgagagcagcttctgtattgaaatctctgccattcacaatcatcagtatgaaggacacagaaggaattccctgcctggggtccaaggtgaagggtatcatagaggagattattgaagatggagaaagttctgaagttaaagctgtgttaaatgatgaacgatatcaatccttcaaactctttacttctgtatttggagtggggctgaagacttctgagaagtggttcaggatgggtttcagaactctgagtaaagtaaggtcggacaaaagcctgaaatttacacgaatgcagaaagcaggatttctgtattatgaagaccttgtcagctgtgtgaccagggcagaagcagaggccgtcagtgtgctggttaaagaggctgtctgggcatttcttccggatgctttcgtcaccatgacaggagggttccggaggggtaagaagatggggcatgatgtagattttttaattaccagcccaggatcaacagaggatgaagagcaacttttacagaaagtgatgaacttatgggaaaagaagggattacttttatattatgaccttgtggagtcaacatttgaaaagctcaggttgcctagcaggaaggttgatgctttggatcattttcaaaagtgctttctgattttcaaattgcctcgtcaaagagtggacagtgaccagtccagctggcaggaaggaaagacctggaaggccatccgtgtggatttagttctgtgcccctacgagcgtcgtgcctttgccctgttgggatggactggctcccggcagtttgagagagacctccggcgctatgccacacatgagcggaagatgattctggataaccatgctttatatgacaagaccaagaggatattcctcaaagcagaaagtgaagaagaaatttttgcgcatctgggattggattatattgaaccgtgggaaagaaatgcctaggaaagtgttgtcaacatttttttcctattcttttcaagttaaataaattatgcttcatattagtaaaagatgccataggagagtttggggttatttaggtcttattgaaatgcagattgctactagaaataaataactttggaaacatgggaaggtgccactggtaatgggtaaggttctaataggccatgtttatgactgttgcatagaattcacaatgcatttttcaagagaaatgatgttgtcactggtggctcattcagggaagctcatcaaagcccactttgttcgcagtgtagctgaaatactgtctatctctaataaaaacaggaggaaacaa

SEQ ID NO: 127574 - DNA, 1954 bp, Homo sapiens
  Payload ID: 4965
  Gene Symbol: DNTT
  Gene Name: DNA nucleotidylexotransferase
  Uniprot ID: P04053
  ENST ID: ENST00000630152
  CDS Start-End: 90-1616
aaaacccttcgtgtaggagggtggcagtctccctcccttctggagacaccaccagatgggccagccagaggcagcagcagcctcttcccatggatccaccacgagcgtcccacttgagccctcggaagaagagaccccggcagacgggtgccttgatggcctcctctcctcaagacatcaaatttcaagatttggtcgtcttcattttggagaagaaaatgggaaccacccgcagagcgttcctcatggagctggcccgcaggaaagggttcagggttgaaaatgagctcagtgattctgtcacccacatcgtagcagagaacaactcgggttcggatgttctggagtggcttcaagcacagaaagtacaagtcagctcacaaccagagctcctcgatgtctcctggctgatcgaatgcataagagcagggaaaccggtggaaatgacaggaaaacaccagcttgttgtgagaagagactattcagatagcaccaacccaggccccccgaagactccaccaattgctgtacaaaagatctcccagtatgcgtgtcagagaagaaccactttaaacaactgtaaccagatattcacggatgcctttgatatactggctgaaaactgtgagtttagagaaaatgaagactcctgtgtgacatttatgagagcagcttctgtattgaaatctctgccattcacaatcatcagtatgaaggacacagaaggaattccctgcctggggtccaaggtgaagggtatcatagaggagattattgaagatggagaaagttctgaagttaaagctgtgttaaatgatgaacgatatcaatccttcaaactctttacttctgtatttggagtggggctgaagacttctgagaagtggttcaggatgggtttcagaactctgagtaaagtaaggtcggacaaaagcctgaaatttacacgaatgcagaaagcaggatttctgtattatgaagaccttgtcagctgtgtgaccagggcagaagcagaggccgtcagtgtgctggttaaagaggctgtctgggcatttcttccggatgctttcgtcaccatgacaggagggttccggaggggtaagaagatggggcatgatgtagattttttaattaccagcccaggatcaacagaggatgaagagcaacttttacagaaagtgatgaacttatgggaaaagaagggattacttttatattatgaccttgtggagtcaacatttgaaaagctcaggttgcctagcaggaaggttgatgctttggatcattttcaaaagtgctttctgattttcaaattgcctcgtcaaagagtggacagtgaccagtccagctggcaggaaggaaagacctggaaggccatccgtgtggatttagttctgtgcccctacgagcgtcgtgcctttgccctgttgggatggactggctcccggtttgagagagacctccggcgctatgccacacatgagcggaagatgattctggataaccatgctttatatgacaagaccaagaggatattcctcaaagcagaaagtgaagaagaaatttttgcgcatctgggattggattatattgaaccgtgggaaagaaatgcctaggaaagtgttgtcaacatttttttcctattcttttcaagttaaataaattatgcttcatattagtaaaagatgccataggagagtttggggttatttaggtcttattgaaatgcagattgctactagaaataaataactttggaaacatgggaaggtgccactggtaatgggtaaggttctaataggccatgtttatgactgttgcatagaattcacaatgcatttttcaagagaaatgatgttgtcactggtggctcattcagggaagctcatcaaagcccactttgttcgcagtgtagctgaaatactgtctatctctaataaaaacaggaggaaac

SEQ ID NO: 127575 - DNA, 2314 bp, Homo sapiens
  Payload ID: 4966
  Gene Symbol: DSCC1
  Gene Name: DNA replication and sister chromatid cohesion 1
  Uniprot ID: Q9BVC3
  ENST ID: ENST00000313655
  CDS Start-End: 216-1397
gcgtggggcacggaggggctcgcgctcccagaagccggcaggccttcccgcgggcgggcccgcagcgcgctccgccccggaaacacgcccatggccgccttggcgcgctttcaaacgctcaggtttcctaccttccggctgcttgggaacttctttcttgcccgccaagcccgcagccacccgggcgcggcgggactcctagacccggcgctgcgatgaagaggacccgcgacgaggtggatgcgacgctgcagatcgccaagctgaatgcggccgagctgctgccggcggtgcactgcctgggcttcggccctggggccagcggcgctgcagccggcgacttctgcctgctggagctggagcccacgctgtgccagcagctggaggatggacacagtcttgtgattcgtggtgataaagacgagcaagctgtgctgtgcagtaaagacaaaacatacgacttgaagatagcagacacttccaatatgttgcttttcattcctggttgtaaaactccggaccagttgaagaaggaagattcacactgtaacattattcacactgagatctttggtttttctaataattattgggaattaagaagacgtagacccaagttaaagaagctaaagaaacttttgatggaaaatccatatgaaggacctgacagtcaaaaagagaaggattcaaatagctcaaaatatacaactgaagatttgcttgatcaaattcaggcaagtgaggaagaaataatgacccaattacaagttctaaatgcctgtaagattggaggttattggaggattcttgaatttgattatgagatgaaacttctgaatcatgtaactcagcttgtggattctgaatcatggtcttttggtaaagttcctttgaacacatgccttcaggaactcggaccattggagccagaggaaatgatagaacactgtcttaaatgttatgggaagaaatatgtagatgaaggcgaagtttattttgagttggatgctgataaaatatgtagagcagcagcacgaatgctacttcagaatgcggtgaaattcaatctcgctgagtttcaagaagtgtggcagcagagtgttcctgaaggaatggtaactagtcttgatcagcttaagggtttagcgctggtggatagacactcgagaccagaaatcatatttttgctgaaagtagatgatttacctgaggataatcaggaacgttttaatagccttttctctctaagggagaagtggacagaagaagatattgctccatatattcaagatttgtgtggagagaagcaaaccataggtgcattactcactaaatattctcattcttcgatgcaaaatggtgttaaagtttataattcgagaagacccatttcttaaaagaacaacggtcttttcttcaggactcaagttgctttataaagttgctggatagaagaaaaataacttgtacttttatttctgacttttagaaacctagtcttctaaggcatttttctcctcatcttaagcattttgaaactactgttatttcttaaatgttataggatgtagctttaaaattatatttgtactatgtacacagtgtaaacaaggacaaaagaattctttcctatattatgtctgaggtctctatgatttatttaaagtttggctttttatatttaaaatgtcatttctttacttaggatttgatgttctaatcattaatacacttaagttttccagagaactaaatagtaatagtttcatagaagagaactatttattcacttaaatatcatttctcaagtgagtgagttcccctctacttttagccttccacccaaactggaagcctctaggtgctatcaattatttatatccatcgtttacatccatgaaattggctgaataattactcctctgcctggcgtagacatgcgctttgggaaaaaaacgagtttataatcctataatgaagaatactggcacaggcaatgctcactcgaaaacttcaagtaatttctagttggttttggaatgcttgataaagttcctttacagctttattttcctgatttgttttggtttagatcaaagttcaaattaattttaacttagctaatgaactcatcaccaggacagttggagggggtaggccgaggttaaatggtccacgtttcaaaaatgttaatggctaatccataattaaagaaggtttaactgttactgaagtttacaagttttattgtcatgaacatgaaatacaaacacgatggcttcgaaatgtctttcaataaatgtttctgcattta

SEQ ID NO: 127576 - DNA, 4208 bp, Homo sapiens
  Payload ID: 4967
  Gene Symbol: DNA2
  Gene Name: DNA replication helicase/nuclease 2
  Uniprot ID: P51530
  ENST ID: ENST00000358410
  CDS Start-End: 52-3234
ccccggttccgctgtcttttctgtctacagtttgcgatccccgcgtccaggatggagcagctgaacgaactggagctgctgatggagaagagtttttgggaggaggcggagctgccggcggagctatttcagaagaaagtggtagcttcctttccaagaacagttctgagcacaggaatggataaccggtacctggtgttggcagtcaatactgtacagaacaaagagggaaactgtgaaaagcgcctggtcatcactgcttcacagtcactagaaaataaagaactatgcatccttaggaatgactggtgttctgttccagtagagccaggagatatcattcatttggagggagactgcacatctgacacttggataatagataaagattttggatatttgattctgtatccagacatgctgatttctggcaccagcatagccagtagtattcgatgtatgagaagagctgtcctgagtgaaacttttaggagctctgatccagccacacgccaaatgctaattggtacggttctccatgaggtgtttcaaaaagccataaataatagctttgccccagaaaagctacaagaacttgcttttcaaacaattcaagaaataagacatttgaaggaaatgtaccgcttaaatctaagtcaagatgaaataaaacaagaagtagaggactatcttccttcgttttgtaaatgggcaggagatttcatgcataaaaacacttcgactgacttccctcagatgcagctctctctgccaagtgataatagtaaggataattcaacatgtaacattgaagtcgtgaaaccaatggatattgaagaaagcatttggtcccctaggtttggattgaaaggcaaaatagatgttacagttggtgtgaaaatacatcgagggtataaaacaaaatacaagataatgccgctggaacttaaaactggcaaagaatcaaattctattgaacaccgtagtcaggttgttctgtacactctactaagccaagagagaagagctgatccagaggctggcttgcttctctacctcaagactggtcagatgtaccctgtgcctgccaaccatctagataaaagagaattattaaagctaagaaaccagatggcattctcattgtttcaccgtattagcaaatctgctactagacagaagacacagcttgcttctttgccacaaataattgaggaagagaaaacttgtaaatattgttcacaaattggcaattgtgctctttatagcagagcagttgaacaacagatggattgtagttcagtcccaattgtgatgctgcccaaaatagaagaagaaacccagcatctgaagcaaacacacttagaatatttcagcctttggtgtctaatgttaaccctggagtcacaatcgaaggataataaaaagaatcaccaaaatatctggctaatgcctgcttcggaaatggagaagagtggcagttgcattggaaacctgattagaatggaacatgtaaagatagtttgtgatgggcaatatttacataatttccaatgtaaacatggtgccatacctgtcacaaatctaatggcaggtgacagagttattgtaagtggagaagaaaggtcactgtttgctttgtctagaggatatgtgaaggagattaacatgacaacagtaacttgtttattagacagaaacttgtcggtccttccagaatcaactttgttcagattagaccaagaagaaaaaaattgtgatatagataccccattaggaaatctttccaaattgatggaaaacacgtttgtcagcaaaaaacttcgagatttaattattgactttcgtgaacctcagtttatatcctaccttagttctgttcttccacatgatgcaaaggatacagttgcctgcattctaaagggtttgaataagcctcagaggcaagcgatgaaaaaggtacttctttcaaaagactacacactcatcgtgggtatgcctgggacaggaaaaacaactacgatatgtactctcgtaagaattctctacgcctgtggttttagcgttttgttgaccagctatacacactctgctgttgacaatattcttttgaagttagccaagtttaaaataggatttttgcgtttgggtcagattcagaaggttcatccagctatccagcaatttacagagcaagaaatttgcagatcaaagtccattaaatccttagctcttctagaagaactctacaatagtcaacttatagttgcaacaacatgtatgggaataaaccatccaatattttcccgtaaaatttttgatttttgtattgtggatgaagcctctcaaattagccaaccaatttgtctgggccccctttttttttcacggagatttgtgttagtgggggaccatcagcagcttcctcccctggtgctaaaccgtgaagcaagagctcttggcatgagtgaaagcttattcaagaggctggagcagaataagagtgctgttgtacagttaaccgtgcagtacagaatgaacagtaaaattatgtccttaagtaataagctgacctatgagggcaagctggagtgtggatcagacaaagtggccaatgcagtgataaacctacgtcactttaaagatgtgaagctggaactggaattttatgctgactattctgataatccttggttgatgggagtatttgaacccaacaatcctgtttgtttccttaatacagacaaggttccagcgccagaacaagttgaaaaaggtggtgtgagcaatgtaacagaagccaaactcatagttttcctaacctccatttttgttaaggctggatgcagtccctctgatattggtattattgcaccgtacaggcagcaattaaagatcatcaatgatttattggcacgttctattgggatggtcgaagttaatacagtagacaaataccaaggaagggacaaaagtattgtcctagtatcttttgttagaagtaataaggatggaactgttggtgaactcttgaaagattggcgacgtcttaatgttgctataaccagagccaaacataaactgattcttctggggtgtgtgccctcactaaattgctatcctcctttggagaagctgcttaatcatttaaactcagaaaaattaatcattgatcttccatcaagagaacatgaaagtctttgccacatattgggtgactttcaaagagaataaaacactatttcccttgccttttcatactagggcagtatctcctctagctagtgcccatacagaaaattctatcaccatacaaaatttaatgcagtatttatgttttaaagcacaggtgtaccgaaaactgtgaaaagtctgaatttatgggttctatgcatgcatttttgcctaacctagagaaagagtttgataaatttttaccagctttgaagatggattaacttttgactttgagctttaaacttttaagtcagacatttcaggactaatttgattttgtagatatcattgtaagaactttatttgaaagactgaataaagggatttgatttgttttcatcatttaagcacagtcttgtgatgatgagaacataagtgtgattcttttctgtattttgaggtccctaatccaaagcccattttgctaggattttttctgctatcagatgtgttttcactctaaacctagtcttttatgacatgaattgattacttcctgttaattttctatcctcccttactatcctccttttttgttttcagtattcagtatttcagtattctagagtagattttgatataaaagaaaataattcttacatcatcttttgcaacaaattttgttttctgaattgataataaatttaaaaagttgattcctattttcacatatgttcatatgcccctatgtttgggggtatcactcagttttcccttttttgtgtaaagatgttttgtaaaacaaaattgtctcaaagtgattatattatatatataaaaagtaacagattttaacaaaggttaaaagattcttggggtaacagattcttctggggcttggaaatcttccatttctcttgagggttttttttaatgagtgttaaatatgttaaaatttttatttctacctcatgtgtttttttaaattattacttgaagttttttatttaataaattttttctactaatgg

SEQ ID NO: 127577 - DNA, 3207 bp, Homo sapiens
  Payload ID: 4967
  Gene Symbol: DNA2
  Gene Name: DNA replication helicase/nuclease 2
  Uniprot ID: P51530
  ENST ID: ENST00000399179
  CDS Start-End: 90-2153
tgaagactccctgtattcccagtcctaagcaagggagcaaaggcaggggacagagccctgctgctcagtttgcgatccccgcgtccaggatggagcagctgaacgaactggagctgctgatggagaagagtttttgggaggaggcggagctgccggcggagctatttcagaagaaagtggtagcttcctttccaagaacagttctgagcacaggaatggataaccggtacctggtgttggcagtcaatactgtacagaacaaagagggaaactgtgaaaagcgcctggtcatcactgcttcacagtcactagaaaataaagaactatgcatccttaggaatgactggtgttctgttccagtagagccaggagatatcattcatttggagggagactgcacatctgacacttggataatagataaagattttggatatttgattctgtatccagacatgctgatttctggcaccagcatagccagtagtattcgatgtatgagaagagctgtcctgagtgaaacttttaggagctctgatccagccacacgccaaatgctaattggtacggttctccatgaggtgtttcaaaaagccataaataatagctttgccccagaaaagctacaagaacttgcttttcaaacaattcaagaaataagacatttgaaggaaatgtaccgcttaaatctaagtcaagatgaaataaaacaagaagtagaggactatcttccttcgttttgtaaatgggcaggagatttcatgcataaaaacacttcgactgacttccctcagatgcagctctctctgccaagtgataatagtaaggataattcaacatgtaacattgaagtcgtgaaaccaatggatattgaagaaagcatttggtcccctaggtttggattgaaaggcaaaatagatgttacagttggtgtgaaaatacatcgagggtataaaacaaaatacaagataatgccgctggaacttaaaactggcaaagaatcaaattctattgaacaccgtagtcaggttgttctgtacactctactaagccaagagagaagagctgatccagaggctggcttgcttctctacctcaagactggtcagatgtaccctgtgcctgccaaccatctagataaaagagaattattaaagctaagaaaccagatggcattctcattgtttcaccgtattagcaaatctgctactagacagaagacacagcttgcttctttgccacaaataattgaggaagagaaaacttgtaaatattgttcacaaattggcaattgtgctctttatagcagagcagttgaacaacagatggattgtagttcagtcccaattgtgatgctgcccaaaatagaagaagaaacccagcatctgaagcaaacacacttagaatatttcagcctttggtgtctaatgttaaccctggagtcacaatcgaaggataataaaaagaatcaccaaaatatctggctaatgcctgcttcggaaatggagaagagtggcagttgcattggaaacctgattagaatggaacatgtaaagatagtttgtgatgggcaatatttacataatttccaatgtaaacatggtgccatacctgtcacaaatctaatggcaggtgacagagttattgtaagtggagaagaaaggtcactgtttgctttgtctagaggatatgtgaaggagattaacatgacaacagtaacttgtttattagacagaaacttgtcggtccttccagaatcaactttgttcagattagaccaagaagaaaaaaattgtgatatagataccccattaggaaatctttccaaattgatggaaaacacgtttgtcagcaaaaaacttcgagatttaattattgactttcgtgaacctcagtttatatcctaccttagttctgttcttccacatgatgcaaaggatacagttgcctgcattctaaagggtttgaataagcctcagaggcaagcgatgaaaaaggtacttctttcaaaagactacacactcatcgtgggtatgcctgggacaggaaaaacaactacgatatgtactctcgtaagattcagaaggttcatccagctatccagcaatttacagagcaagaaatttgcagatcaaagtccattaaatccttagctcttctagaagaactctacaatagtcaacttatagttgcaacaacatgtatgggaataaaccatccaatattttcccgtaaaatttttgatttttgtattgtggatgaagcctctcaaattagccaaccaatttgtctgggccccctttttttttcacggagatttgtgttagtgggggaccatcagcagcttcctcccctggtgctaaaccgtgaagcaagagctcttggcatgagtgaaagcttattcaagaggctggagcagaataagagtgctgttgtacagttaaccgtgcagtacagaatgaacagtaaaattatgtccttaagtaataagctgacctatgagggcaagctggagtgtggatcagacaaagtggccaatgcagtgataaacctacgtcactttaaagatgtgaagctggaactggaattttatgctgactattctgataatccttggttgatgggagtatttgaacccaacaatcctgtttgtttccttaatacagacaaggttccagcgccagaacaagttgaaaaaggtggtgtgagcaatgtaacagaagccaaactcatagttttcctaacctccatttttgttaaggctggatgcagtccctctgatattggtattattgcaccgtacaggcagcaattaaagatcatcaatgatttattggcacgttctattgggatggtcgaagttaatacagtagacaaataccaaggaagggacaaaagtattgtcctagtatcttttgttagaagtaataaggatggaactgttggtgaactcttgaaagattggcgacgtcttaatgttgctataaccagagccaaacataaactgattcttctggggtgtgtgccctcactaaattgctatcctcctttggagaagctgcttaatcatttaaactcagaaaaattaatcattgatcttccatcaagagaacatgaaagtctttgccacatattgggtgactttcaaagagaataaaacactatttcccttgccttttcatactagggcagtatctcctctagcta

SEQ ID NO: 127578 - DNA, 3207 bp, Homo sapiens; identical to SEQ ID NO: 127577
  Payload ID: 4967
  Gene Symbol: DNA2
  Gene Name: DNA replication helicase/nuclease 2
  Uniprot ID: P51530
  ENST ID: ENST00000399180
  CDS Start-End: 90-2153

SEQ ID NO: 127579 - DNA, 1172 bp, Homo sapiens
  Payload ID: 4967
  Gene Symbol: DNA2
  Gene Name: DNA replication helicase/nuclease 2
  ENST ID: ENST00000440722
  CDS Start-End: 1-1126
ctctgctgttgacaatattcttttgaagttagccaagtttaaaataggatttttgcgtttgggtcagattcagaaggttcatccagctatccagcaatttacagagcaagaaatttgcagatcaaagtccattaaatccttagctcttctagaagaactctacaatagtcaacttatagttgcaacaacatgtatgggaataaaccatccaatattttcccgtaaaatttttgatttttgtattgtggatgaagcctctcaaattagccaaccaatttgtctgggccccctttttttttcacggagatttgtgttagtgggggaccatcagcagcttcctcccctggtgctaaaccgtgaagcaagagctcttggcatgagtgaaagcttattcaagaggctggagcagaataagagtgctgttgtacagttaaccgtgcagtacagaatgaacagtaaaattatgtccttaagtaataagctgacctatgagggcaagctggagtgtggatcagacaaagtggccaatgcagtgataaacctacgtcactttaaagatgtgaagctggaactggaattttatgctgactattctgataatccttggttgatgggagtatttgaacccaacaatcctgtttgtttccttaatacagacaaggttccagcgccagaacaagttgaaaaaggtggtgtgagcaatgtaacagaagccaaactcatagttttcctaacctccatttttgttaaggctggatgcagtccctctgatattggtattattgcaccgtacaggcagcaattaaagatcatcaatgatttattggcacgttctattgggatggtcgaagttaatacagtagacaaataccaaggaagggacaaaagtattgtcctagtatcttttgttagaagtaataaggatggaactgttggtgaactcttgaaagattggcgacgtcttaatgttgctataaccagagccaaacataaactgattcttctggggtgtgtgccctcactaaattgctatcctcctttggagaagctgcttaatcatttaaactcagaaaaattaatatcctttttcttctgtatatggtcacatttgattgcactgttgtgagtatttatttgcttgtttaaattaaagctctcactatgttgcttaa

SEQ ID NO: 127580 - DNA, 543 bp, Homo sapiens
  Payload ID: 4967
  Gene Symbol: DNA2
  Gene Name: DNA replication helicase/nuclease 2
  ENST ID: ENST00000550357
  CDS Start-End: 23-142
gtttgcgatccccgcgtccaggatggagcagctgaacgaactggagctgctgatggagaagagtttttgggaggaggcggagctgccggcggagctaaccggggtctttttctgtcgctcaggaaggggtgcagtagcatgatcgtatctcactgcagcctcaaactcctgggctcaagcagtccttccacctcagcctcttgagtagctgggactacagatttcagaagaaagtggtagcttcctttccaagaacagttctgagcacaggaatggataaccggtacctggtgttggcagtcaatactgtacagaacaaagagggaaactgtgaaaagcgcctggtcatcactgcttcacagtcactagaaaataaagaactatgcatccttaggaatgactggtgttctgttccagtagagccaggagatatcattcatttggagggagactgcacatctgacacttggataatagataaagattttggatatttgattctgtatccagacatgctgatttctggcaccagcatagccagta

SEQ ID NO: 127581 - DNA, 3468 bp, Homo sapiens
  Payload ID: 4967
  Gene Symbol: DNA2
  Gene Name: DNA replication helicase/nuclease 2
  ENST ID: ENST00000551118
  CDS Start-End: 23-2626
gtttgcgatccccgcgtccaggatggagcagctgaacgaactggagctgctgatggagaagagtttttgggaggaggcggagctgccggcggagctatttcagaagaaagtggtagcttcctttccaagaacagttctgagcacaggaatggataaccggtacctggtgttggcagtcaatactgtacagaacaaagagggaaactgtgaaaagcgcctggtcatcactgcttcacagtcactagaaaataaagaactatgcatccttaggaatgactggtgttctgttccagtagagccaggagatatcattcatttggagggagactgcacatctgacacttggataatagataaagattttggatatttgattctgtatccagacatgctgatttctggcaccagcatagccagtagtattcgatgtatgagaagagctgtcctgagtgaaacttttaggagctctgatccagccacacgccaaatgctaattggtacggttctccatgaggtgtttcaaaaagccataaataatagctttgccccagaaaagctacaagaacttgcttttcaaacaattcaagaaataagacatttgaaggaaatgtaccgcttaaatctaagtcaagatgaaataaaacaagaagtagaggactatcttccttcgttttgtaaatgggcaggagatttcatgcataaaaacacttcgactgacttccctcagatgcagctctctctgccaagtgataatagtaaggataattcaacatgtaacattgaagtcgtgaaaccaatggatattgaagaaagcatttggtcccctaggtttggattgaaaggcaaaatagatgttacagttggtgtgaaaatacatcgagggtataaaacaaaatacaagataatgccgctggaacttaaaactggcaaagaatcaaattctattgaacaccgtagtcaggttgttctgtacactctactaagccaagagagaagagctgatccagaggctggcttgcttctctacctcaagactggtcagatgtaccctgtgcctgccaaccatctagataaaagagaattattaaagctaagaaaccagatggcattctcattgtttcaccgtattagcaaatctgctactagacagaagacacagcttgcttctttgccacaaataattgaggaagagaaaacttgtaaatattgttcacaaattggcaattgtgctctttatagcagagcagttgaacaacagatggattgtagttcagtcccaattgtgatgctgcccaaaatagaagaagaaacccagcatctgaagcaaacacacttagaatatttcagcctttggtgtctaatgttaaccctggagtcacaatcgaaggataataaaaagaatcaccaaaatatctggctaatgcctgcttcggaaatggagaagagtggcagttgcattggaaacctgattagaatggaacatgtaaagatagtttgtgatgggcaatatttacataatttccaatgtaaacatggtgccatacctgtcacaaatctaatggcaggtgacagagttattgtaagtggagaagaaaggtcactgtttgctttgtctagaggatatgtgaaggagattaacatgacaacagtaacttgtttattagacagaaacttgtcggtccttccagaatcaactttgttcagattagaccaagaagaaaaaaattgtgatatagataccccattaggaaatctttccaaattgatggaaaacacgtttgtcagcaaaaaacttcgagatttaattattgactttcgtgaacctcagtttatatcctaccttagttctgttcttccacatgatgcaaaggatacagttgcctgcattctaaagggtttgaataagcctcagaggcaagcgatgaaaaaggtacttctttcaaaagactacacactcatcgtgggtatgcctgggacaggaaaaacaactacgatatgtactctcgttccagcgccagaacaagttgaaaaaggtggtgtgagcaatgtaacagaagccaaactcatagttttcctaacctccatttttgttaaggctggatgcagtccctctgatattggtattattgcaccgtacaggcagcaattaaagatcatcaatgatttattggcacgttctattgggatggtcgaagttaatacagtagacaaataccaaggaagggacaaaagtattgtcctagtatcttttgttagaagtaataaggatggaactgttggtgaactcttgaaagattggcgacgtcttaatgttgctataaccagagccaaacataaactgattcttctggggtgtgtgccctcactaaattgctatcctcctttggagaagctgcttaatcatttaaactcagaaaaattaatatcattgatcttccatcaagagaacatgaaagtctttgccacatattgggtgactttcaaagagaataaaacactatttcccttgccttttcatactagggcagtatctcctctagctagtgcccatacagaaaattctatcaccatacaaaatttaatgcagtatttatgttttaaagcacaggtgtaccgaaaactgtgaaaagtctgaatttatgggttctatgcatgcatttttgcctaacctagagaaagagtttgataaatttttaccagctttgaagatggattaacttttgactttgagctttaaacttttaagtcagacatttcaggactaatttgattttgtagatatcattgtaagaactttatttgaaagactgaataaagggatttgatttgttttcatcatttaagcacagtcttgtgatgatgagaacataagtgtgattcttttctgtattttgaggtccctaatccaaagcccattttgctaggattttttctgctatcagatgtgttttcactctaaacctagtcttttatgacatgaattgattacttcctgttaattttctatcctcccttactatcctccttttttgttttcagtattcagtatttcagtattctagagtagattttgatataaaagaaaataattcttacatcatcttttgcaacaaattttgttttctgaattgataataaatttaaaaagttgattcctattttcacatatgttcatatgcccctatgtttgggggtatcactcagttttcccttttttgtgtaaagatgttttgtaaaacaaaattgtctcaaagtgattatattatatatataaaaagtaacagattttaacaaaggttaaaagattcttggggtaacagattcttctggggcttggaaatcttccatttctcttgagggttttttttaatgagtgttaaatatgttaaaatttttatttctacctcatgtgtttttttaaattattacttgaagttttttatttaataaattttttctactaatgga

SEQ ID NO: 127582 - DNA, 2609 bp, Homo sapiens
  Payload ID: 4968
  Gene Symbol: DDI1
  Gene Name: DNA-damage inducible 1 homolog 1
  Uniprot ID: Q8WTU0
  ENST ID: ENST00000302259
  CDS Start-End: 244-1434
agaaatggactttggaacacaacgtgctacctcaaggctccacctggccacacagcaggcactgaggctgggagacagcccccagacagatgagtgtccgcgcctctctgagaggtgaatgagcccggacggtccctacctaccaagtcctgaggagcagcggcaccaacgacgcaggcccgccccagcccgccagtgagccgcccatgccctctgctagcccggcccgcccgggcccccgccatgctgatcaccgtgtactgcgtgcggagggacctctccgaggtcaccttctctctccaggtcagccccgactttgagctccgaaacttcaaggtcctctgcgaagcggagtccagagtccccgtcgaagagatccagatcatccacatggagcgactcctcatcgaggaccactgttccctgggctcctacggcctcaaagatggcgatatcgtggttttactgcagaaggacaatgtgggacctcgggctccagggcgtgccccgaaccagcctcgtgtagacttcagtggcattgcggtgcctgggacgtccagctcccgtccacagcaccctggacagcagcagcagcgcacacccgctgcccagcggtcacagggcttggcgtcaggagagaaggtggccggcctgcaaggtctgggcagccccgccctgatccgcagcatgctgctctccaacccccacgatctgtccctgctcaaggaacgcaaccctcccttggcggaagccctgctcagcggaagccttgagaccttttctcaggtgctgatggagcagcaaagggaaaaggccttgagagagcaagagaggcttcgtctctacacagccgacccactggatcgggaagctcaggccaaaatagaagaggaaatccggcagcaaaacattgaagaaaacatgaatatagcgatagaagaggcccccgagagttttggacaagtgacgatgctctacattaactgcaaagtgaatgggcatcctttgaaggcttttgttgactcgggcgcccagatgaccattatgagccaggcttgtgccgagcgatgtaacatcatgaggctggtggaccgacggtgggctggggttgctaaaggagtgggcacacagagaattattggccgtgttcatctagctcagattcaaattgaaggtgatttcttacagtgctctttctccatacttgaggatcaacccatggatatgcttctaggcctagatatgctccggagacatcaatgttccatcgatttgaagaaaaatgtgctggtcatcggcaccactggcacgcagacttattttcttcctgagggagagttgcccttatgctctaggatggtaagtgggcaagatgagtcttcggacaaggaaattacacattcagtcatggattcaggacgaaaagagcattaaagcacgttataaatatgttaccaccttgagggagcctcaggtccccggcaattataagttaagagcttactggcaatgtaatcattaaaaaacatcagtaacaactaaacctggccttgggactacgttctcagatgggtaactaacgtcaatcctgattccttggtcttggtccctcttccatttcccttgtccagagatcactgaaaggcatcctgggaaggctctggaggctccagctgatttccagataatccatgaaaaagaaaaccagcttcttcctttagagacactatcctatcagattacaggtggcttatccaaatcattgctattttgcagaattccctggaaaaatgctatggctgcagaccttacaaggcatccacataaaactatttcacatcagcactaataattctttctactgagagaaatatgcccattttcacaggttttgttttctttgggaagggtattagaaatggtaggtcagttacactatgatgttaactaatacttatacatgtctgtttggggcagcataaagaccaatttcctcatatttacaccttcccttcccctggatcccctgcagtcaccctgcaatccacagctaaagactatttttgccatatttgagaaagtggatttatctccaaggatgctacattaattttctatttctcctgcattcaaagaaactctggctataaaacaaaggcaataaattagattttttaaaaaagaaattatggtacttcttgggagtcaagttgtacagtggtgggaatgagaggtggggacaggcagtggtccaggttctctaatagtcattgcaactagatcatctctctctctttttcaaagtaaaaatctgctttatacattaagctgctgctacatcagtattgtttgaacaaaggttttcactgttaaaataacatttgaaaacttttgaatgagaagatctctaaggcctcattcagaattatccattctgacaatgttagtgtttattacaactgacagtgggtaatggaagatcctagacttaattacaacccatggctaaagcacctgagagaaaagtttcagcttcctgaggccatcagatgcaggggaaatgtttcaggacaataatttatcaaaactagtattaaaacagcggattc

SEQ ID NO: 127583 - DNA, 10625 bp, Homo sapiens
  Payload ID: 4969
  Gene Symbol: DDI2
  Gene Name: DNA-damage inducible 1 homolog 2
  Uniprot ID: Q5TDH0
  ENST ID: ENST00000480945
  CDS Start-End: 172-1371
gagggcgggagggagtgactcactgagcgtgtgtgagggagggagcgagcgagcgaacgagcagccggcgccgtcctcccgcagcaccagccaggccacgccgccgcctcttcccctgcgccccgcgcccaggccgggccgagccgagccgagccgggtcgggcccgggccatgctgctcaccgtgtactgtgtgcggagggacctctccgaggtgaccttttccctccaggtcgacgccgacttcgagctgcacaacttccgcgcgctgtgcgagctcgagtctggcatccccgcagccgagagccagatcgtctatgcggaaagacctctcacagacaaccacagatcattggcttcttatggcttgaaagatggggacgttgtgattttacgacagaaggagaatgcagaccctcgacctccagtgcagttcccaaacttaccccgaatagatttcagtagtatagctgtgcctggcacatcaagtccccggcagcgccagccaccaggaacacagcagtcccactcatctcctggagaaataacttcatctcctcagggcttggacaatccagccttgctccgagatatgttgctggccaacccgcatgagctgtccttgctgaaggaacgcaatccacccctggcagaagctctgctcagtggagaccttgagaaattttctagagtcctggtggagcagcagcaggaccgagcccggagagagcaagaaaggattcgtctgttttctgctgatccctttgaccttgaagctcaggcaaagatagaagaagatataaggcaacagaacattgaggaaaacatgacaatagctatggaagaggctccggaaagttttggccaagtagtgatgctttatattaactgcaaagtgaatggacatcctgtgaaagcctttgttgactcaggtgcccagatgactatcatgagccaagcttgtgcagaaaggtgtaacataatgagactggtggaccgtcggtgggcagggattgccaaaggagtgggcacccagaagattattggaagggtacatctagctcaggttcagattgaaggagattttttgccatgttccttctctatacttgaggaacagcccatggacatgcttctgggactggacatgcttaaacggcaccagtgttccatcgacctgaagaaaaatgtactcgtgatcggcaccacaggctcccagaccacctttcttcctgagggagagctaccagagtgtgcccggttggcatatggggctggaagagaggatgtacggccagaggagattgcagaccaagaattagcagaagcccttcaaaaatcagcagaggatgcagagcgtcagaagccatgatgcatgtagtgtgtgtgtactgcagctggagtgggccccagaccagagaaaagtggtaaagaatctacctcactgggaatgtcatcattaccaacttcagatgggtttaaccatcccgcccgttcttcaggacagagtcctgatgttggtaatcctatgagtcttgctcgctctgtctctgcttcagtctgccctatcaagcccagtgactcagatcgcattgaacctaaagctgtgaaggctttgaaggcttcagctgaattccagctaaactctgaaaagaaagaacatctttctttacaagatctttctgatcatgcttcctcagcagaccatgctccaacagaccagagtccagctatgcctatgcagaattcatccgaagaaataactgttgcaggtaatctggagaaatctgctgaaagaagcacccagggcctcaaatttcatctccatacaagacaggaagctagtttatctgtcacatctactaggatgcatgaaccacagatgtttctaggtgaaaaggattggcatccagaaaatcagaacctgagtcaagtgagtgaccctcagcagcacgaagaaccagggaatgaacagtatgaggttgcacaacaaaaagcttcacatgaccaagaatatctttgtaacataggggaccttgagcttcctgaagaaaggcaacagaatcaacacaaaattgttgatttggaagctacgatgaaaggaaatgggctcccacagaatgtggatcctccaagtgcgaagaaaagtattccatcttcagaatgcagtggctgctcaaattcagaaacatttatggaaatcgatacagctcaacagtccctagttactttgcttaattcaacaggcaggcagaatgccaatgtcaagaacattggtgcattggatctcactttagataatcccttgatggaagtagaaacatcaaaatgtaacccttcatctgaaattttgaatgattccatttccactcaggatttacagcccccagaaactaatgttgaaatacctggaacaaataaagaatatggccattactcctctccaagtctctgtggcagttgtcagccttctgtggagtcagcagaagaatcttgcccgtctataacggcagccttgaaagaacttcatgaacttttggttgttagcagtaaaccagcttcagaaaatacatctgaagaagtaatctgtcaatcagaaaccatagctgagggccaaaccagtattaaagacctttctgaaagatggacccaaaatgagcatcttacccagaatgaacagtgtccacaagtctcctttcatcaggccatatctgtatcagtggagacagaaaaattaacaggtacttcatctgacactggaagagaagctgtagaaaatgtaaacttcaggagtctaggtgatggcctgtcaaccgataaggaaggtgtccccaaatctagggaatccataaataagaaccgttctgtcactgtaacctcagctaaaacatccaatcagttacactgcaccttaggtgtagaaatttcacccaaacttttagcaggtgaggaggatgcactcaatcagacttctgagcaaactaagtctttgtcatccaatttcatattggttaaagacttaggtcagggcatacagaattcagtaacagacaggcctgaaaccagagaaaatgtctgtcctgatgcttcgaggccattacttgaatatgaaccacctaccagccatccatcatcaagtcctgccattcttccaccattgatttttcctgccacagatattgaccgcattctccgtgctggctttactttgcaggaagctcttggagctttgcatcgagttggtgggaatgcagaccttgcacttcttgttttgctcgcaaaaaacatcgtagttcctacatgactgtgggaaagtgggctagaccgttctccattccctttaaacaaaagaaagctctctctatatacacgcacacatacacactcaccacatatacagtatatatagaaacctgcaagcagaatgttgagccagattttttttaaagatttttttcggccaaagtaatttatgatcttttgtctgatgaatttgtctatcctacttgttaaaatttaggcctttttaaatgtattggcagtatgtgcatacagaagctttttattctcattaagatgtatcctggaataaaatggatggttttgtgtgtagcatactgttttagaatgagagtaaatgctttgaaaagcagaagccatgagaaatcccactacccatccagctaaaaacagatgaactctccacactgtgactgtgtgtctgtgctgatggcaaggtatggtttgctggctcagttgtcaatttagaaacttttgaccacataatttggtgtttggaattctacccagtgctctgtgtatcatgattcattaattataacaggaaattggagaataattgaatatcttatcgtagagtggtatgtttttatttgtgtgcttaggatttgacattttaatagggcgagcaggagggtttaaatcttgggctactttgtgcatcacaggctgctgcatggattgccatgaatccttattacattggatgggatattgtgggggagttacaatgcaagtgaaacgtggtgctacccagattcttaaaagaacagaacaaccataattccatttgcagatgtcaagaactgtgagggaaaaataatggcctaaacactggaatttgctagagtttgggtttgctagcatctcactgataacacctcaacccttaatgactaatggtggaattaagttcaggaatggattcattgccagcagcttatttcctttctagactcttctgccaggaagttcttcaaacgctcagtgtgagctgtgatctgagtgaaatactaagtgtgataaccttgtcactggttaatcttggtgcttggaacggtcagtctatttggagagtgtcctttgtggcagtggaaatagtaattacagtttctgacttaagtggccttggtagagttttccatccttttctttcctcaggagtttcttttttaagcaaaattcatcttatttgtgtttaccatgtcaagttagagtggggcataatatatagatgtatttattgtggcctttttttatataaggactagcccttggaaatcattgtcctgtgggccccactgtgcaataatcctactggataggttttagataattctttcctggcaaactgctcttttgggtacctagcaggaatctgaagtcttggttttattgaaaagaattttgagattcataatttctgattctagattatagtttgtaacatgtttgaaacagaagcttcgaaagagtgatttctcaacttagtgttaaatgattttgtctgaagtctgactctttgtaagcttgtttgtttcatcaaattttaagtcattgagcacaatcaaaatggaggctcatatctcaggagtttttgaaattttaatttaggggcacttagagacatttttttctaccccatccaacttctttctttccttttgctatgatgtttgtatgtatgttataagactttagtgatgggatggcgtgtcacgtagattcatcatgatcctttatgtagttaggaaatggttgacagaaggaattgtagtttactgcttttcagagggcgtgaagaacaacaggtcagccaggttgtctttaagatgttcttttagacagctgcacattgtagaccctttcacctgccctacaccaaagatgtacgatgcactaggaaactgctcataggatttctgtcagctgacttaaagctgtgattgtaattaaatagttggtgctatgattgatgcaaaatctagtagcaatgcaatgggaccctgtatttgctttatgggtggtggtttgggaatgtattctaagcttataaatctttggaaccacggggtgggaagggtgggggaacttactgatgacaatagactccctcctaaagggccttccatgtaagcagaacgaaccttggcacacaattcagtgtggatatttgggaaacagttccaagtggaatatataatatcagtcgggaaaagatttcattaggatagctttttgtgtatgtatatgtatatttatttttaggaatagatctatagttgtacatgaattcctgttaggaatactctgaatgagcttaacccacttgccaaatatccttgtcccttccatcattttatttttgagatggggtcttgcagtgttgcccaggctggactcaaactctggggcttaatcatccttctgagtagctgggactacataaaggccaaagtataattgcttttgatttttaaaatcttcttgcccatcatttttataaaaataaagctgtttgtccaacacggtgaaacctcatctctactaaaaatacaaaaaattagctgggcatggtggcacacgcctgtaatcccagctacttgggagactgaggcaggagaattgcttgaacctgggagatgggggttgcagtgagcctagatcacgccactgcactccagtgtgggcggcagagtgagactctgtctcacccaaaaaaaaaaaaaaaaagctattgacactgttaatattttggatgacttaaatttagcagctctagaatgcaaagggtatattaaggagcattacaatagtgaaccttcatcgtcagcttttattcaattaagagctccagaaatgcagaaattatgggttaacttctaagaataccatcaaatccctgtgaattctggttgccaacagtaataaccagtaatgggcacctttaccggacagctcctttaccataaccagtagtgggcagttctgcggtcagcacttaactacaagggcggtctctgtttcttcaccagagagagaagattttcctgtgtaatttgtgccatttccctgaagttggttcttgagcggaaagatgtgcttggtaaccagacagcagctttacataggttatagattttgctcattgatgctgttaagaattatttccactcatacctgttcagggctccagacagccaatagccttcatcccacagtttgggcttcagctattaacacataaagataaccagttgcagctaggctcggtggctcacacctgtaatcccagcactttgggaggccaaggcgggtggatcacctgagggcaggagtttgagacaggcctggccaacatggtgaaactccatctctactaaaaatacaaaaattagccgggtgtggtggcccatgcctgtaattccagctactcgggaggctgaggcaggagaatcacttaaacctgggaggcggaggttgtggtgagcagagatcacgccattgcactccagcctgggcaacaagagcaaaactctgtctcaaaaaaaaaaaaaaaaaaggtaaccagttgcttggcaaaggaagctggagagatggcgagtgcatgtgttaaaactcttctgccttgcagcccacatcttctagagctccctgtcttcatatgtactaaagggagacacaaccctatgtgttttttcccaaagcatgtctctagcaagagggtacatagaaatggaacatgaggctttttgtcactgattttatgataaccagttaatgtggaatctgctggttgtcttactacagctttctatctccggtgaaagccataaaaatttaggttaacttttaagctcatgtctatatatatgtgtgtaagctagcatatacatatggtgattgacaagtatagttaattttatatggatttaaaagcaagcaatttttatatctacagacgtactcttcacttatggtggcttttatcccgccacatatataaatatatatatatatagcaaacagccttgcaaatcatcggccagaaaagctgcagggcgttgcaatggccttttcctacctgtttgccacctgtggtgagggtgagcaggatgattgaactgctgcatatttcaaacctgttatcactggcagtgtgtcccaagagaagctgaccagattatgcattctactgttctctagcacaagtactcaccaaaaagccaaatttcccctttggagttggtgacttagtgtagtctgtggctgacctagaaagacacagagttatcaagagtttcccttcctagaagatgaatgttaccttttgtgttaggaggtagagaaaataaaaatagcttttttttccctagaattgctaattactcttaacaacaaattaaattcaaagcctgtccttgagaactggaaatgtaaaatcatggttcaagttttataccttagtgattcctcagtaggtgttactaggagttcactgaatgaacttaggagtgaaccttcgatgtgcttgattttcttttgtgccttagtttctctgaatagcagaggcatcaaattttggtggggaatgagaggagtattaggggaaagtttgaaaatagctctcctggagatggagggcacacagagtggtcctcaggctcaccttgactgagttgattcacagttatcctgcatcagaccattagatttctttagtgctatgattataatagggatttttgaatcaccaaaaacagtttttagatgtttatgttctttgttttactatcaatgttgtgctggttaagggagagaaaagttcaagaagatcttacatatttgaaaggaaattggtactcttgaaggctatgcaacatgagtctttgaacaagaattccttgctactttgattcattcatcaaatactgagtgcctgtgtgccaggcacaggtgaactctggggattcaggggtaactaaaacagattggaaccctgcccttgtgaagctttcagtctagaagggagacgtgaaacaaattttagcttcaaaagcaacatctatttttgcctgttagcatgcatttattttaaaagtcatattagagttacctggttccacttcagagcagactgggaaaatcaggcttacaatggaatcagatgctgtgggcctaaaacagctctttaaaaatctatttttttaggccaggtgcgttggctcacacctgtaatcccagcactttgggaggccaaggtgggtggatatgaggtcaggaggtcgagaccagcctggccaatatgatgaaaccttacctctactaaaaataaaaaattagccgggcatggtggcacatgcctgtagtcccagctactcgggaaactgaggcagaagaatcgcttgaacccgggaggcggaggttgcagtgagccgggatcacgtcactgtactccagcctgggcaagagtgagacaccgtctcaaaaaaaaaaaaaatttttttttaaatggaatcagagaaaccaacaaaatatgtaacatgtataaatgcctgaggagatcagttattgagaaatccatttacaatgctggaggagaggggatggccaggaaagaagtgcaacaaataaatggaagatgaccctaaaaatgcaccagtgacagtcagtcaatccatcagaccacctcacatgcagggtagaaacatggagtgtgcggcagcatcctcctcacatccctttgtgagcacggctgctccggaatactgaccatctgggctagcacgacttagcagagggttctgcaggatgtgctattttaaagcagctgggtgcaacttgtgaaaacgggaatctagagcagaacatgtaatcagcgatggctgggattggtggacaggattgacaggagtatttgaggctctaccaggcctgtctacaggacagcttcatcaaagggacattttttaacctgttattttaaatgccacatatatgttgtaatgctgaagcatacaggtagaatttctggatcgtaactactagtgacttctgaggtttacagttagaaaatgttctcaaaggtttatcagttatgtattgatgattggtaatctagaccctctggaggctgtagaatgtgaaaagatacagctgagctgacaagttttagggcactatcttctggaatgaaatcggccaagaaaatggttcaagggcatgggggttagagaatgtttcttttacctaaaaatgttaagccaactatggaagattggggtcgtgggggcatgaaatacaaaattatgataatttatacagaactaggtttctttatgttctgcaagaaggtttttattagctaatttggggaggggggcatgctgcagtattttttttcctgggaacatgcatttctgatgggaagttattttgtttacaagagttggttttacacacaaccctgaatgaatgtgtctatggcctaaaaatggtagacctgtatttccttcccgaggcaggctgattcgtttcctgattccttctgtctgagattacctgatgctgaccagacttatttttcctttcctgaatcttcacagctgagtttatggcacccatccaagaccttcccatttgaatgactagatttctattctatccccgatcatccttttgaaatagttctagtgataaactcagagaaattcaatatattgattgaattttattttttcgctttgtatctacaacagaaattgatttgttcatttttatttcaaatctcttcatggcaagttgggctaatggactttgcactcaagaaaggtttgtttaccagttttgtagccatgtttggcaaatcttagcaactagaaaccccgtcctttcttttccttctttatatgttcttgcagttactcttgtattgcaagattttctgactttaagctttgagactactgcatcttaaaagaagaactaggctgactggcaaaaagtcttgccagtggccctgtcactcccatgatgctttggttttgagagttgggaaaactctgagaacttaagggaaccaaactcaggaatcccaaaattggtggcattgtgccattcgtttaggggctgaacataggacctgtctgaaactgagtgagctagatgcatttgggtttgaatttttgtcacatactgaaatgtaagtcagccctaaataatcaaaacactttattttatttttctttttttaaataggaactttctgaagaaaaagtggtgtgtaaaacatttgatatttaagacaataaagtttttatcataaga

SEQ ID NO: 127584 - DNA, 497 bp, Homo sapiens
  Payload ID: 4969
  Gene Symbol: DDI2
  Gene Name: DNA-damage inducible 1 homolog 2
  ENST ID: ENST00000483899
  CDS Start-End: 1-310
agaaataacttcatctcctcagggcttggacaatccagccttgctccgagatatgttgctggccaacccgcatgagctgtccttgctgaaggaacgcaatccacccctggcagaagctctgctcagtggagaccttgagaaattttctagagtcctggtggagcagcagcaggaccgagcccggagagagcaagaaaggattcgtctgttttctgctgatccctttgaccttgaagctcaggcaaagatagaagaagatataaggtgcccagatgactatcatgagccaagcttgtgcagaaaggtgtaacataatgagactggtggaccgtcggtgggcagggattgccaaaggagtgggcacccagaagattattggaagggtacatctagctcaggttcagattgaaggagattttttgccatgttccttctctatacttgaggaacagcccatggacatgcttctgggactggacatgcttaaacggcaccag

SEQ ID NO: 127585 - DNA, 2076 bp, Homo sapiens
  Payload ID: 4969
  Gene Symbol: DDI2
  Gene Name: DNA-damage inducible 1 homolog 2
  ENST ID: ENST00000320153
  CDS Start-End: 1-300
cagcagtcccactcatctcctggagaaataacttcatctcctcagggcttggacaatccagccttgctccgagatatgttgctggccaacccgcatgagctgtccttgctgaaggaacgcaatccacccctggcagaagctctgctcagtggagaccttgagaaattttctagagtcctggtggagcagcagcaggaccgagcccggagagagcaagaaaggattcgtctgttttctgctgatccctttgaccttgaagctcaggcaaagatagaagaagatataaggaggactccctgactagcagacagagcatcataacacagctttagataaatgacccccggactgagcagaagccaccatctggtgcccagatgactatcatgagccaagcttgtgcagaaaggtgtaacataatgagactggtggaccgtcggtgggcagggattgccaaaggagtgggcacccagaagattattggaagggtacatctagctcaggttcagattgaaggagattttttgccatgttccttctctatacttgaggaacagcccatggacatgcttctgggactggacatgcttaaacggcaccagtgttccatcgacctgaagaaaaatgtactcgtgatcggcaccacaggctcccagaccacctttcttcctgagggagagctaccagagtgtgcccggttggcatatggggctggaagagaggatgtacggccagaggagattgcagaccaagaattagcagaagcccttcaaaaatcagcagaggatgcagagcgtcagaagccatgatgcatgtagtgtgtgtgtactgcagctggagtgggccccagaccagagaaaagtggtaaagaatctacctcactgggaatgtcatcattaccaacttcagatgggtttaaccatcccgcccgttcttcaggacagagtcctgatgttggtaatcctatgagtcttgctcgctctgtctctgcttcagtctgccctatcaagcccagtgactcagatcgcattgaacctaaagctgtgaaggctttgaaggcttcagctgaattccagctaaactctgaaaagaaagaacatctttctttacaagatctttctgatcatgcttcctcagcagaccatgctccaacagaccagagtccagctatgcctatgcagaattcatccgaagaaataactgttgcaggtaatctggagaaatctgctgaaagaagcacccagggcctcaaatttcatctccatacaagacaggaagctagtttatctgtcacatctactaggatgcatgaaccacagatgtttctaggtgaaaaggattggcatccagaaaatcagaacctgagtcaagtgagtgaccctcagcagcacgaagaaccagggaatgaacagtatgaggttgcacaacaaaaagcttcacatgaccaagaatatctttgtaacataggggaccttgagcttcctgaagaaaggcaacagaatcaacacaaaattgttgatttggaagctacgatgaaaggaaatgggctcccacagaatgtggatcctccaagtgcgaagaaaagtattccatcttcagaatgcagtggctgctcaaattcagaaacatttatggaaatcgatacagctcaacagtccctagttactttgcttaattcaacaggcaggcagaatgccaatgtcaagaacattggtgcattggatctcactttagataatcccttgatggaagtagaaacatcaaaatgtaacccttcatctgaaattttgaatgattccatttccactcaggatttacagcccccagaaactaatgttgaaatacctggaacaaataaagaatatggccattactcctctccaagtctctgtggcagttgtcagccttctgtggagtcagcagaagaatcttgcccgtctataacggcagccttgaaagaacttcatgaacttttggttgttagcagtaaaccagcttcagaaaatacatctgaagaagtaatctgtcaatcagaaaccatagctgagggccaaaccagtattaaagacctttctg

SEQ ID NO: 127586 - DNA, 3519 bp, Homo sapiens
  Payload ID: 4970
  Gene Symbol: DRAM1
  Gene Name: DNA-damage regulated autophagy modulator 1
  Uniprot ID: Q8N682
  ENST ID: ENST00000258534
  CDS Start-End: 440-1156
gggaaggccagagcgggcgtccccgccagtgaccccacgccgcccgtccgcgcccaacccggcctccgccgagtgtccaaaccaaaagcgaaaggaacccgaccccgcgtcccctccggcggctccgtagtcgcgtccgcttggagctcgccgggcgcctccgaccctgccgggccgctttgtgacttcactcgtttcgcaacaagcccgggcagcccgcgccccacccactctggcccggcagcctcgccgcccgcagcctcgctccgctcctcgcgcttcccctccctccggggctgggcctgccccggccgtcgcggagcctcccctcccaccgtccgtgagtgtacgcgcccggccgccgcctccaggcagcccggagcaacccggcgcccggccccgctgggcgcagcactccgtcggcggcggcggcggcgcgatgctgtgcttcctgaggggaatggctttcgtccccttcctcttggtgacctggtcgtcagccgccttcattatctcctacgtggtcgccgtgctctccgggcacgtcaaccccttcctcccgtatatcagtgatacgggaacaacacctccagagagtggtatttttggatttatgataaacttctctgcatttcttggtgcagccacgatgtatacaagatacaaaatagtacagaagcaaaatcaaacctgctatttcagcactcctgtttttaacttggtgtctttagtgcttggattggtgggatgtttcggaatgggcattgtcgccaattttcaggagttagctgtgccagtggttcatgacgggggcgctcttttggcctttgtctgtggtgtcgtgtacacgctcctacagtccatcatctcttacaaatcatgtccccagtggaacagtctctcgacatgccacatacggatggtcatctctgccgtttcttgcgcagctgtcatccccatgattgtctgtgcttcactaatttccataaccaagctggagtggaatccaagagaaaaggattatgtatatcacgtagtgagtgcgatctgtgaatggacagtggcctttggttttattttctacttcctaactttcatccaagatttccagagtgtcaccctaaggatatccacagaaatcaatggtgatatttgaagaaagaagaattcagtctcactcagtgaatgtcgcaggccatttctaaaagtgctacagaggacagacagggttttgaggccaccctgattattgggatgcatctgcagcacatccaggacttgaatttcattacgagttcctaatagttgtatttctaaagatgtgtttcctagagaatgtacagccttatgacactgtagtgatgtttttataattttctaagtagatttttttatattaacaaattcatatacagaaaaaataaggtgttacaaaaaatggagagctcttatttttgtacagattctgtcgtttttgttttatttgtgtgagatttatggaaatacactaaatgagtaattcaggttcagtacatttattacaaagtgaaatcaggggatattcatttgtaaattttattcttagtgaatgaactgtataattttttttatcaggagagcacttataaaattcaatttataaagatcatatacccaaatcataaagatttagttgatacattaacactaagatactctgatttttagccgaactaaacaaagtgcttctactgagaggcctttataccaccatgtacagtaactctaagtgaatacggaagaccttggttttgaaattctgccaccttgtttctccctgctcatgaggtcgcaccttttgctcttgctgctaattgcccattcgtagtgggtgtaatgccaggtggaatggtttcaacaagtcaggtgaaaaccatcctttattgttgctggcacaacttgatatatagtctgactcagaactgaagctcacatctcaaattcatttcatgccagtaaatgtggcaaagagaagaaaggcccaagagcgagacaagaagaatggagaagggggcagccaagaagaacttctgggttcagggtactgtttatttgctccttctcttcatgcctgtggctggatgtcccacaacactataagaaatataagtcaagccctttgtgttaagcaagaactacagactccatcttttcacccaaatcatgaatgaccaataaaaagcaagttattccagaggaagaagcagcccttgaaatgttaaggcttaggcttgaaaggtgaagagcaggaattctctctttcaaatcctagagcataaacccatgtgtggccaagtgagatcagccctcaagggcacatgccaagggcagagcagcccatgtagacagcttcggagggcatgggggtgtagggagttcggggtagctcctcattaactatttgttgggtgagtaaaggggtgaggctcagtggcaggtacctctgcaatgacaagctgcctcccctctatgtgtttagcatatgttattagaacatgtccgacacccctaccgctgccatttgggccctttaataaagccaagtagagaaatctggcaataaaaggcaaatgtaagcatgctttctttaagacgcatcataaatggttttctttaagtgaatggaagagtttgacagagatacacctttgtaagaaaacattaagaatgctggctggctgtggtggctcacacctgtattcccagcactttgggaggcctaggcaggaggattgcttgagcctgggacttcgagaccagactgggaaacatggcaaaatcccatctctacaacaaaaatacaaaaattagccaagtgcggtggtgtgcctgtagtcctagttacttgggaggctgaggtgggagaatcacctgagcccaggaggtggaggctgcagtgagccatgccaatgcactccagtctgggcaacagagtgagaccctgtctcaaaaataaataaataaataaatgaataaagagaatgctaatcatttctgggttcactgcgactcactgtagtgctggggatcccccttgtaacactggaactgaaagacagtgatgaaagctatgtcaagcattcattattctgaagaggaggagaaatgccacatacctttcccatgggacctgtggtggaatgaatccatacttctgcctcacttcgagcagacttttgttctcggcgctcctcacgatggagtttcatgcttcattttcacatctctctgcacaattagattgggagctccttgagggcagagtacgtgccttaatctttatctttgtaatgccacaatgaacagagtgcctcctggtacactgtaggagcttaagaaatactcactgaatgcatgaatgaatgaatgaacaaatgaaggaatgactaaggatgtttgtagtgctataatatagaatgggatttactctgctttaccagttagtttcataataaacaaatagtctgtatcgcctggtaa

SEQ ID NO: 127587 - DNA, 1048 bp, Homo sapiens
  Payload ID: 4970
  Gene Symbol: DRAM1
  Gene Name: DNA-damage regulated autophagy modulator 1
  Uniprot ID: Q8N682
  ENST ID: ENST00000544152
  CDS Start-End: 108-494
caccgtccgtgagtgtacgcgcccggccgccgcctccaggcagcccggagcaacccggcgcccggccccgctgggcgcagcactccgtcggcggcggcggcggcgcgatgctgtgcttcctgaggggaatggctttcgtccccttcctcttggtgacctggtcgtcagccgccttcattatctcctacgtggtcgccgtgctctccgggcacgtcaaccccttcctcccgtatatcagtgatacgggaacaacacctccagagagtggtatttttggatttatgataaacttctctgcatttcttggtgcagccacgatgtatacaagatacaaaatagtacagaagcaaaatcaaacctgctatttcagcactcctgtttttaacttggtgtctttagtgcttggattggtgggatgtttcggaatgggcattgtcgccaattttcagagtgtcaccctaaggatatccacagaaatcaatggtgatatttgaagaaagaagaattcagtctcactcagtgaatgtcgcaggccatttctaaaagtgctacagaggacagacagggttttgaggccaccctgattattgggatgcatctgcagcacatccaggacttgaatttcattacgagttcctaatagttgtatttctaaagatgtgtttcctagagaatgtacagccttatgacactgtagtgatgtttttataattttctaagtagatttttttatattaacaaattcatatacagaaaaaataaggtgttacaaaaaatggagagctcttatttttgtacagattctgtcgtttttgttttatttgtgtgagatttatggaaatacactaaatgagtaattcaggttcagtacatttattacaaagtgaaatcaggggatattcatttgtaaattttattcttagtgaatgaactgtataattttttttatcaggagagcacttataaaattcaatttataaagatcatatacccaaatcataaagatttagttgatacattaacactaagatactctgatttttagccg

SEQ ID NO: 127588 - DNA, 611 bp, Homo sapiens
  Payload ID: 4970
  Gene Symbol: DRAM1
  Gene Name: DNA-damage regulated autophagy modulator 1
  ENST ID: ENST00000549365
  CDS Start-End: 1-140
gcttcctgaggggaatggctttcgtccccttcctcttggtgacctggtcgtcagccgccttcattatctcctacgtggtcgccgtgctctccgggcacgtcaaccccttcctcccgtatatcagttattttttgagatgaagcctcactctgtcggccaggctggagtgcagtggcacgatcttggctcactgtaacctctgcctcctgggttcaagcgattctcctgcctcagccacccgagtagctgggattacagtgatacgggaacaacacctccagagagtggtatttttggatttatgataaacttctctgcatttcttggtgcagccacgatgtatacaagatacaaaatagtacagaagcaaaatcaaacctgctatttcagcactcctgtttttaacttggtgtctttagtgcttggattggtgggatgtttcggaatgggcattgtcgccaattttcaggagttagctgtgccagtggttcatgacgggggcgctcttttggcctttgtctgtggtgtcgtgtacacgctcctacagtccatcatctcttacaaatcatgtccccagtggaacagtctctcgacatgccacatacggatgg

SEQ ID NO: 127589 - DNA, 427 bp, Homo sapiens
  Payload ID: 4970
  Gene Symbol: DRAM1
  Gene Name: DNA-damage regulated autophagy modulator 1
  ENST ID: ENST00000549066
  CDS Start-End: 1-160
ccacatacggatggtcatctctgccgtttcttgcgcagctgtcatccccatgattgtctgtgcttcactaatttccataaccaagctggagtggaatccaagagaaaaggtaatacaggagttgatggcaacgatggttactcattatgaaccacactgaaacgaccttcaattcaatttccatctgctaataaatatagtcaagtgctgcataatgttttggtcaacatcccctaagattataaaaccatatttgactgcaccttttctacatttagatacacaaataccactgtgttacaactgcctacagtattcagtacagtgacatgctgtgcaggtttgtagcctagaagcaataggtttgtgtaagtacacttgttatgaaatccacaatgtttgtacaataaaaccgcctaatgacgca

SEQ ID NO: 127590 - DNA, 920 bp, Homo sapiens
  Payload ID: 4970
  Gene Symbol: DRAM1
  Gene Name: DNA-damage regulated autophagy modulator 1
  ENST ID: ENST00000551403
  CDS Start-End: 100-444
gtgagtgtacgcgcccggccgccgcctccaggcagcccggagcaacccggcgcccggccccgctgggcgcagcactccgtcggcggcggcggcggcgcgatgctgtgcttcctgaggggaatggctttcgtccccttcctcttggtgacctggtcgtcagccgccttcattatctcctacgtggtcgccgtgctctccgggcacgtcaaccccttcctcccgtatatcagtgatacgggaacaacacctccagagagtggtatttttggatttatgataaacttctctgcatttcttggtgcagccacgatgtatacaagatacaaaatagtacagaagcaaaatcaaacctgctatttcagcactcctgtttttaacttggtgtctttagtgcttggattggtgggatgtttcggaatgggcattgtcgccaattttcagtgattgtctgtgcttcactaatttccataaccaagctggagtggaatccaagagaaaaggattatgtatatcacgtagtgagtgcgatctgtgaatggacagtggcctttggttttattttctacttcctaactttcatccaagatttccagagtgtcaccctaaggatatccacagaaatcaatggtgatatttgaagaaagaagaattcagtctcactcagtgaatgtcgcaggccatttctaaaagtgctacagaggacagacagggttttgaggccaccctgattattgggatgcatctgcagcacatccaggacttgaatttcattacgagttcctaatagttgtatttctaaagatgtgtttcctagagaatgtacagccttatgacactgtagtgatgtttttataattttctaagtagatttttttatattaacaaattcatatacagaaaaaataaggtgttacaaaaaa

SEQ ID NO: 127591 - DNA, 2246 bp, Homo sapiens
  Payload ID: 4971
  Gene Symbol: DRAM2
  Gene Name: DNA-damage regulated autophagy modulator 2
  Uniprot ID: Q6UX65
  ENST ID: ENST00000286692
  CDS Start-End: 619-1419
aaggtaagtcgaagtaggggagaagggacaggccccagcgcttgcagcccgctccctctagaagggtgcgtcagagggtgggatctggcagctcggggaagtgggcgcagcctggagcccccttacccgcgtcgcaggcgcgcgagactcctgctggccctcattgcctccgggggctaccttatgccaggcgccagaggggggctggttggggcgggagctgcgggggtttccgggggcggggatgagtgcagctgggctcagctccccgtgccctacctttctgttctcttccttggtttcccctactctcctcctgccccaagcagtgcctgatgccgagttccgtctctcgcgtcttttcctggtcccaggcaaagcggagcggagatcctcaaacggcctagtgcttcgcgcttccggagaaaatcagcggtctaattaattcctctggtttgttgaagcagttaccaagaatcttcaaccctttcccacaaaagctaattgagtacacgttcctgttgagtacacgttcctgttgatttacaaaaggtgcaggtatgagcaggtctgaagactaacattttgtgaagttgtaaaacagaaaacctgttagaaatgtggtggtttcagcaaggcctcagtttccttccttcagcccttgtaatttggacatctgctgctttcatattttcatacattactgcagtaacactccaccatatagacccggctttaccttatatcagtgacactggtacagtagctccagaaaaatgcttatttggggcaatgctaaatattgcggcagttttatgcattgctaccatttatgttcgttataagcaagttcatgctctgagtcctgaagagaacgttatcatcaaattaaacaaggctggccttgtacttggaatactgagttgtttaggactttctattgtggcaaacttccagaaaacaaccctttttgctgcacatgtaagtggagctgtgcttacctttggtatgggctcattatatatgtttgttcagaccatcctttcctaccaaatgcagcccaaaatccatggcaaacaagtcttctggatcagactgttgttggttatctggtgtggagtaagtgcacttagcatgctgacttgctcatcagttttgcacagtggcaattttgggactgatttagaacagaaactccattggaaccccgaggacaaaggttatgtgcttcacatgatcactactgcagcagaatggtctatgtcattttccttctttggttttttcctgacttacattcgtgattttcagaaaatttctttacgggtggaagccaatttacatggattaaccctctatgacactgcaccttgccctattaacaatgaacgaacacggctactttccagagatatttgatgaaaggataaaatatttctgtaatgattatgattctcagggattggggaaaggttcacagaagttgcttattcttctctgaaattttcaaccacttaatcaaggctgacagtaacactgatgaatgctgataatcaggaaacatgaaagaagccatttgatagattattctaaaggatatcatcaagaagactattaaaaacacctatgcctatacttttttatctcagaaaataaagtcaaaagactatgatatcatagttttttataccttatttaagagaaacaacctgacgtgcaccaatcagtctgcacatcccaacccttcacattttataaattattgtagatcatgttttgttaggagcacttttatgagagacattttccatgactaaataatcagcattagtcagtaaatcctttagaactgggttttgaaatgggagttttatcatattaaatcatttcttgtagtcttacattttttgttgttgttctggaatctacctgtaaaggaaagtagacctggattcatgtgggctcttccatggcttaagtgttgcccaagagattttgtaggtaacgatttttttttttctggccacaatgccagatactaagctaattggtctatcatacacatgcttgcagtagtttcatgaagtttagtctctggcgtgaaattttaatcaccaatgaaggagagaggcacctgtaggtaaatttactttagtcatattttatataaaacaagggttagtattcatgtaacattgagaagtttgggaataacagcagatatgattaataaaagtcataaccat

SEQ ID NO: 127592 - DNA, 1883 bp, Homo sapiens
  Payload ID: 4971
  Gene Symbol: DRAM2
  Gene Name: DNA-damage regulated autophagy modulator 2
  Uniprot ID: Q6UX65
  ENST ID: ENST00000539140
  CDS Start-End: 258-1058
gcgattgccgtaaaggggaacaaggtttgaacgagcagcgccgcaggcgcgctcctcggtgccgtgagcgcgccccggggccggccggtctgctcgggagcgcgccccgtggcccagccctgtctccttttagcataggggcttcggcgccagcggccagcgctagtcggtctggtaaggatttacaaaaggtgcaggtatgagcaggtctgaagactaacattttgtgaagttgtaaaacagaaaacctgttagaaatgtggtggtttcagcaaggcctcagtttccttccttcagcccttgtaatttggacatctgctgctttcatattttcatacattactgcagtaacactccaccatatagacccggctttaccttatatcagtgacactggtacagtagctccagaaaaatgcttatttggggcaatgctaaatattgcggcagttttatgcattgctaccatttatgttcgttataagcaagttcatgctctgagtcctgaagagaacgttatcatcaaattaaacaaggctggccttgtacttggaatactgagttgtttaggactttctattgtggcaaacttccagaaaacaaccctttttgctgcacatgtaagtggagctgtgcttacctttggtatgggctcattatatatgtttgttcagaccatcctttcctaccaaatgcagcccaaaatccatggcaaacaagtcttctggatcagactgttgttggttatctggtgtggagtaagtgcacttagcatgctgacttgctcatcagttttgcacagtggcaattttgggactgatttagaacagaaactccattggaaccccgaggacaaaggttatgtgcttcacatgatcactactgcagcagaatggtctatgtcattttccttctttggttttttcctgacttacattcgtgattttcagaaaatttctttacgggtggaagccaatttacatggattaaccctctatgacactgcaccttgccctattaacaatgaacgaacacggctactttccagagatatttgatgaaaggataaaatatttctgtaatgattatgattctcagggattggggaaaggttcacagaagttgcttattcttctctgaaattttcaaccacttaatcaaggctgacagtaacactgatgaatgctgataatcaggaaacatgaaagaagccatttgatagattattctaaaggatatcatcaagaagactattaaaaacacctatgcctatacttttttatctcagaaaataaagtcaaaagactatgatatcatagttttttataccttatttaagagaaacaacctgacgtgcaccaatcagtctgcacatcccaacccttcacattttataaattattgtagatcatgttttgttaggagcacttttatgagagacattttccatgactaaataatcagcattagtcagtaaatcctttagaactgggttttgaaatgggagttttatcatattaaatcatttcttgtagtcttacattttttgttgttgttctggaatctacctgtaaaggaaagtagacctggattcatgtgggctcttccatggcttaagtgttgcccaagagattttgtaggtaacgatttttttttttctggccacaatgccagatactaagctaattggtctatcatacacatgcttgcagtagtttcatgaagtttagtctctggcgtgaaattttaatcaccaatgaaggagagaggcacctgtaggtaaatttactttagtcatattttatataaaacaagggttagtattcatgtaacattgagaagtttgggaataacagcagatatgattaataaaagtcataacc

SEQ ID NO: 127593 - DNA, 767 bp, Homo sapiens
  Payload ID: 4971
  Gene Symbol: DRAM2
  Gene Name: DNA-damage regulated autophagy modulator 2
  ENST ID: ENST00000496430
  CDS Start-End: 132-332
gtctccttttagcataggggcttcggcgccagcggccagcgctagtcggtctggatttacaaaaggtgcaggtatgagcaggtctgaagactaacattttgtgaagttgtaaaacagaaaacctgttagaaatgtggtggtttcagcaaggcctcagtttccttccttcagcccttgtaatttggacatctgctgctttcatattttcatacattactgcagtaacactccaccatatagacccggctttaccttatatcagtgacactggtacagtagctccagaaaaatgcttatttggggcaatgctaaatattgcggcagttttatagtaaacgtttactacttaattaaagtgaaaacaaccctttttgctgcacatgtaagtggagctgtgcttacctttggtatgggctcattatatatgtttgttcagaccatcctttcctaccaaatgcagcccaaaatccatggcaaacaagtcttctggatcagactgttgttggttatctggtgtggagtaagtgcacttagcatgctgacttgctcatcagttttgcacagtggcaattttgggactgatttagaacagaaactccattggaaccccgaggacaaaggttatgtgcttcacatgatcactactgcagcagaatggtctatgtcattttccttctttggttttttcctgacttacattcgtgattttcagaaaatttctttacgggtggaagccaatttacatggattaaccctctatgacactg

SEQ ID NO: 127594 - DNA, 906 bp, Homo sapiens
  Payload ID: 4972
  Gene Symbol: DDIT3
  Gene Name: DNA-damage-inducible transcript 3
  Uniprot ID: P35638
  ENST ID: ENST00000346473
  CDS Start-End: 181-690
gaggtcagagacttaagtctaaggcactgagcgtatcatgttaaagatgagcgggtggcagcgacagagccaaaatcagagctggaacctgaggagagagtgttcaagaaggaagtgtatcttcatacatcaccacacctgaaagcagatgtgcttttccagactgatccaactgcagagatggcagctgagtcattgcctttctccttcgggacactgtccagctgggagctggaagcctggtatgaggacctgcaagaggtcctgtcttcagatgaaaatgggggtacctatgtttcacctcctggaaatgaagaggaagaatcaaaaatcttcaccactcttgaccctgcttctctggcttggctgactgaggaggagccagaaccagcagaggtcacaagcacctcccagagccctcactctccagattccagtcagagctccctggctcaggaggaagaggaggaagaccaagggagaaccaggaaacggaaacagagtggtcattccccagcccgggctggaaagcagcgcatgaaggagaaagaacaggagaatgaaaggaaagtggcacagctagctgaagagaatgaacggctcaagcaggaaatcgagcgcctgaccagggaagtagaggcgactcgccgagctctgattgaccgaatggtgaatctgcaccaagcatgaacaattgggagcatcagtcccccacttgggccacactacccacctttcccagaagtggctactgactaccctctcactagtgccaatgatgtgaccctcaatcccacatacgcagggggaaggcttggagtagacaaaaggaaaggtctcagcttgtatatagagattgtacatttatttattactgtccctatctattaaagtgactttctatga

SEQ ID NO: 127595 - DNA, 872 bp, Homo sapiens
  Payload ID: 4972
  Gene Symbol: DDIT3
  Gene Name: DNA-damage-inducible transcript 3
  Uniprot ID: P35638
  ENST ID: ENST00000547303
  CDS Start-End: 142-651
actgagcgtatcatgttaaagatgagcgggtggcagcgacagagccaaaatcagagctggaacctgaggagagagtgttcaagaaggaagtgtatcttcatacatcaccacacctgaaagcagactgatccaactgcagagatggcagctgagtcattgcctttctccttcgggacactgtccagctgggagctggaagcctggtatgaggacctgcaagaggtcctgtcttcagatgaaaatgggggtacctatgtttcacctcctggaaatgaagaggaagaatcaaaaatcttcaccactcttgaccctgcttctctggcttggctgactgaggaggagccagaaccagcagaggtcacaagcacctcccagagccctcactctccagattccagtcagagctccctggctcaggaggaagaggaggaagaccaagggagaaccaggaaacggaaacagagtggtcattccccagcccgggctggaaagcagcgcatgaaggagaaagaacaggagaatgaaaggaaagtggcacagctagctgaagagaatgaacggctcaagcaggaaatcgagcgcctgaccagggaagtagaggcgactcgccgagctctgattgaccgaatggtgaatctgcaccaagcatgaacaattgggagcatcagtcccccacttgggccacactacccacctttcccagaagtggctactgactaccctctcactagtgccaatgatgtgaccctcaatcccacatacgcagggggaaggcttggagtagacaaaaggaaaggtctcagcttgtatatagagattgtacatttatttattactgtccctatctattaaagtgactttctatgagccaa

SEQ ID NO: 127596 - DNA, 644 bp, Homo sapiens
  Payload ID: 4972
  Gene Symbol: DDIT3
  Gene Name: DNA-damage-inducible transcript 3
  ENST ID: ENST00000547526
  CDS Start-End: 210-644
agagacttaagtctaaggcactgagcgtatcatgttaaagatgagcgggtggcagcgacagagccaaaatcagagctggaacctgaggagagagtgttcaagaaggaagtgtatcttcatacatcaccacacctgaaagcagtacaactttacctacaaaaacaggcatcagaccagcttgccaacttgtggcatagactgtttgctacatggagcttgttccagccactccccattatcctgcagatgtgcttttccagactgatccaactgcagagatggcagctgagtcattgcctttctccttcgggacactgtccagctgggagctggaagcctggtatgaggacctgcaagaggtcctgtcttcagatgaaaatgggggtacctatgtttcacctcctggaaatgaagaggaagaatcaaaaatcttcaccactcttgaccctgcttctctggcttggctgactgaggaggagccagaaccagcagaggtcacaagcacctcccagagccctcactctccagattccagtcagagctccctggctcaggaggaagaggaggaagaccaagggagaaccaggaaacggaaacagagtggtcattccccagcccgggctggaaagcagcgcatgaaggag

SEQ ID NO: 127597 - DNA, 951 bp, Homo sapiens
  Payload ID: 4972
  Gene Symbol: DDIT3
  Gene Name: DNA-damage-inducible transcript 3
  Uniprot ID: P35638
  ENST ID: ENST00000552740
  CDS Start-End: 373-951
agagacttaagtctaaggcactgagcgtatcatgttaaagatgagcgggtggcagcgacagagccaaaatcagagctggaacctgaggagagagtgttcaagaaggaagtgtatcttcatacatcaccacacctgaaagcaggtaaacttaacctacccttttccaaaaattttaaacggcaggacagtaaatattttagatgttaaaagtcctatagtctctagcgtgactcttcatctctgccactgtagcaccaaagcagccataaacaatatgtaaataaacagatgtggctgtattccagtacaactttacctacaaaaacaggcatcagaccagcttgccaacttgtggcatagactgtttgctacatggagcttgttccagccactccccattatcctgcagatgtgcttttccagactgatccaactgcagagatggcagctgagtcattgcctttctccttcgggacactgtccagctgggagctggaagcctggtatgaggacctgcaagaggtcctgtcttcagatgaaaatgggggtacctatgtttcacctcctggaaatgaagaggaagaatcaaaaatcttcaccactcttgaccctgcttctctggcttggctgactgaggaggagccagaaccagcagaggtcacaagcacctcccagagccctcactctccagattccagtcagagctccctggctcaggaggaagaggaggaagaccaagggagaaccaggaaacggaaacagagtggtcattccccagcccgggctggaaagcagcgcatgaaggagaaagaacaggagaatgaaaggaaagtggcacagctagctgaagagaatgaacggctcaagcaggaaatcgagcgcctgaccagggaagtagaggcgactcgccgagctctgattgaccgaatggtgaatctgcaccaagcatga

SEQ ID NO: 127598 - DNA, 1067 bp, Homo sapiens
  Payload ID: 4972
  Gene Symbol: DDIT3
  Gene Name: DNA-damage-inducible transcript 3
  Uniprot ID: P35638
  ENST ID: ENST00000551116
  CDS Start-End: 269-847
gaggtcagagacttaagtctaaggcactgagcgtatcatgttaaagatgagcgggtggcagcgacagagccaaaatcagagctggaacctgaggagagagtgttcaagaaggaagtgtatcttcatacatcaccacacctgaaagcagcaccaaagcagccataaacaatatgtaaataaacagatgtggctgtattccagtacaactttacctacaaaaacaggcatcagaccagcttgccaacttgtggcatagactgtttgctacatggagcttgttccagccactccccattatcctgcagatgtgcttttccagactgatccaactgcagagatggcagctgagtcattgcctttctccttcgggacactgtccagctgggagctggaagcctggtatgaggacctgcaagaggtcctgtcttcagatgaaaatgggggtacctatgtttcacctcctggaaatgaagaggaagaatcaaaaatcttcaccactcttgaccctgcttctctggcttggctgactgaggaggagccagaaccagcagaggtcacaagcacctcccagagccctcactctccagattccagtcagagctccctggctcaggaggaagaggaggaagaccaagggagaaccaggaaacggaaacagagtggtcattccccagcccgggctggaaagcagcgcatgaaggagaaagaacaggagaatgaaaggaaagtggcacagctagctgaagagaatgaacggctcaagcaggaaatcgagcgcctgaccagggaagtagaggcgactcgccgagctctgattgaccgaatggtgaatctgcaccaagcatgaacaattgggagcatcagtcccccacttgggccacactacccacctttcccagaagtggctactgactaccctctcactagtgccaatgatgtgaccctcaatcccacatacgcagggggaaggcttggagtagacaaaaggaaaggtctcagcttgtatatagagattgtacatttatttattactgtccctatctattaaagtgactttctatgagcca

SEQ ID NO: 127599 - DNA, 895 bp, Homo sapiens
  Payload ID: 4972
  Gene Symbol: DDIT3
  Gene Name: DNA-damage-inducible transcript 3
  ENST ID: ENST00000618206
  CDS Start-End: 175-681
agagacttaagtctaaggcactgagcgtatcatgttaaagatgagcgggtggcagcgacagagccaaaatcagagctggaacctgaggagagagtgttcaagaaggaagtgtatcttcatacatcaccacacctgaaagcagatgtgcttttccagactgatccaactgcagagatggcagctgagtcattgcctttctcctcggacactgtcagctgggagctggaagcctggtatgaggacctgcaagaggtcctgtcttcagatgaaaatgggggtacctatgtttcacctcctggaaatgaagaggaagaatcaaaaatcttcaccactcttgaccctgcttctctggcttggctgactgaggaggagccagaaccagcagaggtcacaagcacctcccagagccctcactctccagattccagtcagagctccctggctcaggaggaagaggaggaagaccaagggagaaccaggaaacggaaacagagtggtcattccccagcccgggctggaaagcagcgcatgaaggagaaagaacaggagaatgaaaggaaagtggcacagctagctgaagagaatgaacggctcaagcaggaaatcgagcgcctgaccagggaagtagaggcgactcgccgagctctgattgaccgaatggtgaatctgcaccaagcatgaacaattgggagcatcagtcccccacttgggccacactacccacctttcccagaagtggctactgactaccctctcactagtgccaatgatgtgaccctcaatcccacatacgcagggggaaggcttggagtagacaaaaggaaaggtctcagcttgtatatagagattgtacatttatttattactgtccctatctattaaagtgactttctat

SEQ ID NO: 127600 - DNA, 1748 bp, Homo sapiens
  Payload ID: 4973
  Gene Symbol: DDIT4
  Gene Name: DNA-damage-inducible transcript 4
  Uniprot ID: Q9NX09
  ENST ID: ENST00000307365
  CDS Start-End: 202-900
gggcgcagcaggccaagggggaggtgcgagcgtggacctgggacgggtctgggcggctctcggtggttggcacgggttcgcacacccattcaagcggcaggacgcacttgtcttagcagttctcgctgaccgcgctagctgcggcttctacgctccggcactctgagttcatcagcaaacgccctggcgtctgtcctcaccatgcctagcctttgggaccgcttctcgtcgtcgtccacctcctcttcgccctcgtccttgccccgaactcccaccccagatcggccgccgcgctcagcctgggggtcggcgacccgggaggaggggtttgaccgctccacgagcctggagagctcggactgcgagtccctggacagcagcaacagtggcttcgggccggaggaagacacggcttacctggatggggtgtcgttgcccgacttcgagctgctcagtgaccctgaggatgaacacttgtgtgccaacctgatgcagctgctgcaggagagcctggcccaggcgcggctgggctctcgacgccctgcgcgcctgctgatgcctagccagttggtaagccaggtgggcaaagaactactgcgcctggcctacagcgagccgtgcggcctgcggggggcgctgctggacgtctgcgtggagcagggcaagagctgccacagcgtgggccagctggcactcgaccccagcctggtgcccaccttccagctgaccctcgtgctgcgcctggactcacgactctggcccaagatccaggggctgtttagctccgccaactctcccttcctccctggcttcagccagtccctgacgctgagcactggcttccgagtcatcaagaagaagctgtacagctcggaacagctgctcattgaggagtgttgaacttcaacctgagggggccgacagtgccctccaagacagagacgactgaacttttggggtggagactagaggcaggagctgagggactgattcctgtggttggaaaactgaggcagccacctaaggtggaggtgggggaatagtgtttcccaggaagctcattgagttgtgtgcgggtggctgtgcattggggacacatacccctcagtactgtagcatgaaacaaaggcttaggggccaacaaggcttccagctggatgtgtgtgtagcatgtaccttattatttttgttactgacagttaacagtggtgtgacatccagagagcagctgggctgctcccgccccagcccggcccagggtgaaggaagaggcacgtgctcctcagagcagccggagggaggggggaggtcggaggtcgtggaggtggtttgtgtatcttactggtctgaagggaccaagtgtgtttgttgtttgttttgtatcttgtttttctgatcggagcatcactactgacctgttgtaggcagctatcttacagacgcatgaatgtaagagtaggaaggggtgggtgtcagggatcacttgggatctttgacacttgaaaaattacacctggcagctgcgtttaagccttcccccatcgtgtactgcagagttgagctggcaggggaggggctgagagggtgggggctggaacccctccccgggaggagtgccatctgggtcttccatctagaactgtttacatgaagataagatactcactgttcatgaatacacttgatgttcaagtattaagacctatgcaatattttttacttttctaataaacatgtttgttaaaaca

SEQ ID NO: 127601 - DNA, 2604 bp, Homo sapiens
  Payload ID: 4974
  Gene Symbol: DDIT4L
  Gene Name: DNA-damage-inducible transcript 4-like
  Uniprot ID: Q96D03
  ENST ID: ENST00000273990
  CDS Start-End: 216-797
gctactgcgaggagccggcgcagggtggcccgggaggggtgagcagggtgccgctggctgctggggtctgcaggtcaccgagtccccaggagaggggactcctaagaagccacctgcctgtgtttacccggcagcgagcgcgcaggcccccgcgaactcctggcagcgctcaggaaaggccgttgcgcctcgcgaaggaaacagagccgttgaccatggttgcaactggcagtttgagcagcaagaacccggccagcatttcagaattgctggactgtggctatcacccagagagcctgctaagtgattttgactactgggattatgttgttcctgaacccaacctcaacgaggtaatatttgaggaatcaacttgccagaatttggttaaaatgctggagaactgtctgtccaaatcaaagcaaactaaacttggttgctcaaaggtccttgtccctgagaaactgacccagagaattgctcaagatgtcctgcggctttcctcaacggagccctgcggcttgcgaggttgtgttatgcacgtgaacttggaaattgaaaatgtatgtaaaaagctggataggattgtgtgtgattctagcgtcgtacctacttttgagcttacacttgtgtttaagcaggagaactgctcatggactagcttcagggactttttctttagtagaggtcgcttctcctctggtttcaggagaactctgatcctcagctcaggatttcgacttgttaagaaaaaactttactcactgattggaacaacagtgattgaagggtcctaaaaagggaaaatatataaagattatttcatgattgggtagtaaaactattcagctagtcagctaaagtcatttgtagtttgccccacctgccctaaataagaaaccccaaatgtagtctcttttctttctgtgtttcacattcatagcaactgcagctaacaggctgattttctggcctttggagaagtgattcaaaatagtgtagattttctgcatagatcccatttttgtacagaattgaatgggatggaataggtaagcaaaagtagaagcccatttgagttttacatttgattccacaatttggtttcaggtaggcttggtaatagactatataaaccagatttgcctattttgattttcatatggcttttttttctgtaagttttcagaggattttttaaatcacagaatcatactaaatgatatttagcctatcaaaacttccaaaagcccacaccaccagttcctgactcaaatttgaagggtttttagacaggagggtaggattaagtaggtgagtttaattaaagcttaaccctaggtaagagtaaatgagaaatattacggcaataatggaactgcttcactgtttcttggtgacttcctcactctaatgttttaaagaggcaacaaaagcttgtggtgccatttcagtaaccacggtgttgttttagatgcctttataagctcagtttcccctgttcttaagtgttgaatactgtctttaaactagaaaaatgcaaaatattgaactgatatttttgtgtgtagttgattactcttccattgagtgaatgatgaatacctgtgaggataggaaattagttctgagatctagtccctctctgattcacttagtaatctatcctcttttcagtattacatgtgcttaatctcagatgaaccatttcaccatggcagtgttatctcatctctgggcttttctgggaattgaagtatctctccttaaccccaattgtcaagggtagtagctgtatactaccactttgaattattgaaacgggtcaatttacgaagtctgcattggctatggagatatggtttatagtacagcctagagaatgaaactcaccgtccagataaccatgcatgcacccagattttttccaccttggatacctgtcactagggaataataaaggcctgattttttgtcttattccaactaagtagatcattatctctttccttttttatgttaatgagagaatttagcctccactcaacaatgttcaattcagcaaggctttcatatccttgctgtgggtcgtggataaggagcttattcaggtttcctgccctagctattagctccacttcacatgctggagaccggcgtagggacagatgtattcatcctggtgttactgaaaaacaggtgtgatcctgttactgatactataagtgacctaaaatgtcactgttcaaattagccagtgttctaacaaactaaactcttcaaatgcttggaaagatactacaaagccaatctttatagaattgggccaagataaatctatgttgttttgcatggctattgttaagctccaaaggttcactgtgtttctgccgctgtcctggagttgtcaccactgactgggcaaggcttcttgggcatggatgtagaactgttgtccttttcccactaacagttatctttgactctcttgcctgttatgcttacaaaatggtgatggcttatggaaggctgttaaattaatattcctgttaaaggaaattaaagtttgtctatttttgacaataaaacattatatatttttaa

SEQ ID NO: 127602 - DNA, 553 bp, Homo sapiens
  Payload ID: 4974
  Gene Symbol: DDIT4L
  Gene Name: DNA-damage-inducible transcript 4-like
  ENST ID: ENST00000513992
  CDS Start-End: 170-553
gagtgtgaaagcgcggacgctcggggaggggtcgcactgaacaatcaggttcaggctttgacgagtcgtgcacccggaattgcggtcccagtggcccgagatctaccctggaagcaacagcgctcaggaaaggccgttgcgcctcgcgaaggaaacagagccgttgaccatggttgcaactggcagtttgagcagcaagaacccggccagcatttcagaattgctggactgtggctatcacccagagagcctgctaagtgattttgactactgggattatgttgttcctgaacccaacctcaacgaggtaatatttgaggaatcaacttgccagaatttggttaaaatgctggagaactgtctgtccaaatcaaagcaaactaaacttggttgctcaaaggtccttgtccctgagaaactgacccagagaattgctcaagatgtcctgcggctttcctcaacggagccctgcggcttgcgaggttgtgttatgcacgtgaacttggaaattgaaaatgtatgtaaaaagctggataggattgtgtgtgattct

SEQ ID NO: 127603 - DNA, 852 bp, Homo sapiens
  Payload ID: 4974
  Gene Symbol: DDIT4L
  Gene Name: DNA-damage-inducible transcript 4-like
  ENST ID: ENST00000502763
  CDS Start-End: 322-852
aggtgagcgaagctgcggccttggtgggggcagcggggccggggggcgctccgcggggcaggtcgcttccaagttttgcgaactgttgagttagtttcaggttgcggctccgctcccagggctttgtcaaattgagttgcagaggccggttccacccctttggcaaaggagttcctccgctagttcgctcccgggacgccgggcattttaggagcctctgcacgactcgcctgcttttgcaaatccgtctcttctcgcctcattttttccagcgctcaggaaaggccgttgcgcctcgcgaaggaaacagagccgttgaccatggttgcaactggcagtttgagcagcaagaacccggccagcatttcagaattgctggactgtggctatcacccagagagcctgctaagtgattttgactactgggattatgttgttcctgaacccaacctcaacgaggtaatatttgaggaatcaacttgccagaatttggttaaaatgctggagaactgtctgtccaaatcaaagcaaactaaacttggttgctcaaaggtccttgtccctgagaaactgacccagagaattgctcaagatgtcctgcggctttcctcaacggagccctgcggcttgcgaggttgtgttatgcacgtgaacttggaaattgaaaatgtatgtaaaaagctggataggattgtgtgtgattctagcgtcgtacctacttttgagcttacacttgtgtttaagcaggagaactgctcatggactagcttcagggactttttctttagtagaggtcgcttctcctctggtttcaggagaactctgatcctcagctcaggatttcgacttgtt

SEQ ID NO: 127604 - DNA, 1598 bp, Homo sapiens
  Payload ID: 4975
  Gene Symbol:
  Gene Name: DNA-directed RNA polymerase II subunit RPB11-b1 [Source:UniProtKB/Swiss-Prot Acc:Q9GZM3]
  Uniprot ID: Q9GZM3
  ENST ID: ENST00000476151
  CDS Start-End: 41-388
tggcggacacttggggtctggacgcaacggcggcgggagcatgaacgcccctccagccttcgagtcgttcttgctcttcgagggcgagaagatcaccattaacaaggacaccaaggtacccaaggcctgcttattcaccatcaacaaagaagaccacacactgggaaacatcattaaatcacaactcctaaaagacccgcaagtgctatttgctggctacaaagtcccccaccccttggagcacaagatcatcatccgagtgcagaccacgccggactacagcccccaggaagcctttaccaacgccatcaccgacctcatcagtgagctgtccctgctggaggagcgcttccggacgtgcctgcttccccttcgccttctgccgtgattgtcagtttcctgaggcctccccagccacgcttcctgtacagcctgcagaactctgccccagagcacatcagctatgtgccccagctctcaaacgacaccttggcggggaggctcaccctgtccaccttcacgctggagcagcctctaggccagttcagcagccacaacatctctgacttggataccatctggctggtggtggccctcagcaacgccacccagagcttcacggccccacggacaaaccaggacatccctgctcctgccaacttctcccagaggggctactatctcacactgagggccaaccgggtgctgtaccagaccagaggccagctccatgtcctccgcgtcggcaatgatacccactgccaaccaacaaaaattggctgcaaccatcccctaccaggacccggcccctacagggtgaagttcctggtgatgaatgacgaaggacccgtggctgaaaccaagtggtccagcgacactcgcctgcagcaagcccaggcacttcgggctgtccccggcccccagagcccgggcaccgtggtcatcatcgccatcctgtctatcctcctggccgtcctcctcacggtcctcctggctgtgctcatatacacctgcttcaacagctgcaggagcacttccctatcaggcccagaggaggcagggagtgtgagaagatacaccacgcacctcgcgttcagcactcctgccgagggggcttcctgaggggttccagaggggcccacgtgtccctccacctcctccctggcccaggctgcagagcctgagctgggacacgccctgaagcttctggaccctgagagagattgtttcttttctttactatttttttttttttttttttgagacggagtctcactctgtcgccaggctggcgcgatcttggctcactgcaacctctgcctcacgggttcaagcgattttcctgcttcagcctcctgagtagctgggactacaggcacacgccaccatgcccagctcatttttgtatttttagtagagatggggtttcaccatgttggccaggatggcctccatctcttgaccttgtgatccgcccgactcggcctcccaaaatgctgggattacaggcgtgagccatcaagtctggcgagagagattgtttctagatgagggtgggggcgggtgtccttagcccaaagcttgtgccagtctctatc

SEQ ID NO: 127605 - DNA, 2381 bp, Homo sapiens
  Payload ID: 4976
  Gene Symbol: DNAJA1
  Gene Name: DnaJ (Hsp40) homolog, subfamily A, member 1
  Uniprot ID: P31689
  ENST ID: ENST00000330899
  CDS Start-End: 184-1377
ggacttccggcgggtgacgcgcccgggttcggctacaaaagaggacggctgcggcgcgccgggcggaactttccagaacgctcggtgagaggcggaggagcggtaactaccccggctgcgcacagctcggcgctccttcccgctccctcacacaccggcctcagcccgcaccggcagtagaagatggtgaaagaaacaacttactacgatgttttgggggtcaaacccaatgctactcaggaagaattgaaaaaggcttataggaaactggctttgaagtaccatcctgataagaacccaaatgaaggagagaagtttaaacagatttctcaagcttacgaagttctctctgatgcaaagaaaagggaattatatgacaaaggaggagaacaggcaattaaagagggtggagcaggtggcggttttggctcccccatggacatctttgatatgttttttggaggaggaggaaggatgcagagagaaaggagaggtaaaaatgttgtacatcagctctcagtaaccctagaagacttatataatggtgcaacaagaaaactggctctgcaaaagaatgtgatttgtgacaaatgtgaaggtagaggaggtaagaaaggagcagtagagtgctgtcccaattgccgaggtactggaatgcaaataagaattcatcagataggacctggaatggttcagcaaattcagtctgtgtgcatggagtgccagggccatggggagcggatcagtcctaaagatagatgtaaaagctgcaacggaaggaagatagttcgagagaagaaaattttagaagttcatattgacaaaggcatgaaagatggccagaagataacattccatggtgaaggagaccaagaaccaggactggagccaggcgatattatcattgtgttagatcagaaggaccatgctgtttttactcgacgaggagaagaccttttcatgtgtatggacatacagctcgttgaagcactgtgtggcttccagaagccaatatctactcttgacaaccgaaccatcgtcatcacctctcatccaggtcagattgtcaagcatggagatatcaagtgtgtactaaatgaaggcatgccaatttatcgtagaccatatgaaaagggtcgcctaatcatcgaatttaaggtaaactttcctgagaatggctttctctctcctgataaactgtctttgctggaaaaactcctacccgagaggaaggaagtggaagagactgatgagatggaccaagtagaactggtggactttgatccaaatcaggaaagacggcgccactacaatggagaagcatatgaggatgatgaacatcatcccagaggtggtgttcagtgtcagacctcttaatgggccagtgaataacactcactgctggcatttaatgtgcagtagtgaatgagtgaaggactgtaatcataatatgctcactacttgctcttgtttttgttttaataaactatagtagtgttttaaaaagttaaatgaagaataaacgcaaatataaaagctctgattttgccctgtatgtatgatgacttcagtgtgcaagatgaagtttaatacctgtaaaaactacaaagaagttcccctagcatttctaggccaaaccttgtaattgacttcagctatgtacgtggacaagcttagactgaaatgctaggtatatgtattggcttcagtgtatgacccttcattgttaagctatgaaagtaaaactctgtatttaactggcaatgaggaaaaaaaaattttgtagagaagtgttggtctgtatagttctttatattaagtgggattcattgtaatgcctctgcatttattctgttgcctcagctgttacttgaagatggcgtaatatataatttatcctgtggtatcagtgataaaaatgatacctttctgtaggaggggtttatcataatatgctgcttcttgaaggcttgcacttccagaattgtgtttccttctgctgtgccattcatatatatatacatatatatatataatcttgaccagtcctggtcatttgctcccctccttgtctgtggaccatgataagcccaagtagtgacttcagagctgggtaacagaaattaaagtgaaaagacctttacgtggagaatttgcatgcgtaatataggaaggtgttctttaggtatgttacaggattactttaaaccatttgactttcgctccaaagttatgttggtagtatagcaaattatgatgaatagctttaattgtatgtttaaaagtctcatatgttcacatgcttaaatctgggtatcagaatttaagcaattcttgaaatgtattgtctccttaatatactaattacaaagcatctccaa

SEQ ID NO: 127606 - DNA, 3122 bp, Homo sapiens
  Payload ID: 4977
  Gene Symbol: DNAJA2
  Gene Name: DnaJ (Hsp40) homolog, subfamily A, member 2
  Uniprot ID: O60884
  ENST ID: ENST00000317089
  CDS Start-End: 217-1455
aatacttcgaccccagtggccgcgcctcgggcgctcgggggcgggctctgcacagcgacgtcacggcgcaccgtgcgctgggtcaaagttcagccccgcccccgcttccccctcgctgtctccctcggcctgtgccgccgccgacgccgcttgtgggcccgactccgctctgtctgcttcgccaccttctccccgagcactgcccggccggccgccatggctaacgtggctgacacgaagctgtacgacatcctgggcgtcccgcccggcgccagcgagaacgagctgaagaaggcatacagaaagttagccaaggaatatcatcctgataagaatccaaatgcaggagacaaatttaaagaaataagttttgcatatgaagtactatcaaatcctgagaagcgtgagttatatgacagatacggagagcaaggtcttcgggaaggcagcggcggaggtggtggcatggatgatattttctctcacatttttggtgggggattgttcggcttcatgggcaatcagagtagaagtcgaaatggcagaagaagaggagaggacatgatgcatccactcaaagtatctttagaagatctgtataatggcaagacaaccaaactacaacttagcaagaatgtgctctgtagtgcatgcagtggccaaggcggaaagtctggagctgtccaaaagtgtagtgcttgtcgaggtcgaggtgtgcgcatcatgatcagacagctggctccagggatggtacaacagatgcagtctgtgtgctctgattgtaatggagaaggagaggtaattaatgaaaaagaccgctgtaaaaaatgtgaagggaagaaggtgattaaagaagtcaagattcttgaagtccacgtagacaaaggcatgaaacatggacagagaattacattcactggggaagcagaccaggccccaggagtggaacccggagacattgttcttttgctacaggagaaagaacatgaggtatttcagagagatgggaatgatttgcacatgacatataaaataggacttgttgaagctctatgtggatttcagttcacatttaagcaccttgatggacgtcagattgtggtgaaatacccccctggcaaagtaattgaaccagggtgtgttcgtgtagttcgaggtgaagggatgccgcagtatcgtaatccctttgaaaaaggtgatctttacataaagtttgatgtgcagtttcctgaaaacaactggatcaacccagacaagctttctgaactagaagatcttctgccatctagaccggaagttcctaacataattggagaaacagaggaggtagagcttcaggaatttgatagcactcgaggctcaggaggtggtcagaggcgtgaagcctataatgatagctctgatgaagaaagcagcagccatcatggacctggagtgcagtgtgcccatcagtaaactctgcaaacaaattgcacaggtggattttctttccacatttgcctgatttgttctcagcaatccagctggagtgtcttatcaatccagatgaactgagggacatctgttggtctatgtataacttttaaaattggtatagtatctacagagtgtataatttaaactaaccacaaagctttacatcttcattttgactgttccatagcagaataaagcacttgaaaggaaacaagactccctttcacacatggattattataagtttcaatcctggtatctgtgcttgatttttatcagttttgtgtagatttttatgtttcatattttaaatttaaatcccacattgtaaagtttgtacaatttgtcctgaagctttgtgtttggctgcacctgcataagctgctacaaatagaataaagaatttcatagcctgtatctatcatttagatgcatggaaaaaaatgggctttgcacacaatgggtttggagctgactgggaacaatggaaaaaattacattagctgtggttgtaaagtttttttgtttttggttttgttttttttttcttttttctttttttttttttttaccatcttgtgaaaggtttctgaaactcgataataaaaagcggttggtgtaaattattcttttgtgtcacatttttagaaggaaaaacataaaagaatgtatccttagtactggttcttaaacagcccataaaaacccattggcctgaagcttatatctcaggcctatgcccatcttatagtcttggaagacaaaaggctggtagagacagtcttcagtggcttcagtgatgctctgtagaggccagggtgtcttgagtgctgtaactcccaagcactgggctagcctgacttctgtatctccctaccaccacccccttaaaaaaataaggtaacagcaaatctatagtaaaaccatgtctgcatagaacgtgttcaaatcctctgttttcattaaatgtaaaagatgctgtctccattaagttgaatatttggaattggagaagccattgattattattttgagtttctgtaatgttttatagaaaagtaagatgcttattcagaatttaagaatgaaggcaactgaaatatgcattgttgtagttatttatatttcaaactaaaaataagcaaaaaaaaaaggctggtttgagaaaaatcaggtaaaattgatgaaacggatgttgtgtttctctttccatcatctggtttttaccatttcactcagtaggtatttttagaacacacttatttgaggaaagagacatcagatgcacaattttacatttataaaggaacaaatggggaaaactgaaaactaaaaattttaaatgtattaaatgccatccctgagcctaaatctagtatttgtagtttatttctaggtctgctagaacctgaaaacctgaatgaaaaaaggtgtgctgacactaatcaagtcctgtgaggtttaaattattgacctatccactctacctccattgtacaaaaaatattttacaacaagcctgggtaagattcaacagcatagtagttttgtatccaaggttacttccccacaaccactttaaacataagaaatgtggtggcaatataaagtttgtagcctttccaataaaggtttataaaacagtt

SEQ ID NO: 127607 - DNA, 1825 bp, Homo sapiens
  Payload ID: 4977
  Gene Symbol: DNAJA2
  Gene Name: DnaJ (Hsp40) homolog, subfamily A, member 2
  ENST ID: ENST00000563158
  CDS Start-End: 93-236
tcggcctgtgccgccgccgacgccgcttgtgggcccgactccgctctgtctgcttcgccaccttctccccgagcactgcccggccggccgccatggctaacgtggctgacacgaagctgtacgacatcctgggcgtcccgcccggcgccagcgagaacgagctgaagaaggcatacagaaagttagccaaggaatatcatcctgataagaatccaaatgcaggagacaaaaattaaatggattctggattcctgtagcttctccccactcttctacttgaaaatgcaattatttttatttttaccttttctttatagtttaaagaaataagttttgcatatgaagtactatcaaatcctgagaagcgtgagttatatgacagatacggagagcaaggtcttcgggaaggcagcggcggaggtggtggcatggatgatattttctctcacatttttggtgggggattgttcggcttcatgggcaatcagagtagaagtcgaaatggcagaagaagaggagaggacatgatgcatccactcaaagtatctttagaagatctgtataatggcaagacaaccaaactacaacttagcaagaatgtgctctgtagtgcatgcagtggccaaggcggaaagtctggagctgtccaaaagtgtagtgcttgtcgaggtcgaggtgtgcgcatcatgatcagacagctggctccagggatggtacaacagatgcagtctgtgtgctctgattgtaatggagaaggagaggtaattaatgaaaaagaccgctgtaaaaaatgtgaagggaagaaggtgattaaagaagtcaagattcttgaagtccacgtagacaaaggcatgaaacatggacagagaattacattcactggggaagcagaccaggccccaggagtggaacccggagacattgttcttttgctacaggagaaagaacatgaggtatttcagagagatgggaatgatttgcacatgacatataaaataggacttgttgaagctctatgtggatttcagttcacatttaagcaccttgatggacgtcagattgtggtgaaatacccccctggcaaagtaattgaaccagggtgtgttcgtgtagttcgaggtgaagggatgccgcagtatcgtaatccctttgaaaaaggtgatctttacataaagtttgatgtgcagtttcctgaaaacaactggatcaacccagacaagctttctgaactagaagatcttctgccatctagaccggaagttcctaacataattggagaaacagaggaggtagagcttcaggaatttgatagcactcgaggctcaggaggtggtcagaggcgtgaagcctataatgatagctctgatgaagaaagcagcagccatcatggacctggagtgcagtgtgcccatcagtaaactctgcaaacaaattgcacaggtggattttctttccacatttgcctgatttgttctcagcaatccagctggagtgtcttatcaatccagatgaactgagggacatctgttggtctatgtataacttttaaaattggtatagtatctacagagtgtataatttaaactaaccacaaagctttacatcttcattttgactgttccatagcagaataaagcacttgaaaggaaacaagactccctttcacacatggattattataagtttcaatcctggtatctgtgcttgatttttatcagttttgtgtagatttttatgtttcatattttaaatttaaatcccacattgtaaagtttgtacaatttgtcctgaagctttgtgtttggctgcacctgcataagctgct

SEQ ID NO: 127608 - DNA, 1885 bp, Homo sapiens
  Payload ID: 4977
  Gene Symbol: DNAJA2
  Gene Name: DnaJ (Hsp40) homolog, subfamily A, member 2
  ENST ID: ENST00000617000
  CDS Start-End: 1483-1885
tctctgcgtccctcgcccattgacccggaggtagctgggtctgtgtttggatgcattgttctttgggcaggtaatgctaatgtcctgtacctgcttaggaataagccgtggtcccagccaaacgcctgagtgtacagtaaacataaatagaaggccttattattgctatttgcaatgctgcgatatctttcatctcaggatttcaaagcacacgaggcatttaagccccacagcatcctcaccaggctaagagcatccagatttgtaagccgagaaaaatgagaatgctccttaggcagtgagaagagtacagtggacttcctgttaccttaccggaaatgctagtctgtattatataattcacgagcctccgtgaatgaagatttaagtgctttaggacccaaacacctcgttgagagtgtgtgcaacttctctaccaccgaagttgccaccacgaccccagttaaccaccacgtgcaaataaaacaccaaaagacgctaactaggaccacctttactttttcatgatgttacagttagaaggaaggcgtgagccatcgggagcaggaattgtgactttagcttgatttatagtaatgttttgcagtccgcaaagcttaacagtcatttatctcgaatttattagggtcgtcttggtctggttacttggccatcaaagacacttgacaatagggaaaatatggataatgtttgaacgttttgtttttccctgtggcattgcttcattgttttatctggttttcacgtcactgtaacctgttttcaagtatagctgctgtctacttggttatattacattagtaaacagtatcgcgagaaagtgccgaagaatccctacgaatagaaaatatttttgaaaggttataactctagaacattacttctcagaaaagtggatattaagttattacaaaacttttaactggtgtttagttataaccttttttgtttttatccattttcaaaggcatacagaaagttagccaaggaatatcatcctgataagaatccaaatgcaggagacaaagtaagttatttgcaccttttttattccgggggttttagctttaacttaaattgccctccttgaaaaagaggaatgttgcaggaaaaaaatccaactatgcccacacagccacattttcataatgtcaagagtattttagttttagaataagagtactaccattctgaggagcggtgggtggtaaatagaaccagaatcaagtcaaaggtaacttgtccctttttttttttttttagaattaaatggattctggattcctgtagcttctccccactcttctacttgaaaatgcaattatttttatttttaccttttctttatagtttaaagaaataagttttgcatatgaagtactatcaaatcctgagaagcgtgagttatatgacagatacggagagcaaggtcttcgggaaggcagcggcggaggtggtggcatggatgatattttctctcacatttttggtgggggattgttcggcttcatgggcaatcagagtagaagtcgaaatggcagaagaagaggagaggacatgatgcatccactcaaagtatctttagaagatctgtataatggcaagacaaccaaactacaacttagcaagaatgtgctctgtagtgcatgcagtggccaaggcggaaagtctggagctgtccaaaagtgtagtgcttgtcgaggtcgaggtgtgcgcatcatgatcagacagctggctccagggatggtacaacagatgcagtctgtgtgctctgattgtaatggagaaggagaggtaattaatgaaaaagaccgctgtaaaaaatgtgaagggaagaaggtgattaaagaagtcaagattcttg

SEQ ID NO: 127609 - DNA, 2763 bp, Homo sapiens
  Payload ID: 4978
  Gene Symbol: DNAJA3
  Gene Name: DnaJ (Hsp40) homolog, subfamily A, member 3
  Uniprot ID: Q96EY1
  ENST ID: ENST00000262375
  CDS Start-End: 78-1520
cgcctctacgcgcgcccgccgttcccgcgaggcccacctagagccgggcggcgcaggcgcagagtccccgggccaagatggctgcgcggtgctccacacgctggttgctggtggttgtggggaccccgcggctgccggctatatcgggtagaggggcccggccgcccagggagggcgtggtgggggcatggctgagccgcaagctgagcgtccccgcctttgcgtcttccctgacctcttgcggcccccgagcgctgctgacattgagacctggtgtcagccttacaggaacaaaacataaccctttcatttgtactgcctccttccacacgagtgcccctttggccaaagaagattattatcagatattaggagtgcctcgaaatgccagccagaaagagatcaagaaagcctattatcagcttgccaagaagtatcaccctgacacaaataaggatgatcccaaagccaaggagaagttctcccagctggcagaagcctatgaggttttgagtgatgaggtgaagaggaagcagtacgatgcctacggctctgcaggcttcgatcctggggccagcggctcccagcatagctactggaagggaggccccactgtggaccccgaggagctgttcaggaagatctttggcgagttctcatcctcttcatttggagatttccagaccgtgtttgatcagcctcaggaatacttcatggagttgacattcaatcaagctgcaaagggggtcaacaaggagttcaccgtgaacatcatggacacgtgtgagcgctgcaacggcaaggggaacgagcccggcaccaaggtgcagcattgccactactgtggcggctccggcatggaaaccatcaacacaggcccttttgtgatgcgttccacgtgtaggagatgtggtggccgcggctccatcatcatatcgccctgtgtggtctgcaggggagcaggacaagccaagcagaaaaagcgagtgatgatccctgtgcctgcaggagtcgaggatggccagaccgtgaggatgcctgtgggaaaaagggaaattttcattacgttcagggtgcagaaaagccctgtgttccggagggacggcgcagacatccactccgacctctttatttctatagctcaggctcttcttgggggtacagccagagcccagggcctgtacgagacgatcaacgtgacgatcccccctgggactcagacagaccagaagattcggatgggtgggaaaggcatcccccggattaacagctacggctacggagaccactacatccacatcaagatacgagttccaaagaggctaacgagccggcagcagagcctgatcctgagctacgccgaggacgagacagatgtggaggggacggtgaacggcgtcaccctcaccagctctggtggcagcaccatggatagctccgcaggaagcaaggctaggcgtgaggctggggaggacgaggagggattcctttccaaacttaagaaaatgtttacctcatgatatcccagccgaggaaaaagatccactggaaactaggccgggaagcagcagcccctccaagggccagggcacctgggagacgggaggattccagaacagcagcactgagctcccacccgcagagcctctggacggccttggcaacagcaaaatcatgggacaacacctctctccacggaaaggtcacagtggacagcccgggcagtaggatgcagccccagaggctggtggcagtttcctgtccattggtaggtgacggcccctggctcaggcagagggagatggttagactcttgcagggctaaaactctaatttggaattgaatattgtggatatcttagttaaaggccatgcttacagcttagaaatgaagccttaagctgcatcaagttacgaagtgattaatttccttctcagcaaacctccgggaggttccagaatgagttcttcctgacaggttgtcttcactgggagcgtggggcccccaggccccaccagcaccgtcctcccctaatgaggggccctgccgaggcatcagctgctctgctcagttagtttttattcccggggtaccaagcagctgcacagtcggtgcctgggaggcacgtagaggcccagagagtccctgggggttctgctctgaccgtgtgggtggtgatccttgtcaggatgtacagtccttgctcccaccccatccgggatggccgcctgtccctgactattgagtcctgttgttgtaagccaggcatggagggctcctgcccttctgctgagccacagcccattgcagcactgtgctggccagacttcagctgccttgggaactgaagccctgccactgttgctagtcaggggcttggttctcccacttacactgttgacatctattttctgaagtgtgtttaaattattcagtgctaatcattgttttttcctttgtaaatgttgattcagaaaaggaaagcacaggctaagcagttgaaggttccccaccattcagtgagagcagaacccccattccccagcctctgctggtagcatgtcgcagtttccatgtgtttcaggatcttcgggctgtcgttagacaggttaatgaagaacacttctcaacagtttcctttttgttttcctttataattcactaaaataaagcatctattagtgtctgatttaggaatgtaaaatgattctgtattaatgtaaataagattatctattgcaaaaagatatttcaaacctaaa

SEQ ID NO: 127610 - DNA, 2591 bp, Homo sapiens
  Payload ID: 4978
  Gene Symbol: DNAJA3
  Gene Name: DnaJ (Hsp40) homolog, subfamily A, member 3
  Uniprot ID: Q96EY1
  ENST ID: ENST00000355296
  CDS Start-End: 23-1384
ggcgcagagtccccgggccaagatggctgcgcggtgctccacacgctggttgctggtggttgtggggaccccgcggctgccggctatatcgggtagaggggcccggccgcccagggagggcgtggtgggggcatggctgagccgcaagctgagcgtccccgcctttgcgtcttccctgacctcttgcggcccccgagcgctgctgacattgagacctggtgtcagccttacaggaacaaaacataaccctttcatttgtactgcctccttccacacgagtgcccctttggccaaagaagattattatcagatattaggagtgcctcgaaatgccagccagaaagagatcaagaaagcctattatcagcttgccaagaagtatcaccctgacacaaataaggatgatcccaaagccaaggagaagttctcccagctggcagaagcctatgaggttttgagtgatgaggtgaagaggaagcagtacgatgcctacggctctgcaggcttcgatcctggggccagcggctcccagcatagctactggaagggaggccccactgtggaccccgaggagctgttcaggaagatctttggcgagttctcatcctcttcatttggagatttccagaccgtgtttgatcagcctcaggaatacttcatggagttgacattcaatcaagctgcaaagggggtcaacaaggagttcaccgtgaacatcatggacacgtgtgagcgctgcaacggcaaggggaacgagcccggcaccaaggtgcagcattgccactactgtggcggctccggcatggaaaccatcaacacaggcccttttgtgatgcgttccacgtgtaggagatgtggtggccgcggctccatcatcatatcgccctgtgtggtctgcaggggagcaggacaagccaagcagaaaaagcgagtgatgatccctgtgcctgcaggagtcgaggatggccagaccgtgaggatgcctgtgggaaaaagggaaattttcattacgttcagggtgcagaaaagccctgtgttccggagggacggcgcagacatccactccgacctctttatttctatagctcaggctcttcttgggggtacagccagagcccagggcctgtacgagacgatcaacgtgacgatcccccctgggactcagacagaccagaagattcggatgggtgggaaaggcatcccccggattaacagctacggctacggagaccactacatccacatcaagatacgagttccaaagaggctaacgagccggcagcagagcctgatcctgagctacgccgaggacgagacagatgtggaggggacggtgaacggcgtcaccctcaccagctctggaaaaagatccactggaaactaggccgggaagcagcagcccctccaagggccagggcacctgggagacgggaggattccagaacagcagcactgagctcccacccgcagagcctctggacggccttggcaacagcaaaatcatgggacaacacctctctccacggaaaggtcacagtggacagcccgggcagtaggatgcagccccagaggctggtggcagtttcctgtccattggtaggtgacggcccctggctcaggcagagggagatggttagactcttgcagggctaaaactctaatttggaattgaatattgtggatatcttagttaaaggccatgcttacagcttagaaatgaagccttaagctgcatcaagttacgaagtgattaatttccttctcagcaaacctccgggaggttccagaatgagttcttcctgacaggttgtcttcactgggagcgtggggcccccaggccccaccagcaccgtcctcccctaatgaggggccctgccgaggcatcagctgctctgctcagttagtttttattcccggggtaccaagcagctgcacagtcggtgcctgggaggcacgtagaggcccagagagtccctgggggttctgctctgaccgtgtgggtggtgatccttgtcaggatgtacagtccttgctcccaccccatccgggatggccgcctgtccctgactattgagtcctgttgttgtaagccaggcatggagggctcctgcccttctgctgagccacagcccattgcagcactgtgctggccagacttcagctgccttgggaactgaagccctgccactgttgctagtcaggggcttggttctcccacttacactgttgacatctattttctgaagtgtgtttaaattattcagtgctaatcattgttttttcctttgtaaatgttgattcagaaaaggaaagcacaggctaagcagttgaaggttccccaccattcagtgagagcagaacccccattccccagcctctgctggtagcatgtcgcagtttccatgtgtttcaggatcttcgggctgtcgttagacaggttaatgaagaacacttctcaacagtttcctttttgttttcctttataattcactaaaataaagcatctattagtgtctgatttaggaatgtaaaatgattctgtattaatgtaaataagattatctattgcaaaaagatatttcaaacctaaa

SEQ ID NO: 127611 - DNA, 2294 bp, Homo sapiens
  Payload ID: 4978
  Gene Symbol: DNAJA3
  Gene Name: DnaJ (Hsp40) homolog, subfamily A, member 3
  Uniprot ID: Q96EY1
  ENST ID: ENST00000431375
  CDS Start-End: 188-1090
cgcctctacgcgcgcccgccgttcccgcgaggcccacctagagccgggcggcgcaggcgcagagtccccgggccaagatggctgcgcggtgctccacacgctggttgctggtggttgtggggaccccgcggctgccggctatatcgggtagaggggcccggccgcccagggagggcgtggtgggggcatggctgagccgcaagctgagcgtccccgcctttgcgtcttccctgacctcttgcggcccccgagcgctgctgacattgagacctggtgtcagccttacaggaagatctttggcgagttctcatcctcttcatttggagatttccagaccgtgtttgatcagcctcaggaatacttcatggagttgacattcaatcaagctgcaaagggggtcaacaaggagttcaccgtgaacatcatggacacgtgtgagcgctgcaacggcaaggggaacgagcccggcaccaaggtgcagcattgccactactgtggcggctccggcatggaaaccatcaacacaggcccttttgtgatgcgttccacgtgtaggagatgtggtggccgcggctccatcatcatatcgccctgtgtggtctgcaggggagcaggacaagccaagcagaaaaagcgagtgatgatccctgtgcctgcaggagtcgaggatggccagaccgtgaggatgcctgtgggaaaaagggaaattttcattacgttcagggtgcagaaaagccctgtgttccggagggacggcgcagacatccactccgacctctttatttctatagctcaggctcttcttgggggtacagccagagcccagggcctgtacgagacgatcaacgtgacgatcccccctgggactcagacagaccagaagattcggatgggtgggaaaggcatcccccggattaacagctacggctacggagaccactacatccacatcaagatacgagttccaaagaggctaacgagccggcagcagagcctgatcctgagctacgccgaggacgagacagatgtggaggggacggtgaacggcgtcaccctcaccagctctggaaaaagatccactggaaactaggccgggaagcagcagcccctccaagggccagggcacctgggagacgggaggattccagaacagcagcactgagctcccacccgcagagcctctggacggccttggcaacagcaaaatcatgggacaacacctctctccacggaaaggtcacagtggacagcccgggcagtaggatgcagccccagaggctggtggcagtttcctgtccattggtaggtgacggcccctggctcaggcagagggagatggttagactcttgcagggctaaaactctaatttggaattgaatattgtggatatcttagttaaaggccatgcttacagcttagaaatgaagccttaagctgcatcaagttacgaagtgattaatttccttctcagcaaacctccgggaggttccagaatgagttcttcctgacaggttgtcttcactgggagcgtggggcccccaggccccaccagcaccgtcctcccctaatgaggggccctgccgaggcatcagctgctctgctcagttagtttttattcccggggtaccaagcagctgcacagtcggtgcctgggaggcacgtagaggcccagagagtccctgggggttctgctctgaccgtgtgggtggtgatccttgtcaggatgtacagtccttgctcccaccccatccgggatggccgcctgtccctgactattgagtcctgttgttgtaagccaggcatggagggctcctgcccttctgctgagccacagcccattgcagcactgtgctggccagacttcagctgccttgggaactgaagccctgccactgttgctagtcaggggcttggttctcccacttacactgttgacatctattttctgaagtgtgtttaaattattcagtgctaatcattgttttttcctttgtaaatgttgattcagaaaaggaaagcacaggctaagcagttgaaggttccccaccattcagtgagagcagaacccccattccccagcctctgctggtagcatgtcgcagtttccatgtgtttcaggatcttcgggctgtcgttagacaggttaatgaagaacacttctcaacagtttcctttttgttttcctttataattcactaaaataaagcatctattagtgtctgatttaggaatgtaaaatgattctgtattaatgtaaataagattatctattgcaaaaagatatttcaaacct

SEQ ID NO: 127612 - DNA, 837 bp, Homo sapiens
  Payload ID: 4978
  Gene Symbol: DNAJA3
  Gene Name: DnaJ (Hsp40) homolog, subfamily A, member 3
  ENST ID: ENST00000575106
  CDS Start-End: 18-386
agagtccccgggccaagatggctgcgcggtgctccacacgctggttgctggtggttgtggggaccccgcggctgccggctatatcgggtagaggggcccggccgcccagggagggcgtggtgggggcatggctgagccgcaagctgagcgtccccgcctttgcgtcttccctgacctcttgcggcccccgagcgctgctgacattgagacctggtgtcagccttacaggtggagtcttgctctgtcgcccaggctggagtgcaatggcgcgatcttggctcactgcaacctcagcctcccaggaacaaaacataaccctttcatttgtactgcctccttccacacgagtgcccctttggccaaagaagattattatcagatattaggagtgcctcgaaatgccagccagaaagagatcaagaaagcctattatcagcttgccaagaagtatcaccctgacacaaataaggatgatcccaaagccaaggagaagttctcccagctggcagaagcctatgaggttttgagtgatgaggtgaagaggaagcagtacgatgcctacggctctgcaggcttcgatcctggggccagcggctcccagcatagctactggaagggaggccccactgtggaccccgaggagctgttcaggaagatctttggcgagttctcatcctcttcatttggagatttccagaccgtgtttgatcagcctcaggaatacttcatggagttgacattcaatcaagctgcaaagggggtcaacaaggagttcaccgtgaacatcatggacacgtgtgagcgctgcaacggcaaggggaacgagcccggcaccaa

SEQ ID NO: 127613 - DNA, 558 bp, Homo sapiens
  Payload ID: 4978
  Gene Symbol: DNAJA3
  Gene Name: DnaJ (Hsp40) homolog, subfamily A, member 3
  ENST ID: ENST00000574895
  CDS Start-End: 4-558
aagatggctgcgcggtgctccacacgctggttgctggtggttgtggggaccccgcggctgccggctatatcgggtagaggggcccggccgcccagggagggcgtggtgggggcatggctgagccgcaagctgagcgtccccgcctttgcgtcttccctgacctcttgcggcccccgagcgctgctgacattgagacctggtgtcagccttacaggaacaaaacataaccctttcatttgtactgcctccttccacacgagtgcccctttggccaaagaagattattatcagatattaggagtgcctcgaaatgccagccagaaagagatcaagaaagcctattatcagcttgccaagaagtatcaccctgacacaaataaggatgatcccaaagccaaggagaagttctcccagctggcagaagcctatgagtacttcatggagttgacattcaatcaagctgcaaagggggtcaacaaggagttcaccgtgaacatcatggacacgtgtgagcgctgcaacggcaaggggaacgagcccggcaccaaggtgcagcat

SEQ ID NO: 127614 - DNA, 1413 bp, Homo sapiens
  Payload ID: 4978
  Gene Symbol: DNAJA3
  Gene Name: DnaJ (Hsp40) homolog, subfamily A, member 3
  ENST ID: ENST00000576911
  CDS Start-End: 18-314
agagtccccgggccaagatggctgcgcggtgctccacacgctggttgctggtggttgtggggaccccgcggctgccggctatatcgggtagaggggcccggccgcccagggagggcgtggtgggggcatggctgagccgcaagctgagcgtccccgcctttgcgtcttccctgacctcttgcggcccccgagcgctgctgacattgagacctggtgtcagccttacaggaagatctttggcgagttctcatcctcttcatttggagatttccagaccgtgtttgatcagcctcaggaatacttcatggagttgacattcaatcaagctgcaaagggggtcaacaaggagttcaccgtgaacatcatggacacgtgtgagcgctgcaacggcaaggggaacgagcccggcaccaaggtgcagcattgccactactgtggcggctccggcatggaaaccatcaacacaggcccttttgtgatgcgttccacgtgtaggagatgtggtggccgcggctccatcatcatatcgccctgtgtggtctgcaggggagcaggacaagccaagcagaaaaagcgagtgatgatccctgtgcctgcaggagtcgaggatggccagaccgtgaggatgcctgtgggaaaaagggaaattttcattacgttcagggtgcagaaaagccctgtgttccggagggacggcgcagacatccactccgacctctttatttctatagctcaggctcttcttgggggtacagccagagcccagggcctgtacgagacgatcaacgtgacgatcccccctgggactcagacagaccagaagattcggatgggtgggaaaggcatcccccggattaacagctacggctacggagaccactacatccacatcaagatacgagttccaaagaggctaacgagccggcagcagagcctgatcctgagctacgccgaggacgagacagatgtggaggggacggtgaacggcgtcaccctcaccagctctggaaaaagatccactggaaactaggccgggaagcagcagcccctccaagggccagggcacctgggagacgggaggattccagaacagcagcactgagctcccacccgcagagcctctggacggccttggcaacagcaaaatcatgggacaacacctctctccacggaaaggtcacagtggacagcccgggcagtaggatgcagccccagaggctggtggcagtttcctgtccattggtaggtgacggcccctggctcaggcagagggagatggttagactcttgcagggctaaaactctaatttggaattgaatattgtggatatcttagttaaaggccatgcttacagcttagaaatgaagccttaagctgcatcaagttacgaagtgattaatttccttctcagc

SEQ ID NO: 127615 - DNA, 554 bp, Homo sapiens
  Payload ID: 4978
  Gene Symbol: DNAJA3
  Gene Name: DnaJ (Hsp40) homolog, subfamily A, member 3
  ENST ID: ENST00000570857
  CDS Start-End: 18-251
agagtccccgggccaagatggctgcgcggtgctccacacgctggttgctggtggttgtggggaccccgcggctgccggctatatcgggtagaggggcccggccgcccagggagggcgtggtgggggcatggctgagccgcaagctgagcgtccccgcctttgcgtcttccctgacctcttgcggcccccgagcgctgctgacattgagacctggtgtcagccttacagcttgccaagaagtatcaccctgacacaaataaggatgatcccaaagccaaggagaagttctcccagctggcagaagcctatgaggttttgagtgatgaggtgaagaggaagcagtacgatgcctacggctctgcaggcttcgatcctggggccagcggctcccagcatagctactggaagggaggccccactgtggaccccgaggagctgttcaggaagatctttggcgagttctcatcctcttcatttggagatttccagaccgtgtttgatcagcctcaggaatacttcatggagttgacattcaatcaagctgcaaagggggt

SEQ ID NO: 127616 - DNA, 2763 bp, Homo sapiens; identical to SEQ ID NO: 127609
  Payload ID: 4978
  Gene Symbol: DNAJA3
  Gene Name: DnaJ (Hsp40) homolog, subfamily A, member 3
  Uniprot ID: Q96EY1
  ENST ID: ENST00000612103
  CDS Start-End: 78-1520

SEQ ID NO: 127617 - DNA, 2591 bp, Homo sapiens; identical to SEQ ID NO: 127610
  Payload ID: 4978
  Gene Symbol: DNAJA3
  Gene Name: DnaJ (Hsp40) homolog, subfamily A, member 3
  Uniprot ID: Q96EY1
  ENST ID: ENST00000614397
  CDS Start-End: 23-1384

SEQ ID NO: 127618 - DNA, 1413 bp, Homo sapiens; identical to SEQ ID NO: 127614
  Payload ID: 4978
  Gene Symbol: DNAJA3
  Gene Name: DnaJ (Hsp40) homolog, subfamily A, member 3
  ENST ID: ENST00000615114
  CDS Start-End: 18-314

SEQ ID NO: 127619 - DNA, 558 bp, Homo sapiens; identical to SEQ ID NO: 127613
  Payload ID: 4978
  Gene Symbol: DNAJA3
  Gene Name: DnaJ (Hsp40) homolog, subfamily A, member 3
  ENST ID: ENST00000633931
  CDS Start-End: 4-558

SEQ ID NO: 127620 - DNA, 554 bp, Homo sapiens; identical to SEQ ID NO: 127615
  Payload ID: 4978
  Gene Symbol: DNAJA3
  Gene Name: DnaJ (Hsp40) homolog, subfamily A, member 3
  ENST ID: ENST00000631547
  CDS Start-End: 18-251

SEQ ID NO: 127621 - DNA, 837 bp, Homo sapiens; identical to SEQ ID NO: 127612
  Payload ID: 4978
  Gene Symbol: DNAJA3
  Gene Name: DnaJ (Hsp40) homolog, subfamily A, member 3
  ENST ID: ENST00000633082
  CDS Start-End: 18-386

SEQ ID NO: 127622 - DNA, 2961 bp, Homo sapiens
  Payload ID: 4979
  Gene Symbol: DNAJA4
  Gene Name: DnaJ (Hsp40) homolog, subfamily A, member 4
  Uniprot ID: Q8WW22
  ENST ID: ENST00000343789
  CDS Start-End: 32-1225
agtgcggtggagccaggcgtggaaacacaagatggtgaaggagacccagtactatgacatcctgggcgtgaagcccagcgcgtccccggaggagatcaagaaggcctatcggaagctggcgctcaagtaccacccggacaagaacccggatgagggcgagaagtttaaactcatatcccaggcatatgaagtgctttcagatccaaagaaaagggatgtttatgaccaaggcggagagcaggcaattaaagaaggaggctcaggcagccccagcttctcttcacccatggacatctttgacatgttctttggtggtggtggacggatggctagagagagaagaggcaagaatgttgtacaccagttatctgtaactcttgaagatctatataatggagtcacgaagaaattggccctccagaaaaatgtaatttgtgagaaatgtgaaggtgttggtgggaagaagggatcggtggagaagtgcccgctgtgcaaggggcgggggatgcagatccacatccagcagatcgggccgggcatggtacagcagatccagaccgtgtgcatcgagtgcaagggccagggtgagcgcatcaaccccaaggaccgctgcgagagctgcagcggggccaaggtgatccgtgagaagaagattatcgaggtacatgttgaaaaaggtatgaaagatgggcaaaagatactatttcatggagaaggagatcaggagcctgagctggagcctggtgatgtcataattgtgcttgatcagaaggatcatagtgtctttcagagacgaggccatgacttgatcatgaaaatgaaaattcagctttctgaagctctttgtggcttcaagaagacgataaaaacattggacaatcgaattcttgttattacatccaaagcaggtgaggtgataaagcacggggacctgagatgcgtgcgcgatgaaggaatgcccatctacaaagcacccctggaaaaagggattctgatcatacagtttttagtaatctttcctgaaaaacactggctttctctggaaaagcttcctcagctggaagctttactccctcctcgacagaaagtgaggattacagatgacatggatcaggtggagctgaaggagttttgtcccaatgagcagaactggcgtcagcacagggaggcctacgaggaggacgaagacgggccccaggctggagtgcagtgccagacggcatgacgtggtgcggggcagcgtggccccaccggactagcacatgatgaatgtaaagttggcacaatgaaaatgacatcgctttaatggccttgtgtttgggatgtcctgtgtatgtgttcagcattcttaattgctgagtgtctttttggcttttcttttggttgtaacttaagttatagcttaatttatatttaaatgttttaagtataaatcacctctagtctgcatatggaatctgttcatttctattttcaggatatacttttgagatgtcagtgattgcaccaatactttgtgcttctagtggctttgccataattcagtgtcaccaataaggcacagcccagttagcagcttagcccccctagcaaaccccaaggcacaaagtgggcatcctgactcatctctaggtctgtggtttctcccctcttcccttggcagagttattgagggcatgatctcagggctgctaagataacatttctgaggattctagatgatcctcttaaagaataaaagcacatccgtggatcggacatggctgcatgtgcctgcttaacagggccaacttagttcctactgttctgtgcccttcagtggatggaacgtgagtgtctgatcatctctcttggaagttttctgaaccttccaagctctgtggtgaggacaaaccagtgtttgaatcatatgctgataactgtttgcctgtgaccctcacaccttgttcttcagggttttaatgattttctgttgacaacttttgcaatgctttcccaccaaagtgcttacttgtaaagaaaactaaatccttctgtgtccccggcagcctcagtgcagcaacagaagccaagggagaatgctgctggtttggcccatggcacagccagcttctctgaccagtaatccggggtgacttgagggtctgcaaaggcatagaactccccagtgttttccacctcattctcccagattgagctcccttccaaaggatcgttcctctcattgcacagccatattacaaagggtttcctgctcaagtgatgttttggtaagaacttcgctgagttccactgtggattacagtttgtatggactactactgtaaattatagcttgtttggagggatattagtcattattttattcatgacaggtagactacaattcgaacttagggttacctcagtctttagccattactgcttatttcttttccccaagtcacaaaaaacttgtaagctgctgggttaaagcagaggccacctgtcagatctaccctacccttatttggttacatggcacctgagagtttcactcagaccagggatcttccttaggagggtcaaagtgcagatcagaccatgcaggtaaggtgaaccagctgcacggaccaggttcccgcaaaacattgccagctagtgaggcataatttgctcaaagtatagaaacagcccacctgtgcccactttgaccattggtgaggatagatataaaatcacttcttccaacgaagcctaggtgaaaatctatttataaatggaccacaactctggggtgtcgtttttgtgctgtgacttcctaattattgctaaagaactactgtttagttggtaatggtgtaaaattacattcagctccttcttgtcatataaaaggaatttggagggtgtcgcttaaaattttattccacctgtacatttgtcactttaaaattaaaattgagctggtatgagagataa

SEQ ID NO: 127623 - DNA, 3116 bp, Homo sapiens
  Payload ID: 4979
  Gene Symbol: DNAJA4
  Gene Name: DnaJ (Hsp40) homolog, subfamily A, member 4
  Uniprot ID: Q8WW22
  ENST ID: ENST00000394852
  CDS Start-End: 191-1384
ccaggcgtggaagtcggtccggcgcggggcggggggcgggcgggagctacaagcggcggcggcggcggcgaccgtgaccgtgacgcgcgagcgggcggcgggggcgcgggccaggggcgcgggccagggtgccggcaggggcgtccggggcgctctgaccggcctcgcccgccccccccgcagacacaagatggtgaaggagacccagtactatgacatcctgggcgtgaagcccagcgcgtccccggaggagatcaagaaggcctatcggaagctggcgctcaagtaccacccggacaagaacccggatgagggcgagaagtttaaactcatatcccaggcatatgaagtgctttcagatccaaagaaaagggatgtttatgaccaaggcggagagcaggcaattaaagaaggaggctcaggcagccccagcttctcttcacccatggacatctttgacatgttctttggtggtggtggacggatggctagagagagaagaggcaagaatgttgtacaccagttatctgtaactcttgaagatctatataatggagtcacgaagaaattggccctccagaaaaatgtaatttgtgagaaatgtgaaggtgttggtgggaagaagggatcggtggagaagtgcccgctgtgcaaggggcgggggatgcagatccacatccagcagatcgggccgggcatggtacagcagatccagaccgtgtgcatcgagtgcaagggccagggtgagcgcatcaaccccaaggaccgctgcgagagctgcagcggggccaaggtgatccgtgagaagaagattatcgaggtacatgttgaaaaaggtatgaaagatgggcaaaagatactatttcatggagaaggagatcaggagcctgagctggagcctggtgatgtcataattgtgcttgatcagaaggatcatagtgtctttcagagacgaggccatgacttgatcatgaaaatgaaaattcagctttctgaagctctttgtggcttcaagaagacgataaaaacattggacaatcgaattcttgttattacatccaaagcaggtgaggtgataaagcacggggacctgagatgcgtgcgcgatgaaggaatgcccatctacaaagcacccctggaaaaagggattctgatcatacagtttttagtaatctttcctgaaaaacactggctttctctggaaaagcttcctcagctggaagctttactccctcctcgacagaaagtgaggattacagatgacatggatcaggtggagctgaaggagttttgtcccaatgagcagaactggcgtcagcacagggaggcctacgaggaggacgaagacgggccccaggctggagtgcagtgccagacggcatgacgtggtgcggggcagcgtggccccaccggactagcacatgatgaatgtaaagttggcacaatgaaaatgacatcgctttaatggccttgtgtttgggatgtcctgtgtatgtgttcagcattcttaattgctgagtgtctttttggcttttcttttggttgtaacttaagttatagcttaatttatatttaaatgttttaagtataaatcacctctagtctgcatatggaatctgttcatttctattttcaggatatacttttgagatgtcagtgattgcaccaatactttgtgcttctagtggctttgccataattcagtgtcaccaataaggcacagcccagttagcagcttagcccccctagcaaaccccaaggcacaaagtgggcatcctgactcatctctaggtctgtggtttctcccctcttcccttggcagagttattgagggcatgatctcagggctgctaagataacatttctgaggattctagatgatcctcttaaagaataaaagcacatccgtggatcggacatggctgcatgtgcctgcttaacagggccaacttagttcctactgttctgtgcccttcagtggatggaacgtgagtgtctgatcatctctcttggaagttttctgaaccttccaagctctgtggtgaggacaaaccagtgtttgaatcatatgctgataactgtttgcctgtgaccctcacaccttgttcttcagggttttaatgattttctgttgacaacttttgcaatgctttcccaccaaagtgcttacttgtaaagaaaactaaatccttctgtgtccccggcagcctcagtgcagcaacagaagccaagggagaatgctgctggtttggcccatggcacagccagcttctctgaccagtaatccggggtgacttgagggtctgcaaaggcatagaactccccagtgttttccacctcattctcccagattgagctcccttccaaaggatcgttcctctcattgcacagccatattacaaagggtttcctgctcaagtgatgttttggtaagaacttcgctgagttccactgtggattacagtttgtatggactactactgtaaattatagcttgtttggagggatattagtcattattttattcatgacaggtagactacaattcgaacttagggttacctcagtctttagccattactgcttatttcttttccccaagtcacaaaaaacttgtaagctgctgggttaaagcagaggccacctgtcagatctaccctacccttatttggttacatggcacctgagagtttcactcagaccagggatcttccttaggagggtcaaagtgcagatcagaccatgcaggtaaggtgaaccagctgcacggaccaggttcccgcaaaacattgccagctagtgaggcataatttgctcaaagtatagaaacagcccacctgtgcccactttgaccattggtgaggatagatataaaatcacttcttccaacgaagcctaggtgaaaatctatttataaatggaccacaactctggggtgtcgtttttgtgctgtgacttcctaattattgctaaagaactactgtttagttggtaatggtgtaaaattacattcagctccttcttgtcatataaaaggaatttggagggtgtcgcttaaaattttattccacctgtacatttgtcactttaaaattaaaattgagctggtatgagag

SEQ ID NO: 127624 - DNA, 3245 bp, Homo sapiens
  Payload ID: 4979
  Gene Symbol: DNAJA4
  Gene Name: DnaJ (Hsp40) homolog, subfamily A, member 4
  Uniprot ID: Q8WW22
  ENST ID: ENST00000394855
  CDS Start-End: 229-1509
agacggcggccacacccccggggagaggccgggtggggaccgcagggcgcagctctcccagtcccacccttcggcgcagggctccggccaacacagccctccaggccgcctactctccagccagccggctccacggacccacggaagggcaagggggcggcctcggggcggcgggacagttgtcggagggcgccctccaggcccaagccgccttctccggcccccgccatggcccggggcggcagtcagagctggagctccggggaatcagacgggcagccaaaggagcagacgcccgagaagcccagacacaagatggtgaaggagacccagtactatgacatcctgggcgtgaagcccagcgcgtccccggaggagatcaagaaggcctatcggaagctggcgctcaagtaccacccggacaagaacccggatgagggcgagaagtttaaactcatatcccaggcatatgaagtgctttcagatccaaagaaaagggatgtttatgaccaaggcggagagcaggcaattaaagaaggaggctcaggcagccccagcttctcttcacccatggacatctttgacatgttctttggtggtggtggacggatggctagagagagaagaggcaagaatgttgtacaccagttatctgtaactcttgaagatctatataatggagtcacgaagaaattggccctccagaaaaatgtaatttgtgagaaatgtgaaggtgttggtgggaagaagggatcggtggagaagtgcccgctgtgcaaggggcgggggatgcagatccacatccagcagatcgggccgggcatggtacagcagatccagaccgtgtgcatcgagtgcaagggccagggtgagcgcatcaaccccaaggaccgctgcgagagctgcagcggggccaaggtgatccgtgagaagaagattatcgaggtacatgttgaaaaaggtatgaaagatgggcaaaagatactatttcatggagaaggagatcaggagcctgagctggagcctggtgatgtcataattgtgcttgatcagaaggatcatagtgtctttcagagacgaggccatgacttgatcatgaaaatgaaaattcagctttctgaagctctttgtggcttcaagaagacgataaaaacattggacaatcgaattcttgttattacatccaaagcaggtgaggtgataaagcacggggacctgagatgcgtgcgcgatgaaggaatgcccatctacaaagcacccctggaaaaagggattctgatcatacagtttttagtaatctttcctgaaaaacactggctttctctggaaaagcttcctcagctggaagctttactccctcctcgacagaaagtgaggattacagatgacatggatcaggtggagctgaaggagttttgtcccaatgagcagaactggcgtcagcacagggaggcctacgaggaggacgaagacgggccccaggctggagtgcagtgccagacggcatgacgtggtgcggggcagcgtggccccaccggactagcacatgatgaatgtaaagttggcacaatgaaaatgacatcgctttaatggccttgtgtttgggatgtcctgtgtatgtgttcagcattcttaattgctgagtgtctttttggcttttcttttggttgtaacttaagttatagcttaatttatatttaaatgttttaagtataaatcacctctagtctgcatatggaatctgttcatttctattttcaggatatacttttgagatgtcagtgattgcaccaatactttgtgcttctagtggctttgccataattcagtgtcaccaataaggcacagcccagttagcagcttagcccccctagcaaaccccaaggcacaaagtgggcatcctgactcatctctaggtctgtggtttctcccctcttcccttggcagagttattgagggcatgatctcagggctgctaagataacatttctgaggattctagatgatcctcttaaagaataaaagcacatccgtggatcggacatggctgcatgtgcctgcttaacagggccaacttagttcctactgttctgtgcccttcagtggatggaacgtgagtgtctgatcatctctcttggaagttttctgaaccttccaagctctgtggtgaggacaaaccagtgtttgaatcatatgctgataactgtttgcctgtgaccctcacaccttgttcttcagggttttaatgattttctgttgacaacttttgcaatgctttcccaccaaagtgcttacttgtaaagaaaactaaatccttctgtgtccccggcagcctcagtgcagcaacagaagccaagggagaatgctgctggtttggcccatggcacagccagcttctctgaccagtaatccggggtgacttgagggtctgcaaaggcatagaactccccagtgttttccacctcattctcccagattgagctcccttccaaaggatcgttcctctcattgcacagccatattacaaagggtttcctgctcaagtgatgttttggtaagaacttcgctgagttccactgtggattacagtttgtatggactactactgtaaattatagcttgtttggagggatattagtcattattttattcatgacaggtagactacaattcgaacttagggttacctcagtctttagccattactgcttatttcttttccccaagtcacaaaaaacttgtaagctgctgggttaaagcagaggccacctgtcagatctaccctacccttatttggttacatggcacctgagagtttcactcagaccagggatcttccttaggagggtcaaagtgcagatcagaccatgcaggtaaggtgaaccagctgcacggaccaggttcccgcaaaacattgccagctagtgaggcataatttgctcaaagtatagaaacagcccacctgtgcccactttgaccattggtgaggatagatataaaatcacttcttccaacgaagcctaggtgaaaatctatttataaatggaccacaactctggggtgtcgtttttgtgctgtgacttcctaattattgctaaagaactactgtttagttggtaatggtgtaaaattacattcagctccttcttgtcatataaaaggaatttggagggtgtcgcttaaaattttattccacctgtacatttgtcactttaaaattaaaattgagctggtatgagagataa

SEQ ID NO: 127625 - DNA, 1308 bp, Homo sapiens
  Payload ID: 4979
  Gene Symbol: DNAJA4
  Gene Name: DnaJ (Hsp40) homolog, subfamily A, member 4
  ENST ID: ENST00000440911
  CDS Start-End: 50-685
ggaggagccggtggctctagtgcggtggagccaggcgtggaaacacaagatggtgaaggagacccagtactatgacatcctgggcgtgaagcccagcgcgtccccggaggagatcaagaaggcctatcggaagctggcgctcaagtaccacccggacaagaacccggatgagggcgagaagtttaaactcatatcccaggcatatgaagtgctttcagatccaaagaaaagggatgtttatgaccaaggcggagagcaggcaattaaagaaggaggctcaggcagccccagcttctcttcacccatggacatctttgacatgttctttggtggtggtggacggatggctagagagagaagaggcaagaatgttgtacaccagttatctgtaactcttgaagatctatataatggagtcacgaagaaattggccctccagaaaaatgtaatttgtgagaaatgtgaaggtgttggtgggaagaagggatcggtggagaagtgcccgctgtgcaaggggcgggggatgcagatccacatccagcagatcgggccgggcatggtacagcagatccagaccgtgtgcatcgagtgcaagggccagggtgagcgcatcaaccccaaggaccgctgcgagagctgcagcggggccaaggtgatccgtgagaagaagattatcgaggtatgaaagatgggcaaaagatactatttcatggagaaggagatcaggagcctgagctggagcctggtgatgtcataattgtgcttgatcagaaggatcatagtgtctttcagagacgaggccatgacttgatcatgaaaatgaaaattcagctttctgaagctctttgtggcttcaagaagacgataaaaacattggacaatcgaattcttgttattacatccaaagcaggtgaggtgataaagcacggggacctgagatgcgtgcgcgatgaaggaatgcccatctacaaagcacccctggaaaaagggattctgatcatacagtttttagtaatctttcctgaaaaacactggctttctctggaaaagcttcctcagctggaagctttactccctcctcgacagaaagtgaggattacagatgacatggatcaggtggagctgaaggagttttgtcccaatgagcagaactggcgtcagcacagggaggcctacgaggaggacgaagacgggccccaggctggagtgcagtgccagacggcatgacgtggtgcggggcagcgtggccccaccggactagcacatgatgaatgtaaagttggcacaatgaaaatgacatcgctttaa

SEQ ID NO: 127626 - DNA, 514 bp, Homo sapiens
  Payload ID: 4979
  Gene Symbol: DNAJA4
  Gene Name: DnaJ (Hsp40) homolog, subfamily A, member 4
  ENST ID: ENST00000423642
  CDS Start-End: 32-376
agtgcggtggagccaggcgtggaaacacaagatggtgaaggagacccagtactatgacatcctgggcgtgaagcccagcgcgtccccggaggagatcaagaaggcctatcggaagctggcgctcaagtaccacccggacaagaacccggatgagggcgagaagtttaaactcatatcccaggcatatgaagtgctttcagatccaaagaaaagggatgtttatgaccaaggcggagagcaggcaattaaagaaggaggctcaggcagccccagcttctcttcacccatggacatctttgacatgttctttggtggtggtggacggatggctagagagagaagagaatgttgtacaccagttatctgtaactcttgaagatctatataatggagtcacgaagaaattggccctccagaaaaatgtaatttgtgagaaatgtgaaggtgttggtgggaagaagggatcggtggagaagtgcccgctgtgcaaggggcgggggatgcagatccacat

SEQ ID NO: 127627 - DNA, 1399 bp, Homo sapiens
  Payload ID: 4979
  Gene Symbol: DNAJA4
  Gene Name: DnaJ (Hsp40) homolog, subfamily A, member 4
  Uniprot ID: Q8WW22
  ENST ID: ENST00000446172
  CDS Start-End: 63-1175
agtctcctttaaggagagcttgtaggcttctaatttcacatttcagcaagctggctaaagacatgtgggaaagcctgaccctggattcaggtcaaatctcagcactcacaagatttaaactcatatcccaggcatatgaagtgctttcagatccaaagaaaagggatgtttatgaccaaggcggagagcaggcaattaaagaaggaggctcaggcagccccagcttctcttcacccatggacatctttgacatgttctttggtggtggtggacggatggctagagagagaagaggcaagaatgttgtacaccagttatctgtaactcttgaagatctatataatggagtcacgaagaaattggccctccagaaaaatgtaatttgtgagaaatgtgaaggtgttggtgggaagaagggatcggtggagaagtgcccgctgtgcaaggggcgggggatgcagatccacatccagcagatcgggccgggcatggtacagcagatccagaccgtgtgcatcgagtgcaagggccagggtgagcgcatcaaccccaaggaccgctgcgagagctgcagcggggccaaggtgatccgtgagaagaagattatcgaggtacatgttgaaaaaggtatgaaagatgggcaaaagatactatttcatggagaaggagatcaggagcctgagctggagcctggtgatgtcataattgtgcttgatcagaaggatcatagtgtctttcagagacgaggccatgacttgatcatgaaaatgaaaattcagctttctgaagctctttgtggcttcaagaagacgataaaaacattggacaatcgaattcttgttattacatccaaagcaggtgaggtgataaagcacggggacctgagatgcgtgcgcgatgaaggaatgcccatctacaaagcacccctggaaaaagggattctgatcatacagtttttagtaatctttcctgaaaaacactggctttctctggaaaagcttcctcagctggaagctttactccctcctcgacagaaagtgaggattacagatgacatggatcaggtggagctgaaggagttttgtcccaatgagcagaactggcgtcagcacagggaggcctacgaggaggacgaagacgggccccaggctggagtgcagtgccagacggcatgacgtggtgcggggcagcgtggccccaccggactagcacatgatgaatgtaaagttggcacaatgaaaatgacatcgctttaatggccttgtgtttgggatgtcctgtgtatgtgttcagcattcttaattgctgagtgtctttttggcttttcttttggttgtaacttaagttatagcttaatttatatttaaatgttttaagtataaatcacctctagtctgca

SEQ ID NO: 127628 - DNA, 947 bp, Homo sapiens
  Payload ID: 4979
  Gene Symbol: DNAJA4
  Gene Name: DnaJ (Hsp40) homolog, subfamily A, member 4
  ENST ID: ENST00000489435
  CDS Start-End: 170-589
agtcccacccttcggcgcagggctccggccaacacagccctccaggccgcctactctccagccagccggctccacggacccacggaagggcaagggggcggcctcggggcggcgggacagttgtcggagggcgccctccaggcccaagccgccttctccggcccccgccatggcccggggcggcagtcagagctggagctccggggaatcagacgggcagccaaaggagcagacgcccgagaagcccagacacaagatggtgaaggagacccagtactatgacatcctgggcgtgaagcccagcgcgtccccggaggagatcaagaaggcctatcggaagctggcgctcaagtaccacccggacaagaacccggatgagggcgagaagggacacggacatctgcaacctgacatcagcttgtactcatattctgggttttcggtgacaagtgacacacagttgatcataagtaccaatcatagactgaaaatgctctgcattttagagacagaagttaaaagcttttccatcctgtttacagaaagtttgctttttatctctaaagaggctcatgacccacctgaataggtgaattgaaggatgaggcattgcaaggaaaggctgctaaccctcccgttcctcctttcacttcttgccattttcttacaaaactttggttgttccgcatgggtcttgagaggtggggccgttatagtagctgatagcagtgtcacttgggccacgtttgaaaccacaccaatcacccatgtagcatttaagacctgtggaaacgacgctggaatcaaaatacctgtctgtgttagttgttccaagctggagaaagctacttcaggacggttggctgaatggcaacagtgatggaatatttatatttagccacatgtgctgaatgtggctgtcacaagtttaaaatgctttcctgtaa

SEQ ID NO: 127629 - DNA, 866 bp, Homo sapiens
  Payload ID: 4979
  Gene Symbol: DNAJA4
  Gene Name: DnaJ (Hsp40) homolog, subfamily A, member 4
  ENST ID: ENST00000542636
  CDS Start-End: 156-317
gcgggcgggagctacaagcggcggcggcggcggcgaccgtgaccgtgacgcgcgagcgggcggcgggggcgcgggccaggggcgcgggccagggtgccggcaggggcgtccggggcgctctgaccggcctcgcccgccccccccgcagacacaagatggtgaaggagacccagtactatgacatcctgggcgtgaagcccagcgcgtccccggaggagatcaagaaggcctatcggaagctggcgctcaagtaccacccggacaagaacccggatgagggcgagaaggcaagaatgttgtacaccagttatctgtaactcttgaagatctatataatggagtcacgaagaaattggccctccagaaaaatgtaatttgtgagaaatgtgaaggtgttggtgggaagaagggatcggtggagaagtgcccgctgtgcaaggggcgggggatgcagatccacatccagcagatcgggccgggcatggtacagcagatccagaccgtgtgcatcgagtgcaagggccagggtgagcgcatcaaccccaaggaccgctgcgagagctgcagcggggccaaggtgatccgtgagaagaagattatcgaggtacatgttgaaaaaggtatgaaagatgggcaaaagatactatttcatggagaaggagatcaggagcctgagctggagcctggtgatgtcataattgtgcttgatcagaaggatcatagtgtctttcagagacgaggccatgacttgatcatgaaaatgaaaattcagctttctgaagctctttgtggcttcaagaagacgataaaaacattggacaatcgaattcttgttattacatccaaagcaggtgaggtgataaagc

SEQ ID NO: 127630 - DNA, 1320 bp, Homo sapiens
  Payload ID: 4979
  Gene Symbol: DNAJA4
  Gene Name: DnaJ (Hsp40) homolog, subfamily A, member 4
  ENST ID: ENST00000483802
  CDS Start-End: 32-691
agtgcggtggagccaggcgtggaaacacaagatggtgaaggagacccagtactatgacatcctgggcgtgaagcccagcgcgtccccggaggagatcaagaaggcctatcggaagctggcgctcaagtaccacccggacaagaacccggatgagggcgagaagtttaaactcatatcccaggcatatgaagtgctttcagatccaaagaaaagggatgtttatgaccaaggcggagagcaggcaattaaagaaggaggctcaggcagccccagcttctcttcacccatggacatctttgacatgttctttggtggtggtggacggatggctagagagagaagaggcaagaatgttgtacaccagttatctgtaactcttgaagatctatataatggagtcacgaagaaattggccctccagaaaaatgtaatttgtgagaaatgtgaaggtgttggtgggaagaagggatcggtggagaagtgcccgctgtgcaaggggcgggggatgcagatccacatccagcagatcgggccgggcatggtacagcagatccagaccgtgtgcatcgagtgcaagggccagggtgagcgcatcaaccccaaggaccgctgcgagagctgcagcggggccaaggtgatccgtgagaagaagattatcgaggtacatgttgaaaaagagacgaggccatgacttgatcatgaaaatgaaaattcagctttctgaagctctttgtggcttcaagaagacgataaaaacattggacaatcgaattcttgttattacatccaaagcaggtgaggtgataaagcacggggacctgagatgcgtgcgcgatgaaggaatgcccatctacaaagcacccctggaaaaagggattctgatcatacagtttttagtaatctttcctgaaaaacactggctttctctggaaaagcttcctcagctggaagctttactccctcctcgacagaaagtgaggattacagatgacatggatcaggtggagctgaaggagttttgtcccaatgagcagaactggcgtcagcacagggaggcctacgaggaggacgaagacgggccccaggctggagtgcagtgccagacggcatgacgtggtgcggggcagcgtggccccaccggactagcacatgatgaatgtaaagttggcacaatgaaaatgacatcgctttaatggccttgtgtttgggatgtcctgtgtatgtgttcagcattcttaattgctgagtgtctttttggcttttcttttggttgtaacttaagttatagcttaatttatatttaaatgttttaagtataaa

SEQ ID NO: 127631 - DNA, 2264 bp, Homo sapiens
  Payload ID: 4980
  Gene Symbol: DNAJB1
  Gene Name: DnaJ (Hsp40) homolog, subfamily B, member 1
  Uniprot ID: P25685
  ENST ID: ENST00000254322
  CDS Start-End: 72-1094
agagtccgggactggtcggcggcggagccgggggacggcgacagcgggtcggcgggccgcaggagggggtcatgggtaaagactactaccagacgttgggcctggcccgcggcgcgtcggacgaggagatcaagcgggcctaccgccgccaggcgctgcgctaccacccggacaagaacaaggagcccggcgccgaggagaagttcaaggagatcgctgaggcctacgacgtgctcagcgacccgcgcaagcgcgagatcttcgaccgctacggggaggaaggcctaaaggggagtggccccagtggcggtagcggcggtggtgccaatggtacctctttcagctacacattccatggagaccctcatgccatgtttgctgagttcttcggtggcagaaatccctttgacaccttttttgggcagcggaacggggaggaaggcatggacattgatgacccattctctggcttccctatgggcatgggtggcttcaccaacgtgaactttggccgctcccgctctgcccaagagcccgcccgaaagaagcaagatcccccagtcacccacgaccttcgagtctcccttgaagagatctacagcggctgtaccaagaagatgaaaatctcccacaagcggctaaaccccgacggaaagagcattcgaaacgaagacaaaatattgaccatcgaagtgaagaaggggtggaaagaaggaaccaaaatcactttccccaaggaaggagaccagacctccaacaacattccagctgatatcgtctttgttttaaaggacaagccccacaatatctttaagagagatggctctgatgtcatttatcctgccaggatcagcctccgggaggctctgtgtggctgcacagtgaacgtccccactctggacggcaggacgatacccgtcgtattcaaagatgttatcaggcctggcatgcggcgaaaagttcctggagaaggcctccccctccccaaaacacccgagaaacgtggggacctcattattgagtttgaagtgatcttccccgaaaggattccccagacatcaagaaccgtacttgagcaggttcttccaatatagctatctgagctccccaaggactgaccagggacctttccagagctcaaggatttctggacctttctaccagttgtggaccatgagagggtgggagggcccagggagggctttcgtactgctgaatgttttccagagcatatattacaatctttcaaagtcgcacactagacttcagtggtttttcgagctatagggcatcaggtggtgggaacagcaggaaaaggcattccagtctgccccactgggtctggcagccctcccgggatgggcccacatccacctccagtccctggccaggggtgagaggcagaccagcagatggacttgatccctctgtgtctttttgcttctggctggtagataatgtcaacctgcagtcttgattcccagaccctgtacactcctccttttctgttgtgtgatcagtttgtgctttattctgtatttgtctcccatgtcttgctcttctcctggagaattctgtcttctctttggccatctcaaattgagaacctaaactattcctgcagaactgcctggttggcgtccacaagcaatacctctcgttccagcaggaccaagggagccagcctccagtgagtgactccagcaagtgcagccacctctcccttgatggtctgggagcctggcctcagcaaggggccttcctgacctctggctccagtgaagctgaatgtcctcactttgtgggtcacactctttacatttctgtaaggcaatcttggcacacgtggggcttaccagtggcccaggtaattttttgtttcatggactatggactctttcaaagggatctgatccttttgaattttgcacagccctagatacaatcccttttgataaaagggtctttgcttctgattacaggagcactgtggaacgtctgtaaatatgtttttataattccatgtatagttggtgtacactcaaaacctgtccccggcagccagtgctctctgtatagggccataatggaattctgaagaaatcttggggagggaaggggagttggaacaaatgtctgttccctggaggccagtccagtgctcagacctttagactcattgtaagttgccactgccaacatgagaccaaagtgtgtgactagtcaatgaagtgcgacagcattaaagactgatgctaaacctc

SEQ ID NO: 127632 - DNA, 1287 bp, Homo sapiens
  Payload ID: 4980
  Gene Symbol: DNAJB1
  Gene Name: DnaJ (Hsp40) homolog, subfamily B, member 1
  Uniprot ID: P25685
  ENST ID: ENST00000396969
  CDS Start-End: 274-996
aagcgacggttaggccagacgcgggggcggggtaagaagttgagtgacaggcaaggcagcatccacatgacaggcggcgccgaaggggtaaattctgagatcctgcccctgagctttcatgagctgttgaaccatctggaattcacaggcctgtcatgagagacacgatgagaagtccttaaaggcctaaaggggagtggccccagtggcggtagcggcggtggtgccaatggtacctctttcagctacacattccatggagaccctcatgccatgtttgctgagttcttcggtggcagaaatccctttgacaccttttttgggcagcggaacggggaggaaggcatggacattgatgacccattctctggcttccctatgggcatgggtggcttcaccaacgtgaactttggccgctcccgctctgcccaagagcccgcccgaaagaagcaagatcccccagtcacccacgaccttcgagtctcccttgaagagatctacagcggctgtaccaagaagatgaaaatctcccacaagcggctaaaccccgacggaaagagcattcgaaacgaagacaaaatattgaccatcgaagtgaagaaggggtggaaagaaggaaccaaaatcactttccccaaggaaggagaccagacctccaacaacattccagctgatatcgtctttgttttaaaggacaagccccacaatatctttaagagagatggctctgatgtcatttatcctgccaggatcagcctccgggaggctctgtgtggctgcacagtgaacgtccccactctggacggcaggacgatacccgtcgtattcaaagatgttatcaggcctggcatgcggcgaaaagttcctggagaaggcctccccctccccaaaacacccgagaaacgtggggacctcattattgagtttgaagtgatcttccccgaaaggattccccagacatcaagaaccgtacttgagcaggttcttccaatatagctatctgagctccccaaggactgaccagggacctttccagagctcaaggatttctggacctttctaccagttgtggaccatgagagggtgggagggcccagggagggctttcgtactgctgaatgttttccagagcatatattacaatctttcaaagtcgcacactagacttcagtggtttttcgagctatagggcatcaggtggtgggaacagcaggaaaaggcattccagtctgccccactgggtctggcagccctcccgggatgggcccacatccacctccagtccct

SEQ ID NO: 127633 - DNA, 569 bp, Homo sapiens
  Payload ID: 4980
  Gene Symbol: DNAJB1
  Gene Name: DnaJ (Hsp40) homolog, subfamily B, member 1
  ENST ID: ENST00000595139
  CDS Start-End: 82-569
gttcctgtgcccgttgatgattcaggctggcttctgggcttgatctggagctgactttttgtgcaaggatggtggcagtgaatgctaatgtgcctaaaggggagtggccccagtggcggtagcggcggtggtgccaatggtacctctttcagctacacattccatggagaccctcatgccatgtttgctgagttcttcggtggcagaaatccctttgacaccttttttgggcagcggaacggggaggaaggcatggacattgatgacccattctctggcttccctatgggcatgggtggcttcaccaacgtgaactttggccgctcccgctctgcccaagagcccgcccgaaagaagcaagatcccccagtcacccacgaccttcgagtctcccttgaagagatctacagcggctgtaccaagaagatgaaaatctcccacaagcggctaaaccccgacggaaagagcattcgaaacgaagacaaaatattgaccatcgaagtgaagaaggggtggaaagaaggaaccaaaatcactttccccaaggaaggagaccagacctccaacaa

SEQ ID NO: 127634 - DNA, 593 bp, Homo sapiens
  Payload ID: 4980
  Gene Symbol: DNAJB1
  Gene Name: DnaJ (Hsp40) homolog, subfamily B, member 1
  ENST ID: ENST00000596853
  CDS Start-End: 244-593
gtacaccgggaacagcaggagagggctaggggctggggtcgcgggctgcggagtctggttggcgaggagatcctgcccctgagctttcatgagctgttgaaccatctggaattcacaggcctgtcatgagagacacgatgagaagtccttaaaggcctaaaggggagtggccccagtggcggtagcggcggtggtgccaatggtacctctttcagctacacattccatggagaccctcatgccatgtttgctgagttcttcggtggcagaaatccctttgacaccttttttgggcagcggaacggggaggaaggcatggacattgatgacccattctctggcttccctatgggcatgggtggcttcaccaacgtgaactttggccgctcccgctctgcccaagagcccgcccgaaagaagcaagatcccccagtcacccacgaccttcgagtctcccttgaagagatctacagcggctgtaccaagaagatgaaaatctcccacaagcggctaaaccccgacggaaagagcattcgaaacgaagacaaaatattgaccatcgaagtgaagaaggggtggaaagaaggaaccaa

SEQ ID NO: 127635 - DNA, 995 bp, Homo sapiens
  Payload ID: 4980
  Gene Symbol: DNAJB1
  Gene Name: DnaJ (Hsp40) homolog, subfamily B, member 1
  ENST ID: ENST00000594099
  CDS Start-End: 674-995
aaagaaggaaaaagaatgggtcagcagtggccacacggcccctgtttctcgcttcttacctcgtaatgcttcatggctccctcccacggcggctactgctccgcggctgctgctgcctaactgcgcggcacagcacaggctccctacagcgctcgcaaccgcagcgatagactaaacgcggctctgcgtccgccccgcccctccaggccgcgcgcgccccgtcggccaatcagggcacgaggcgcccacgttcgcccctgctccttggggccggtccgaaccaagactaggactagcaccaggggattgaccaatcaacttgcgagaccaatcgaagggggcggaacgcctgtaggaggggctaaagagaaggggcttgaccatccaccaatccaaaggaggtctctgccccgcgcgtccctttgccacgccccctgatggcgtcgctgtggaaaccaagatcctgcccctgagctttcatgagctgttgaaccatctggaattcacaggcctgtcatgagagacacgatgagaagtccttaaaggtagatcactgattcacaggggagcaggcggaggcaagggcctaaaggggagtggccccagtggcggtagcggcggtggtgccaatggtacctctttcagctacacattccatggagaccctcatgccatgtttgctgagttcttcggtggcagaaatccctttgacaccttttttgggcagcggaacggggaggaaggcatggacattgatgacccattctctggcttccctatgggcatgggtggcttcaccaacgtgaactttggccgctcccgctctgcccaagagcccgcccgaaagaagcaagatcccccagtcacccacgaccttcgagtctcccttgaagagatctacagcggctgtaccaagaagatgaaaatctcccacaagcggctaaaccccgacggaaagagcattcgaaacgaagacaaaatattgaccatcgaag

SEQ ID NO: 127636 - DNA, 601 bp, Homo sapiens
  Payload ID: 4980
  Gene Symbol: DNAJB1
  Gene Name: DnaJ (Hsp40) homolog, subfamily B, member 1
  ENST ID: ENST00000595992
  CDS Start-End: 254-601
gttaggccagacgcgggggcggggtaagaagttgagtgacaggcaaggcagcatccacatgacaggcggcgccgaagggatcctgcccctgagctttcatgagctgttgaaccatctggaattcacaggcctgtcatgagagacacgatgagaagtccttaaaggcctaaaggggagtggccccagtggcggtagcggcggtggtgccaatggtacctctttcagctacacattccatggagaccctcatgccatgtttgctgagttcttcggtggcagaaatccctttgacaccttttttgggcagcggaacggggaggaaggcatggacattgatgacccattctctggcttccctatgggcatgggtggcttcaccaacgtgaactttggccgctcccgctctgcccaagagcccgcccgaaagaagcaagatcccccagtcacccacgaccttcgagtctcccttgaagagatctacagcggctgtaccaagaagatgaaaatctcccacaagcggctaaaccccgacggaaagagcattcgaaacgaagacaaaatattgaccatcgaagtgaagaaggggtggaaagaaggaacc

SEQ ID NO: 127637 - DNA, 882 bp, Homo sapiens
  Payload ID: 4980
  Gene Symbol: DNAJB1
  Gene Name: DnaJ (Hsp40) homolog, subfamily B, member 1
  ENST ID: ENST00000598235
  CDS Start-End: 333-882
cgacggggacggcgcggcggagcccgctgcggacccgggctcacctgggctcggccgccggggtccgcggggcggcgcctccggctcagctgcggggcgaggggttgtgaatgcaggagccgaccccgttcgtgggcttgggggctgggttgggataattcccgggaagtgatgacctggccccggcagggcacgcaggaggcagcggccgcccaggtccggagagcggggccgcctcggagggcctaaaggggagtggccccagtggcggtagcggcggtggtgccaatggtacctctttcagctacacattccatggagaccctcatgccatgtttgctgagttcttcggtggcagaaatccctttgacaccttttttgggcagcggaacggggaggaaggcatggacattgatgacccattctctggcttccctatgggcatgggtggcttcaccaacgtgaactttggccgctcccgctctgcccaagagcccgcccgaaagaagcaagatcccccagtcacccacgaccttcgagtctcccttgaagagatctacagcggctgtaccaagaagatgaaaatctcccacaagcggctaaaccccgacggaaagagcattcgaaacgaagacaaaatattgaccatcgaagtgaagaaggggtggaaagaaggaaccaaaatcactttccccaaggaaggagaccagacctccaacaacattccagctgatatcgtctttgttttaaaggacaagccccacaatatctttaagagagatggctctgatgtcatttatcctgccaggatcagcctccgggaggctctgtgtggctgcacagtgaacgtccccactctggacggcaggacgatacccgtcg

SEQ ID NO: 127638 - DNA, 573 bp, Homo sapiens
  Payload ID: 4980
  Gene Symbol: DNAJB1
  Gene Name: DnaJ (Hsp40) homolog, subfamily B, member 1
  ENST ID: ENST00000596075
  CDS Start-End: 335-573
agcatccacatgacaggcggcgccgaagggatcctgcccctgagctttcatgagctgttgaaccatctggaattcacaggcctgtcatgagagacacgatgagaagtccttaaaggcgctgcgctaccacccggacaagaacaaggagcccggcgccgaggagaagttcaaggagatcgctgaggcctacgacgtgctcagcgacccgcgcaagcgcgagatcttcgaccgctacggggaggaaggcctaaaggggagtggccccagtggcggtagcggcggtggtgccaatggtacctctttcagctacacattccatggagaccctcatgccatgtttgctgagttcttcggtggcagaaatccctttgacaccttttttgggcagcggaacggggaggaaggcatggacattgatgacccattctctggcttccctatgggcatgggtggcttcaccaacgtgaactttggccgctcccgctctgcccaagagcccgcccgaaagaagcaagatcccccagtcacccacgaccttcgagtctcccttgaagagatctacagcggctgtac

SEQ ID NO: 127639 - DNA, 573 bp, Homo sapiens
  Payload ID: 4980
  Gene Symbol: DNAJB1
  Gene Name: DnaJ (Hsp40) homolog, subfamily B, member 1
  ENST ID: ENST00000601533
  CDS Start-End: 301-573
aagcgacggttaggccagacgcgggggcggggtaagaagttgagtgacaggcaaggcagcatccacatgacaggcggcgccgaagggatcctgcccctgagctttcatgagctgttgaaccatctggaattcacaggcctgtcatgagagacacgatgagaagtccttaaaggtagatcactgattcacaggggagcaggcggaggcaagggcctaaaggggagtggccccagtggcggtagcggcggtggtgccaatggtacctctttcagctacacattccatggagaccctcatgccatgtttgctgagttcttcggtggcagaaatccctttgacaccttttttgggcagcggaacggggaggaaggcatggacattgatgacccattctctggcttccctatgggcatgggtggcttcaccaacgtgaactttggccgctcccgctctgcccaagagcccgcccgaaagaagcaagatcccccagtcacccacgaccttcgagtctcccttgaagagatctacagcggctgtaccaagaagatgaaaatctcccacaagcggctaaac

SEQ ID NO: 127640 - DNA, 567 bp, Homo sapiens
  Payload ID: 4980
  Gene Symbol: DNAJB1
  Gene Name: DnaJ (Hsp40) homolog, subfamily B, member 1
  ENST ID: ENST00000598692
  CDS Start-End: 327-567
gtggaaaccaaggtaagcgacggttaggccagacgcgggggcggggtaagaagttgagtgacaggcaaggcagcatccacatgacaggcggcgccgaaggggtaaattctgagatcctgcccctgagctttcatgagctgttgaaccatctggaattcacaggcctgtcatgagagacacgatgagaagtccttaaaggtagatcactgattcacaggggagcaggcggaggcaagggcctaaaggggagtggccccagtggcggtagcggcggtggtgccaatggtacctctttcagctacacattccatggagaccctcatgccatgtttgctgagttcttcggtggcagaaatccctttgacaccttttttgggcagcggaacggggaggaaggcatggacattgatgacccattctctggcttccctatgggcatgggtggcttcaccaacgtgaactttggccgctcccgctctgcccaagagcccgcccgaaagaagcaagatcccccagtcacccacgaccttcgagtctcccttgaagagatctacagcggctgtacca

SEQ ID NO: 127641 - DNA, 1688 bp, Homo sapiens
  Payload ID: 4981
  Gene Symbol: DNAJB11
  Gene Name: DnaJ (Hsp40) homolog, subfamily B, member 11
  Uniprot ID: Q9UBS4
  ENST ID: ENST00000265028
  CDS Start-End: 221-1297
ttggctctcgcctaccgggggcttctctcaccgggactcgggactcccgggaagtggaccggcagaagagggggctagctagctgtctctgcggaccaaggagacccccgcgcccccccggtgtgaggcggcctcacagggccgggtgggctggcgagccgacgcggcggcggaggaggctgtgaggagtgtgtggaacaggacccgggacagaggaaccatggctccgcagaacctgagcaccttttgcctgttgctgctatacctcatcggggcggtgattgccggacgagatttctataagatcttgggggtgcctcgaagtgcctctataaaggatattaaaaaggcctataggaaactagccctgcagcttcatcccgaccggaaccctgatgatccacaagcccaggagaaattccaggatctgggtgctgcttatgaggttctgtcagatagtgagaaacggaaacagtacgatacttatggtgaagaaggattaaaagatggtcatcagagctcccatggagacattttttcacacttctttggggattttggtttcatgtttggaggaacccctcgtcagcaagacagaaatattccaagaggaagtgatattattgtagatctagaagtcactttggaagaagtatatgcaggaaattttgtggaagtagttagaaacaaacctgtggcaaggcaggctcctggcaaacggaagtgcaattgtcggcaagagatgcggaccacccagctgggccctgggcgcttccaaatgacccaggaggtggtctgcgacgaatgccctaatgtcaaactagtgaatgaagaacgaacgctggaagtagaaatagagcctggggtgagagacggcatggagtacccctttattggagaaggtgagcctcacgtggatggggagcctggagatttacggttccgaatcaaagttgtcaagcacccaatatttgaaaggagaggagatgatttgtacacaaatgtgacaatctcattagttgagtcactggttggctttgagatggatattactcacttggatggtcacaaggtacatatttcccgggataagatcaccaggccaggagcgaagctatggaagaaaggggaagggctccccaactttgacaacaacaatatcaagggctctttgataatcacttttgatgtggattttccaaaagaacagttaacagaggaagcgagagaaggtatcaaacagctactgaaacaagggtcagtgcagaaggtatacaatggactgcaaggatattgagagtgaataaaattggactttgtttaaaataagtgaataagcgatatttattatctgcaaggtttttttgtgtgtgtttttgtttttattttcaatatgcaagttaggcttaatttttttatctaatgatcatcatgaaatgaataagagggcttaagaatttgtccatttgcattcggaaaagaatgaccagcaaaaggtttactaatacctctccctttggggatttaatgtctggtgctgccgcctgagtttcaagaattaaagctgcaagaggactccaggagcaaaagaaacacaatatagagggttggagttgttagcaatttcattcaaaatgccaactggagaagtctgtttttaaatacattttgttgttatttttttcatg

SEQ ID NO: 127642 - DNA, 501 bp, Homo sapiens
  Payload ID: 4981
  Gene Symbol: DNAJB11
  Gene Name: DnaJ (Hsp40) homolog, subfamily B, member 11
  ENST ID: ENST00000418776
  CDS Start-End: 1-501
actagtgaatgaagaacgaacgctggaagtagaaatagagcctggggtgagagacggcatggagtacccctttattggagaaggtgagcctcacgtggatggggagcctggagatttacggttccgaatcaaagttgtcaagcacccaatatttgaaaggagaggagatgatttgtacacaaatgtgacaatctcattagttgagtcactggttggctttgagatggatattactcacttggatggtcacaaggtacatatttcccgggataagatcaccaggccaggagcgaagctatggaagaaaggggaagggctccccaactttgacaacaacaatatcaagggctctttgataatcacttttgatgtggattttccaaaagaacagttaacagaggaagcgagagaaggtatcaaacagctactgaaacaagggtcagtgcagaaggccgagtggtttgaggatgatgtcatacagcgcaagagggagctgtggcc

SEQ ID NO: 127643 - DNA, 2398 bp, Homo sapiens
  Payload ID: 4981
  Gene Symbol: DNAJB11
  Gene Name: DnaJ (Hsp40) homolog, subfamily B, member 11
  Uniprot ID: Q9UBS4
  ENST ID: ENST00000439351
  CDS Start-End: 930-2006
gagacctggcggaccccgttgctagagcggcagattgcggctcaagcgtctgagaaaatctaggctggggtcgagagtccgcaacagtggcacctggagccagacccaccgctttctggtgtcgcgcctttcaacccgggggggtaggaagctttctgttgctccgcataactgtggtcagctaatagctgctgcctttccgagacagttgtcttatggagttgcttggagaacgtaaaataagaggcctaagcaatgcgtctgatgtacacctgtcgtggaataactgttcccgctcattcggccgctgtacctctgctccctcattcggagcgtagctgggtatgaatgaaattccgggcttgtagcacagagaaaacttctctcccacaattggttggtgctggggaggaagctcctgattggtggaaagtccgaggaagtgggcaagccggagggatttcgtgtacctcaggtgccctcactctgaccggccccctatcattacgtaattttctacgactcgcggtagctcaggcagagcgggttcctgcagcggcgcgaccctctgacgtctccgcttctaattggtcaagagctgcgactgcagttctgaagcctaactggttgcccgtgccgcctcggaggtgaagtgtactgcgctgattggcttccaggcgccggccgcgtgtgatgtcccgggcaacgattggctctcgcctaccgggggcttctctcaccgggactcgggactcccgggaagtggaccggcagaagagggggctagctagctgtctctgcggaccaaggagacccccgcgcccccccggtgtgaggcggcctcacagggccgggtgggctggcgagccgacgcggcggcggaggaggctgtgaggagtgtgtggaacaggacccgggacagaggaaccatggctccgcagaacctgagcaccttttgcctgttgctgctatacctcatcggggcggtgattgccggacgagatttctataagatcttgggggtgcctcgaagtgcctctataaaggatattaaaaaggcctataggaaactagccctgcagcttcatcccgaccggaaccctgatgatccacaagcccaggagaaattccaggatctgggtgctgcttatgaggttctgtcagatagtgagaaacggaaacagtacgatacttatggtgaagaaggattaaaagatggtcatcagagctcccatggagacattttttcacacttctttggggattttggtttcatgtttggaggaacccctcgtcagcaagacagaaatattccaagaggaagtgatattattgtagatctagaagtcactttggaagaagtatatgcaggaaattttgtggaagtagttagaaacaaacctgtggcaaggcaggctcctggcaaacggaagtgcaattgtcggcaagagatgcggaccacccagctgggccctgggcgcttccaaatgacccaggaggtggtctgcgacgaatgccctaatgtcaaactagtgaatgaagaacgaacgctggaagtagaaatagagcctggggtgagagacggcatggagtacccctttattggagaaggtgagcctcacgtggatggggagcctggagatttacggttccgaatcaaagttgtcaagcacccaatatttgaaaggagaggagatgatttgtacacaaatgtgacaatctcattagttgagtcactggttggctttgagatggatattactcacttggatggtcacaaggtacatatttcccgggataagatcaccaggccaggagcgaagctatggaagaaaggggaagggctccccaactttgacaacaacaatatcaagggctctttgataatcacttttgatgtggattttccaaaagaacagttaacagaggaagcgagagaaggtatcaaacagctactgaaacaagggtcagtgcagaaggtatacaatggactgcaaggatattgagagtgaataaaattggactttgtttaaaataagtgaataagcgatatttattatctgcaaggtttttttgtgtgtgtttttgtttttattttcaatatgcaagttaggcttaatttttttatctaatgatcatcatgaaatgaataagagggcttaagaatttgtccatttgcattcggaaaagaatgaccagcaaaaggtttactaatacctctccctttggggatttaatgtctggtgctgccgcctgagtttcaagaattaaagctgcaagaggactccaggagcaaaagaaacacaatatagagggttggagttgttagcaatttcattcaaaatgccaactggagaagtctgtttttaaatacattttgttgttatttttttcatga

SEQ ID NO: 127644 - DNA, 228 bp, Homo sapiens
  Payload ID: 4981
  Gene Symbol: DNAJB11
  Gene Name: DnaJ (Hsp40) homolog, subfamily B, member 11
  ENST ID: ENST00000538831
  CDS Start-End: 1-228
atgggggtgaagctggagatatttcggatgataatctacctcactttccctgtggctatgttctgggtttccaatcaggccgagtggtttgaggatgatgtcatacagcgcaagagggagctgtggccacctgagaagcttcaagagttagaggaattcaaagagaggttacggaagcggaagcggcgggaggagaagctccttcgcgacgcccagcagaactcctga

SEQ ID NO: 127645 - DNA, 4360 bp, Homo sapiens
  Payload ID: 4982
  Gene Symbol: DNAJB12
  Gene Name: DnaJ (Hsp40) homolog, subfamily B, member 12
  ENST ID: ENST00000338820
  CDS Start-End: 151-1380
gttggcgcatactcaactctaagacctccggaacatggaatctgggcgtgcaccattattgacacctacaccagccgtccctttcttagaagacatacggtagcacttccaccctcgctcaaaactcgggaaaggaggggcggagggtggatgtcatcactccgcgcccggctgcccgcgacgcgccggcgggtggcgcagcccttcgctcgcccggcctccccctccctggttccgcgttctggttccgccatggaatccaacaaggatgaagctgagcgctgtatcagcatcgccctcaaggccatccagagcaaccagcccgaccgggcgctccgcttcctggagaaggcacagcggctgtatccgacgccgcgagttcgcgccctgattgagtccctcaaccagaaaccacagactgccggtgaccaacccccacccacagacacaacccatgccacccacaggaaagcaggtgggaccgatgccccctcggccaacggtgaagctggaggagagagcaccaaaggctacactgcagaacaggttgcagctgtgaaaagggtcaagcaatgtaaagattactatgagatcctgggggtgagcagaggggcctcggatgaggacctgaagaaggcctaccgcagactggccctcaaattccacccagacaagaaccacgcacctggtgccactgaagccttcaaagccattggcacagcatatgcggtactcagcaacccggagaagaggaagcagtatgaccagttcggcgatgacaagagccaggcggcccggcacggccatgggcatggggatttccaccgtggctttgaggccgacatctcccctgaagacctcttcaacatgttctttggcggcggcttcccttctagtaacgtccacgtctacagcaacggccgcatgcgctatacctaccagcaaaggcaggaccgcagggacaaccagggtgatggcgggctaggggtgtttgtgcagctgatgcctatcctcatcctgattctcgtgtcagctctcagccagctcatggtctccagtccaccctacagtctgagtccaagaccgtccgtgggccacatccacaggcgagtcactgaccacctgggtgtcgtctactatgtgggagacactttctccgaagagtacacaggctccagcctcaaaacagtcgagcggaatgtggaagatgattatatcgccaacctccggaacaactgctggaaggagaagcagcagaaggaaggcttgctgtaccgggcacgctactttggcgacacagatatgtaccacagagcacagaagatgggcacccccagctgcagccgactgtcagaggtgcaggcctccctgcatggatagtcctgggccagccacaccaccgaggtccaagtatgagccagggctgcctccaccctgcaactcctggcagctttggccctggtcatgagcagaggagggagggggagaaagggaggaagcctggtgattgtggcaaagactcctgtccccagcctgacctccagcctccagagaccgagcagctgtggggcctgctgggaaaccaaggtcggtttccgccctctagcgatgctgtcctccccactcctccgctctgctccctggctccaggggtgtgggggaccccagaaccaggcagagtgggaacttgaaactgttgctgagggccacccggggcttcttggtccactccagccatcagtcagcacggccctttctccagcacagcagactattgtccgtgccctggtatttaggccatcacatatggtggggcccaagagagccccatatgcacactgcctgcctgataccaggaagaaccatgtgggaataggtgggccaagagccctcccctttctccatccctccagctaggaggaaatggagcaagatgaacaggcagccacgaggtgggtgggagctggcagtcttggtggcggcaggggccgcgggccctgaccacccccctctggtgggatctgaggcactctctcgaatgccgtcacacctggcagcctggaagccacaggcatccggccttgcccaggcatctcgcctgcggtctgaggaagggaacagaaggtcatgagttcagggtcagacgcagccgctcagcacaggaggggtggaggggaaatgagagttgctggtagcaggctccctccttctgcagcccggcgaatgggggcgctgggctctgttcccagcgtttgccagaggtggccacttcagccaagcccagagaagtgtgggcagaagcagtgaaggttcttctctgtgtgggtgccctgcccaccccctcctttgcctgtgtcctcccggcctggatccatggctgactctgcctggaggccatttgtgcctgcctctgtgctgccgcaggagggcaggccgcaagtggggttggtgggggtcgagcgggcagcacggtgcagcggtgcagtggcaaggggggctacttgtgtggcataagctagaggagccggtgccgcctgaatgccgagctaactgttgccactctcctccccagactatgaaatccctggagaatttttggtgacatgcactgagccaaggtgatggactgtatatttgaggaaagacaaacaaagaaacaaaattaaaatggaattggaggccgaacgctgcacagctgccctctctctcacccagtaaatgcagaaagctcttaggacagacagaaaacctgccatggggctgcttccctccctcgcagggctggcggaggctccgcatcgcctctctcctaggatacagaaaccatggcaacgaaagtagaatgtaaaactcgcagcagatatcagtgggaagggctgggggagggggcacccagctgcctttcctccctcacaggagccaccaccagccacctctcaggagaagccagaggccctggccaaagataggaggaagaaagagaactctccatagaatgtaatttatagatgcgtgtatatgtatatatatctatttatatgtaaataggcatatatgaagatatatatatatatagtctactttttaaactctgcagggatttggttaagttgttgagctgatttcttccatgttttagaaaatgaggcctgtttggggaaggtaccctggtgatgtttttgctagacattagctgtagctgacagcataaggagagtcgcatcagagcttttcacagccccccgaaaccccagcctggttttgatggcagcagtaatcatgatagtgtgaacccgcgaaggcctcaggattatggttaacctggagaggagcaggccatggaggcaggtgccaggtcagtattgagtcacagtagaggccccacaaggacctgcttgggtgagaccacctctcccctctcagcagcgctggtgggctctttgtcctggtgcccaggagccctccagccccctgcccacagaagggaaggcctgcagagggggccaggatctacctaaccatttccccacccctaagtccctcagtgggctttgccttataggtgccacagggcacagctccatcattgccactggtttttcctaagtcatgcaccaaggacttcagaaagttcttcctccgagtcagtcagtggtgccgggaccccagggcagcctcctcgactcctgaagaaaaggcagtgcccgtggctgcctctgtcttcactcgctgttgatgtgaccgccaggcctcctctcgtaccttggacaaaggatacacctgaaccagaatagttttcttaccctcacattgaaatgaggattttgcttaaaacagcacttgccgccagtgggaggagggaggttttatttattcccacagtttctcctgggccttctggaatgaccatgttttcctgtggcggtgggtgtgtcattgcgcccgccgtcttccaaagccttacttccccaagctgccagccaggaggtgataaccaccctcccagagtttctctcggctctttttttaaaagtcccccaacaaataggattcttgctgggaaaggaagttcggtaaggaaatgtcaaatctggtttttaaacaaggtccaaccctgcaatgaagcagccacttcagcccagagagattataagaactgatgtggccagagtgcctacccactgtggccccggtgctctgcccccacgccccgaccatctggtcttggtagatgtccctagacgggctgagccatgtgcaataagaacatagatcctaaaggatcctctggaagctgtatttcttgaattagaattctcaaattgtacatctgttaatatatgtttattatgtgactggc

SEQ ID NO: 127646 - DNA, 3198 bp, Homo sapiens
  Payload ID: 4982
  Gene Symbol: DNAJB12
  Gene Name: DnaJ (Hsp40) homolog, subfamily B, member 12
  ENST ID: ENST00000394903
  CDS Start-End: 151-1380
gttggcgcatactcaactctaagacctccggaacatggaatctgggcgtgcaccattattgacacctacaccagccgtccctttcttagaagacatacggtagcacttccaccctcgctcaaaactcgggaaaggaggggcggagggtggatgtcatcactccgcgcccggctgcccgcgacgcgccggcgggtggcgcagcccttcgctcgcccggcctccccctccctggttccgcgttctggttccgccatggaatccaacaaggatgaagctgagcgctgtatcagcatcgccctcaaggccatccagagcaaccagcccgaccgggcgctccgcttcctggagaaggcacagcggctgtatccgacgccgcgagttcgcgccctgattgagtccctcaaccagaaaccacagactgccggtgaccaacccccacccacagacacaacccatgccacccacaggaaagcaggtgggaccgatgccccctcggccaacggtgaagctggaggagagagcaccaaaggctacactgcagaacaggttgcagctgtgaaaagggtcaagcaatgtaaagattactatgagatcctgggggtgagcagaggggcctcggatgaggacctgaagaaggcctaccgcagactggccctcaaattccacccagacaagaaccacgcacctggtgccactgaagccttcaaagccattggcacagcatatgcggtactcagcaacccggagaagaggaagcagtatgaccagttcggcgatgacaagagccaggcggcccggcacggccatgggcatggggatttccaccgtggctttgaggccgacatctcccctgaagacctcttcaacatgttctttggcggcggcttcccttctagtaacgtccacgtctacagcaacggccgcatgcgctatacctaccagcaaaggcaggaccgcagggacaaccagggtgatggcgggctaggggtgtttgtgcagctgatgcctatcctcatcctgattctcgtgtcagctctcagccagctcatggtctccagtccaccctacagtctgagtccaagaccgtccgtgggccacatccacaggcgagtcactgaccacctgggtgtcgtctactatgtgggagacactttctccgaagagtacacaggctccagcctcaaaacagtcgagcggaatgtggaagatgattatatcgccaacctccggaacaactgctggaaggagaagcagcagaaggaaggcttgctgtaccgggcacgctactttggcgacacagatatgtaccacagagcacagaagatgggcacccccagctgcagccgactgtcagaggtgcaggcctccctgcatggatagtcctgggccagccacaccaccgaggtccaaactatgaaatccctggagaatttttggtgacatgcactgagccaaggtgatggactgtatatttgaggaaagacaaacaaagaaacaaaattaaaatggaattggaggccgaacgctgcacagctgccctctctctcacccagtaaatgcagaaagctcttaggacagacagaaaacctgccatggggctgcttccctccctcgcagggctggcggaggctccgcatcgcctctctcctaggatacagaaaccatggcaacgaaagtagaatgtaaaactcgcagcagatatcagtgggaagggctgggggagggggcacccagctgcctttcctccctcacaggagccaccaccagccacctctcaggagaagccagaggccctggccaaagataggaggaagaaagagaactctccatagaatgtaatttatagatgcgtgtatatgtatatatatctatttatatgtaaataggcatatatgaagatatatatatatatagtctactttttaaactctgcagggatttggttaagttgttgagctgatttcttccatgttttagaaaatgaggcctgtttggggaaggtaccctggtgatgtttttgctagacattagctgtagctgacagcataaggagagtcgcatcagagcttttcacagccccccgaaaccccagcctggttttgatggcagcagtaatcatgatagtgtgaacccgcgaaggcctcaggattatggttaacctggagaggagcaggccatggaggcaggtgccaggtcagtattgagtcacagtagaggccccacaaggacctgcttgggtgagaccacctctcccctctcagcagcgctggtgggctctttgtcctggtgcccaggagccctccagccccctgcccacagaagggaaggcctgcagagggggccaggatctacctaaccatttccccacccctaagtccctcagtgggctttgccttataggtgccacagggcacagctccatcattgccactggtttttcctaagtcatgcaccaaggacttcagaaagttcttcctccgagtcagtcagtggtgccgggaccccagggcagcctcctcgactcctgaagaaaaggcagtgcccgtggctgcctctgtcttcactcgctgttgatgtgaccgccaggcctcctctcgtaccttggacaaaggatacacctgaaccagaatagttttcttaccctcacattgaaatgaggattttgcttaaaacagcacttgccgccagtgggaggagggaggttttatttattcccacagtttctcctgggccttctggaatgaccatgttttcctgtggcggtgggtgtgtcattgcgcccgccgtcttccaaagccttacttccccaagctgccagccaggaggtgataaccaccctcccagagtttctctcggctctttttttaaaagtcccccaacaaataggattcttgctgggaaaggaagttcggtaaggaaatgtcaaatctggtttttaaacaaggtccaaccctgcaatgaagcagccacttcagcccagagagattataagaactgatgtggccagagtgcctacccactgtggccccggtgctctgcccccacgccccgaccatctggtcttggtagatgtccctagacgggctgagccatgtgcaataagaacatagatcctaaaggatcctctggaagctgtatttcttgaattagaattctcaaattgtacatctgttaatatatgtttattatgtgactggc

SEQ ID NO: 127647 - DNA, 3278 bp, Homo sapiens
  Payload ID: 4982
  Gene Symbol: DNAJB12
  Gene Name: DnaJ (Hsp40) homolog, subfamily B, member 12
  Uniprot ID: Q9NXW2
  ENST ID: ENST00000444643
  CDS Start-End: 334-1461
actccgaaggccccagtctcatcccgacggctaccacgtgaccttcctgagcttgggtttcctcctccggaagattagagggttggcgcatactcaactctaagacctccggaacatggaatctgggcgtgcaccattattgacacctacaccagccgtccctttcttagaagacatacggtagcacttccaccctcgctcaaaactcgggaaaggaggggcggagggtggatgtcatcactccgcgcccggctgcccgcgacgcgccggcgggtggcgcagcccttcgctcgcccggcctccccctccctggttccgcgttctggttccgccatggaatccaacaaggatgaagctgagcgctgtatcagcatcgccctcaaggccatccagagcaaccagcccgaccgggcgctccgcttcctggagaaggcacagcggctgtatccgacgccgcgagttcgcgccctgattgagtccctcaaccagaaaccacagactgccggtgaccaacccccacccacagacacaacccatgccacccacaggaaagcaggtgggaccgatgccccctcggccaacggtgaagctggaggagagagcaccaaaggctacactgcagaacaggttgcagctgtgaaaagggtcaagcaatgtaaagattactatgagatcctgggggtgagcagaggggcctcggatgaggacctgaagaaggcctaccgcagactggccctcaaattccacccagacaagaaccacgcacctggtgccactgaagccttcaaagccattggcacagcatatgcggtactcagcaacccggagaagaggaagcagtatgaccagttcggcgatgacaagagccaggcggcccggcacggccatgggcatggggatttccaccgtggctttgaggccgacatctcccctgaagacctcttcaacatgttctttggcggcggcttcccttctagtaacgtccacgtctacagcaacggccgcatgcgctatacctaccagcaaaggcaggaccgcagggacaaccagggtgatggcgggctaggggtgtttgtgcagctgatgcctatcctcatcctgattctcgtgtcagctctcagccagctcatggtctccagtccaccctacagtctgagtccaagaccgtccgtgggccacatccacaggcgagtcactgaccacctgggtgtcgtctactatgtgggagacactttctccgaagagtacacaggctccagcctcaaaacagtcgagcggaatgtggaagatgattatatcgccaacctccggaacaactgctggaaggagaagcagcagaaggaaggcttgctgtaccgggcacgctactttggcgacacagatatgtaccacagagcacagaagatgggcacccccagctgcagccgactgtcagaggtgcaggcctccctgcatggatagtcctgggccagccacaccaccgaggtccaaactatgaaatccctggagaatttttggtgacatgcactgagccaaggtgatggactgtatatttgaggaaagacaaacaaagaaacaaaattaaaatggaattggaggccgaacgctgcacagctgccctctctctcacccagtaaatgcagaaagctcttaggacagacagaaaacctgccatggggctgcttccctccctcgcagggctggcggaggctccgcatcgcctctctcctaggatacagaaaccatggcaacgaaagtagaatgtaaaactcgcagcagatatcagtgggaagggctgggggagggggcacccagctgcctttcctccctcacaggagccaccaccagccacctctcaggagaagccagaggccctggccaaagataggaggaagaaagagaactctccatagaatgtaatttatagatgcgtgtatatgtatatatatctatttatatgtaaataggcatatatgaagatatatatatatatagtctactttttaaactctgcagggatttggttaagttgttgagctgatttcttccatgttttagaaaatgaggcctgtttggggaaggtaccctggtgatgtttttgctagacattagctgtagctgacagcataaggagagtcgcatcagagcttttcacagccccccgaaaccccagcctggttttgatggcagcagtaatcatgatagtgtgaacccgcgaaggcctcaggattatggttaacctggagaggagcaggccatggaggcaggtgccaggtcagtattgagtcacagtagaggccccacaaggacctgcttgggtgagaccacctctcccctctcagcagcgctggtgggctctttgtcctggtgcccaggagccctccagccccctgcccacagaagggaaggcctgcagagggggccaggatctacctaaccatttccccacccctaagtccctcagtgggctttgccttataggtgccacagggcacagctccatcattgccactggtttttcctaagtcatgcaccaaggacttcagaaagttcttcctccgagtcagtcagtggtgccgggaccccagggcagcctcctcgactcctgaagaaaaggcagtgcccgtggctgcctctgtcttcactcgctgttgatgtgaccgccaggcctcctctcgtaccttggacaaaggatacacctgaaccagaatagttttcttaccctcacattgaaatgaggattttgcttaaaacagcacttgccgccagtgggaggagggaggttttatttattcccacagtttctcctgggccttctggaatgaccatgttttcctgtggcggtgggtgtgtcattgcgcccgccgtcttccaaagccttacttccccaagctgccagccaggaggtgataaccaccctcccagagtttctctcggctctttttttaaaagtcccccaacaaataggattcttgctgggaaaggaagttcggtaaggaaatgtcaaatctggtttttaaacaaggtccaaccctgcaatgaagcagccacttcagcccagagagattataagaactgatgtggccagagtgcctacccactgtggccccggtgctctgcccccacgccccgaccatctggtcttggtagatgtccctagacgggctgagccatgtgcaataagaacatagatcctaaaggatcctctggaagctgtatttcttgaattagaattctcaaattgtacatctgttaatatatgtttattatgtgactgg

SEQ ID NO: 127648 - DNA, 2369 bp, Homo sapiens
  Payload ID: 4982
  Gene Symbol: DNAJB12
  Gene Name: DnaJ (Hsp40) homolog, subfamily B, member 12
  ENST ID: ENST00000461919
  CDS Start-End: 1344-1862
aaaataaacataactcctttaagggagagaatgggcgctagacagggagacatttctgttcttcgggcgccagggaaaggcgcttccgtatcttcactccctctcacctctcgggctgagggtcagggaccactctcccaaaatgcaagccggcctttgcacccaccccagtccgccgcctcggactgtcctgaagccgggcccctcactcctcccgatgatgagattcggagcgggtggcctggtgggaggtgctgacctcagccaccgccagtcctccatcgcccgcaagagtccagcggcggtcagccatgtggacgccgaggctgctgagttgccctggacaggagcctcctgagccagggagggaagagtgaagctggctttacaactcatcacctcgcttcacccgggaaccctttcttttttctttaacctaagttttccaaggagtttttcttaatccacgctagaggggagagagacaccgggtggtgcttgtgatcaccactcagtaaaccgtctgggaataacaggcactccgaagggcccagtctcatcctgacggctaccacgtgaccttcctgagcttgggtttcctcctcgggaagattagagggttggcgcagataatgtgattggcaataatacccatagggctttgcagtttaggaagctccttcacctgtgccttctcacttgagcctgccagtcagggatgcagagcaaagatcattatctttattctatgggtgaggaaaatctctgaggtaagggatgcccaggatgacacagctagaaagtaaaatgttctgtgactctgtaaatgtttatgaaggaaaagaaatgaaattgaggaacagcagtcagcctcctaaccggccctgcccgcctgatgagattgagaaagcggaacgctggtggaagaggtagcctggactgctgaactttcctccctccggactcttgcaggttgatctttggcctgtttgcctccccttggagagggtttcgggctgtatttgccaggacacctgagggtcaagcaatgtaaagattactatgagatcctgggggtgagcagaggggcctcggatgaggacctgaagaaggcctaccgcagactggccctcaaattccacccagacaagaaccacgcacctggtgccactgaagccttcaaagccattggcacagcatatgcggtactcagcaacccggagaagaggaagcagtatgaccagttcggcgatgacaagagccaggcggcccggcacggccatgggcatggggatttccaccgtggctttgaggccgacatctcccctgaagacctcttcaacatgttctttggcggcggcttcccttctagtaacgtccacgtctacagcaacggccgcatgcgctatacctaccagcaaaggcaggaccgcagggacaaccagggtgatggcgggctaggggtgtttgtgcagctgatgcctatcctcatcctgattctcgtgtcagctctcagccagctcatggtctccagtccaccctacagtctgagtccaagaccgtccgtgggccacatccacaggcgagtcactgaccacctgggtgtcgtctactatgtgggagacactttctccgaagagtacacaggctccagcctcaaaacagtcgagcggaatgtggaagatgattatatcgccaacctccggaacaactgctggaaggagaagcagcagaaggaaggcttgctgtaccgggcacgctactttggcgacacagatatgtaccacagagcacagaagatgggcacccccagctgcagccgactgtcagagactatgaaatccctggagaatttttggtgacatgcactgagccaaggtgatggactgtatatttgaggaaagacaaacaaagaaacaaaattaaaatggaattggaggccgaacgctgcacagctgccctctctctcacccagtaaatgcagaaagctcttaggacagacagaaaacctgccatggggctgcttccctccctcgcagggctggcggaggctccgcatcgcctctctcctaggatacagaaaccatggcaacgaaagtagaatgtaaaactcgcagcagatatcagtgggaagggctgggggagggggcacccagctgcctttcctccctcacaggagccaccaccagccacctctcaggagaagccagaggccctggccaaagataggaggaagaaagagaactctccatagaatgtaatttatagatgcgtgtatatgtatatatatctatttatatgtaaataggcatatatgaagatatatatatatatagtctactttttaaactctgcagggatttggttaa

SEQ ID NO: 127649 - DNA, 2116 bp, Homo sapiens
  Payload ID: 4982
  Gene Symbol: DNAJB12
  Gene Name: DnaJ (Hsp40) homolog, subfamily B, member 12
  ENST ID: ENST00000463786
  CDS Start-End: 1-829
agctgtgaaaagggtcaagcaatgtaaagattactatgagatcctgggggtgagcagaggggcctcggatgaggacctgaagaaggcctaccgcagactggccctcaaattccacccagacaagaaccacgcacctggtgccactgaagccttcaaagccattggcacagcatatgcggtactcagcaacccggagaagaggaagcagtatgaccagttcggcgatgacaagagccaggcggcccggcacggccatgggcatggggatttccaccgtggctttgaggccgacatctcccctgaagacctcttcaacatgttctttggcggcggcttcccttctagtaacgtccacgtctacagcaacggccgcatgcgctatacctaccagcaaaggcaggaccgcagggacaaccagggtgatggcgggctaggggtgtttgtgcagctgatgcctatcctcatcctgattctcgtgtcagctctcagccagctcatggtctccagtccaccctacagtctgagtccaagaccgtccgtgggccacatccacaggcgagtcactgaccacctgggtgtcgtctactatgtgggagacactttctccgaagagtacacaggctccagcctcaaaacagtcgagcggaatgtggaagatgattatatcgccaacctccggaacaactgctggaaggagaagcagcagaaggaaggcttgctgtaccgggcacgctactttggcgacacagatatgtaccacagagcacagaagatgggcacccccagctgcagccgactgtcagaggtgcaggcctccctgcatggatagtcctgggccagccacaccaccgaggtccaagtatgagccagggctgcctccaccctgcaactcctggcagctttggccctggtcatgagcagaggagggagggggagaaagggaggaagcctggtgattgtggcaaagactcctgtccccagcctgacctccagcctccagagaccgagcagctgtggggcctgctgggaaaccaaggtcggtttccgccctctagcgatgctgtcctccccactcctccgctctgctccctggctccaggggtgtgggggaccccagaaccaggcagagtgggaacttgaaactgttgctgagggccacccggggcttcttggtccactccagccatcagtcagcacggccctttctccagcacagcagactattgtccgtgccctggtatttaggccatcacatatggtggggcccaagagagccccatatgcacactgcctgcctgataccaggaagaaccatgtgggaataggtgggccaagagccctcccctttctccatccctccagctaggaggaaatggagcaagatgaacaggcagccacgaggtgggtgggagctggcagtcttggtggcggcaggggccgcgggccctgaccacccccctctggtgggatctgaggcactctctcgaatgccgtcacacctggcagcctggaagccacaggcatccggccttgcccaggcatctcgcctgcggtctgaggaagggaacagaaggtcatgagttcagggtcagacgcagccgctcagcacaggaggggtggaggggaaatgagagttgctggtagcaggctccctccttctgcagcccggcgaatgggggcgctgggctctgttcccagcgtttgccagaggtggccacttcagccaagcccagagaagtgtgggcagaagcagtgaaggttcttctctgtgtgggtgccctgcccaccccctcctttgcctgtgtcctcccggcctggatccatggctgactctgcctggaggccatttgtgcctgcctctgtgctgccgcaggagggcaggccgcaagtggggttggtgggggtcgagcgggcagcacggtgcagcggtgcagtggcaaggggggctacttgtgtggcataagctagaggagccggtgccgcctgaatgccgagctaactgttgccactctcctccccagactatgaaatccctggagaatttttggtgacatgcactgagccaaggtgatggactgtatatttgaggaaagacaaacaaagaaacaaaattaaa

SEQ ID NO: 127650 - DNA, 1875 bp, Homo sapiens
  Payload ID: 4983
  Gene Symbol: DNAJB13
  Gene Name: DnaJ (Hsp40) homolog, subfamily B, member 13
  Uniprot ID: P59910
  ENST ID: ENST00000339764
  CDS Start-End: 752-1702
taatgtaagatgttaataataggggaatgtgaatgcagtggctcacacctgtaatcccagcactttgggaggccaagccgagcccaagagttcaagaccagtctgggcaacatggtgaaaccccatctctacaaaacatacaaaaattagccaggcatggtagtgcacgcctgtgtctcagctacttggaaggctgaggtggaagaatcccttgagcctgggaggttgagactgcagtgaggtgtgatcctgccactgcccaccagcctgggtgacagagtgaagaccctgtctcaaaaacatgataatgataataataataataaaataggagaatgtggatgtgaggtatatgggaactctctgtactgtcttctcaacttttctaaactctaaaactgttctaaaataaatgtatttttaaaaaattagccaaatgcatttcttctaaaacctttttattaaaactaattactgctctctttaaaaacaaaaacaaaataaaacagagccctgtgagtcttcaatttccgagttgagtgacctttcacagggtcgcagaatcagccccagctctcccccagtcctttcactgactcctctctgtggcagagctgaaatttgtttagggaagtgggactacaactcccagagtgcacctgtgcggttgtcaggagcaaccaaggaagccaactaacagccttgctagagtctgaggactatccagggcctgactgccagctagccagccatgggccaggattattactctgtgctcgggatcactcgcaattcagaggatgcccagatcaagcaggcgtaccgcagactcgcccttaagcaccacccgttgaagtcaaatgagccgtcttcagcagagattttcaggcaaatagcagaggcctacgacgtgctgagtgaccccatgaagagaggcatctacgacaagtttggagaagagggcctgaagggtgggattcctttggagtttggatcccagaccccatggacaactggttacgtcttccatggcaaacctgaaaaggtgttccacgagttctttggtggaaacaaccccttcagtgagttttttgatgcagaaggaagtgaggtagatttgaactttggggggctccagggccgaggggtcaagaagcaggacccccaagtcgaacgggatctctacctgtccctggaggacttattctttggctgcaccaaaaaaattaagatctccagaagggtgctgaacgaggatgggtactcctccaccatcaaggacaagatcctgaccattgatgtgaagcccggttggaggcagggcacacgcatcacctttgagaaggaaggggaccagggccccaacatcatcccagcagacatcattttcatcgtaaaggagaagctacaccctcgcttccgcagggagaatgacaacctcttcttcgtgaaccccatccctcttggcaaggctctcacctgctgcactgtggaggtgaggaccctagatgaccgtctgctcaacatccccatcaatgacatcatccaccccaaatacttcaagaaggtgccaggggaggggatgccattgccggaggaccccactaagaaaggggatctcttcatcttcttcgacatccagttccccacccgcctcacaccccagaagaagcagatgctgcgccaggcattgctgacatgactgtggtgggctggagcaggggtgagaggaggctagccgggcctcaccccacccctacccgccacagcctcagggtgtgcaggggagcctgctgcacagatatgatacaagggtgggatggcgcagggcttaaactgacataataaagatctatttcctgtcctccagctaca

SEQ ID NO: 127651 - DNA, 1779 bp, Homo sapiens
  Payload ID: 4983
  Gene Symbol: DNAJB13
  Gene Name: DnaJ (Hsp40) homolog, subfamily B, member 13
  Uniprot ID: P59910
  ENST ID: ENST00000543947
  CDS Start-End: 1249-1674
agtgcaggagtgccctctgcagccttcccaactgggacaggctctttcccttcctttctttcagttcagccccatccccgtgggaactggaaaggctctgaatgggaggagtctcttctgaattcttccttctgggctttaccagaccatattcccaggatttcatcagggtgcatgcctcgtgcataagaaagaacagtgggcatggagggtgggctgggagatagtccccaaggtgacgggttgaggaagaccctcagtgcctcatgtctagtccttggcttggccctgtcccatggcccagccctgtgccaggcataagagcaagccccctccacctttgcccagcagaggagatgccgatgcggccatgctttccacagatggaacccatctggacatgcgactggggagtggaaggatccccagtggggaatgcactgggggaggcttagatatgttgactttcatttctctctttgggattaagagacttgctggaggctcagggccgggcctctgggatttggagagaggaatggagtacattttcaccatgtatctgttagtggccagggctggagctgtgtgtttgatcaactaatggtgactgcttggcatctcagcccccagccccagtctcatggcatcctctgccatactggaatcataagttcttggttgtcatggcaacaggatgggagtgggagtggctcagggcaggctctccccattgctggaggctcttcccattgctagaggattgagcccaagtacaaatcccatagagcatctttcacgtgtgcaaaggtcacctgagtgttcatgaaaatctgagcaaatctcgactgtactcatggaagtcctaagcagacctccccacacctgatatgttgctataggtgctgaacgaggatgggtactcctccaccatcaaggacaagatcctgaccattgatgtgaagcccggttggaggcagggcacacgcatcacctttgagaaggaaggggaccagcgcccagaagagacctcagcagagttttggtgacttaatgaagtttgggacaggggtgtcatgcctggagttactagcaagacagagacatacgggcagttgcctgacgcccagcttagtgttccacctgcctgccgtctgaggaagcctctccgcccctccagctgagtgtgtctattttgggcatgctcagtacagaagtaattctggggggattcatttggatgaagacatggagacaagtagaggcaggaacttggccaaggtcacacggccaactagtccttgtcaccttttggcgtcccctgcccagggccccaacatcatcccagcagacatcattttcatcgtaaaggagaagctacaccctcgcttccgcagggagaatgacaacctcttcttcgtgaaccccatccctcttggcaaggctctcacctgctgcactgtggaggtgaggaccctagatgaccgtctgctcaacatccccatcaatgacatcatccaccccaaatacttcaagaaggtgccaggggaggggatgccattgccggaggaccccactaagaaaggggatctcttcatcttcttcgacatccagttccccacccgcctcacaccccagaagaagcagatgctgcgccaggcattgctgacatgactgtggtgggctggagcagggctacacccacgagagtacattggagaggagcttcatattagcccttcttgtggggcacagggaagaaagaggcctaaggagctg

SEQ ID NO: 127652 - DNA, 912 bp, Homo sapiens
  Payload ID: 4983
  Gene Symbol: DNAJB13
  Gene Name: DnaJ (Hsp40) homolog, subfamily B, member 13
  Uniprot ID: P59910
  ENST ID: ENST00000537753
  CDS Start-End: 371-796
tctgggtctctggatacaatttctcttactcctctccctacctcctgcagagttttttgatgcagaaggaagtgaggtagatttgaactttggggggctccagggccgaggggtcaagaagcaggacccccaagtcgaacgggatctctacctgtccctggaggacttattctttggctgcaccaaaaaaattaagatctccagaagggtgctgaacgaggatgggtactcctccaccatcaaggacaagatcctgaccattgatgtgaagcccggttggaggcagggcacacgcatcacctttgagaaggaaggggaccaggcccttccagaaaacctgctctcatctccccattgtacagatgaagacatggagacaagtagaggcaggaacttggccaaggtcacacggccaactagtccttgtcaccttttggcgtcccctgcccagggccccaacatcatcccagcagacatcattttcatcgtaaaggagaagctacaccctcgcttccgcagggagaatgacaacctcttcttcgtgaaccccatccctcttggcaaggctctcacctgctgcactgtggaggtgaggaccctagatgaccgtctgctcaacatccccatcaatgacatcatccaccccaaatacttcaagaaggtgccaggggaggggatgccattgccggaggaccccactaagaaaggggatctcttcatcttcttcgacatccagttccccacccgcctcacaccccagaagaagcagatgctgcgccaggcattgctgacatgactgtggtgggctggagcaggggtgagaggaggctagccgggcctcaccccacccctacccgccacagcctcagggtgtgcaggggagcctgctgcacagatatgatacaagggtgg

SEQ ID NO: 127653 - DNA, 776 bp, Homo sapiens
  Payload ID: 4983
  Gene Symbol: DNAJB13
  Gene Name: DnaJ (Hsp40) homolog, subfamily B, member 13
  ENST ID: ENST00000542350
  CDS Start-End: 1-652
acaatttctcttactcctctccctacctcctgcagagttttttgatgcagaaggaagtgaggtagatttgaactttggggggctccagggccgaggggtcaagaagcaggacccccaagtcgaacgggatctctacctgtccctggaggacttattctttggctgcaccaaaaaaattaagatctccagaagggtgctgaacgaggatgggtactcctccaccatcaaggacaagatcctgaccattgatgtgaagcccggttggaggcagggcacacgcatcacctttgagaaggaaggggaccagggccccaacatcatcccagcagacatcattttcatcgtaaaggagaagctacaccctcgcttccgcagggagaatgacaacctcttcttcgtgaaccccatccctcttggcaaggctctcacctgctgcactgtggaggtgaggaccctagatgaccgtctgctcaacatccccatcaatgacatcatccaccccaaatacttcaagaaggtgccaggggaggggatgccattgccggaggaccccactaagaaaggggatctcttcatcttcttcgacatccagttccccacccgcctcacaccccagaagaagcagatgctgcgccaggcattgctgacatgactgtggtgggctggagcaggggtgagaggaggctagccgggcctcaccccacccctacccgccacagcctcagggtgtgcaggggagcctgctgcacagatatgatacaagggtgggatggcgc

SEQ ID NO: 127654 - DNA, 2617 bp, Homo sapiens
  Payload ID: 4984
  Gene Symbol: DNAJB14
  Gene Name: DnaJ (Hsp40) homolog, subfamily B, member 14
  ENST ID: ENST00000334223
  CDS Start-End: 18-155
ggaagaaggagcaagctatggaggggaacagggatgaggctgagaaatgtgtcgagatcgcccgggaggccctgaacgccggcaaccgcgagaaggcccagcgcttcctgcagaaggccgagaagctctacccactgccctcggcccgcgcataaacaaatgtaaaaattactatgaagtacttggagttacgaaagatgctggtgatgaagatttgaaaaaagcttatagaaagcttgctttgaagtttcatccagacaaaaaccatgcacctggagcaacagatgcttttaaaaagattggaaatgcttatgctgttttaagtaatccagaaaagcgaaaacagtatgacctcacgggcaatgaagaacaagcatgtaaccaccaaaacaatggcagatttaatttccatagaggttgtgaagctgatataactccagaagacttgtttaatatattttttgggggtggatttccttcaggtagtgtacattctttttcaaatggaagagctggttatagccaacaacatcagcatcgacatagtggacatgaaagagaagaggaaagaggagatggaggtttttctgtgtttatccagctgatgcccataattgtattgatcctcgtgtcattattaagccagttgatggtctctaatcctccttattccttatatcccagatctggaactgggcaaactattaaaatgcaaacagaaaacttgggtgttgtttattatgtcaacaaggacttcaaaaatgaatataaaggaatgttattacaaaaggtagaaaagagtgtggaggaagattatgtgactaatattcgaaataactgctggaaagaaagacaacaaaaaacagatatgcagtatgcagcaaaagtataccgtgatgatcgactccgaaggaaggcagatgccttgagcatggacaactgtaaagaattagagcggcttaccagtctttataaaggaggatgaactggaatttttatttataccttttagcgtactctttattttttctgtaagtaagtttggtttcatcatgagggatgaaggaaaagatttgatactgaaaactaaactgaatagttggttcctgaaatcttggactgtttatgacctactggctcctttaaatagtaactgaaaactaaaatggaatattttagttaacgcttctacaagtattttcattttaaaagcttacatgattcctaactaaagtgtcatgagaaaggattatcacacctgtagcaatttccagttttagtgattctccattttttcccttgtcatgtaaatatttatggaatgatcattttgtgtacatacaggttactgcttttttatttaaattcttttagtgtttagctccatgagacacttcagtttaaattgatggaataaatgttatatgacacatttacattttccttatcaaggtgtcaaatatgtggactttaaacaatgaaactttttcaaaaagaaaaaacaaaaactttaactttgtgtaaaatcttatagtattatcagcttagagggaattgatatttttaatattgccgttatattccaaaatatatattgagataaatgaactggtgtagaatatcagtttgctatttagttttatgaattactatacatatacatgcatagaaatgaaatgctatactgataaattttaaagaaaatatgaggaaatggctataaatattaaactaaaagggtcttcaacagtaaagtgcagttatgtcatttaaaattccaatactttaaaggccaccaaattttgatgtatatgtccttgaagggctgctaaaatttatgaagaggactcacattttcccccatagaaatttgcagtttcttggtgatcatttaagcaggatccaaagaagttcctttacaaataagtaataagaaaaatgagtactaaaatacagctttgtgccttttaaccctatgccaactcctaaacatataagtagattacagtatacttatctgatcagagcatgatctgtttggccacatgcaagtgtgagcagaaatagagcagcacgtagaatagtaacttaaagcaagtcatcctttaaaaattctgagctaaaatctatttaccattgagtaattgaattaatcccataggaataagctccttgtaagtaaatccatgatatgaattagaaaaaaaaaacagctggaaattgaagtttttgatgcctgtatactggatatgaaactatttgatttctagtcttctgtgtttagcagttgtaatattttaatgattttgcttcatactcggttaatggaacataaacatatctttgatacttctttgtgagtgagagaatgctagatagggtggctttgttctttgtttaagttttttttcctgaatgtagttaatttatggcatctgttgaataaaactgctaaaatgacctcttaaaaatgttctgttgtatccccttttccaggtgaatcaatagaaatgcctgattgaattagtaggttaaactaaacaacatactgtcataggaaaactggagagcttaaccaacttgctcttagaaatgttaccttaaaaaaaaaaaaaaa

SEQ ID NO: 127655 - DNA, 998 bp, Homo sapiens
  Payload ID: 4984
  Gene Symbol: DNAJB14
  Gene Name: DnaJ (Hsp40) homolog, subfamily B, member 14
  ENST ID: ENST00000455208
  CDS Start-End: 1-126
ttttcaaatggaagagctggttatagccaacaacatcagcatcgacatagtggacatgaaagagaagaggaaagaggagatcaatttaattacatgaagtggaaaggtaaatggaaagagcactagactagaaattaaaaggcctggcccccagctttgccactcatcagctcccatcttctaccctcaaatccaagggaggtttttctgtgtttatccagctgatgcccataattgtattgatcctcgtgtcattattaagccagttgatggtctctaatcctccttattccttatatcccagatctggaactgggcaaactattaaaatgcaaacagaaaacttgggtgttgtttattatgtcaacaaggacttcaaaaatgaatataaaggaatgttattacaaaaggtagaaaagagtgtggaggaagattatgtgactaatattcgaaataactgctggaaagaaagacaacaaaaaacagatatgcagtatgcagcaaaagtataccgtgatgatcgactccgaaggaaggcagatgccttgagcatggacaactgtaaagaattagagcggcttaccagtctttataaaggaggatgaactggaatttttatttataccttttagcgtactctttattttttctgtaagtaagtttggtttcatcatgagggatgaaggaaaagatttgatactgaaaactaaactgaatagttggttcctgaaatcttggactgtttatgacctactggctcctttaaatagtaactgaaaactaaaatggaatattttagttaacgcttctacaagtattttcattttaaaagcttacatgattcctaactaaagtgtcatgagaaaggattatcacacctgtagcaatttccagttttagtgattctccattttttcccttgtcatgtaaatatttatggaatgatcattttgtgtacatacaggttactgcttttttatttaaattcttttagtgtt

SEQ ID NO: 127656 - DNA, 662 bp, Homo sapiens
  Payload ID: 4984
  Gene Symbol: DNAJB14
  Gene Name: DnaJ (Hsp40) homolog, subfamily B, member 14
  ENST ID: ENST00000426476
  CDS Start-End: 1-317
gggatgaggctgagaaatgtgtcgagatcgcccgggaggccctgaacgccggcaaccgcgagaaggcccagcgcttcctgcagaaggccgagaagctctacccactgccctcggcccgcgcactattggaaataattatgaaaaatggaagcacggctggaaatagccctcattgccgaaaaccatcaggtagtggcgatcaaagcaagcctaattgcacaaaggacagcacatctggtagtggtgaaggtggaaaaggctataccaaagaccaagtagatggagttctcagagctttatggatattggaacattgatatgggatggtggacctgtacctaacacacacataaacaaatgtaaaaattactatgaagtacttggagttacgaaagatgctggtgatgaagatttgaaaaaagcttatagaaagcttgctttgaagtttcatccagacaaaaaccatgcacctggagcaacagatgcttttaaaaagattggaaatgcttatgctgttttaagtaatccagaaaagcgaaaacagtatgacctcacgggcaatgaagaacaagcatgtaaccaccaaaacaatggcagatttaatttccatagaggttgtgaagctgatataactccagaagacttgtttaatatattttttg

SEQ ID NO: 127657 - DNA, 842 bp, Homo sapiens
  Payload ID: 4984
  Gene Symbol: DNAJB14
  Gene Name: DnaJ (Hsp40) homolog, subfamily B, member 14
  ENST ID: ENST00000398991
  CDS Start-End: 25-162
aggaaacggaagaaggagcaagctatggaggggaacagggatgaggctgagaaatgtgtcgagatcgcccgggaggccctgaacgccggcaaccgcgagaaggcccagcgcttcctgcagaaggccgagaagctctacccactgccctcggcccgcgcataaacaaatgtaaaaattactatgaagtacttggagttacgaaagatgctggtgatgaagatttgaaaaaagcttatagaaagcttgctttgaagtttcatccagacaaaaaccatgcacctggagcaacagatgcttttaaaagtatgagttaataccttgatgttgtttagattggaaatgcttatgctgttttaagtaatccagaaaagcgaaaacagtatgacctcacgggcaatgaagaacaagcatgtaaccaccaaaacaatggcagatttaatttccatagaggttgtgaagctgatataactccagaagacttgtttaatatattttttgggggtggatttccttcaggtagtgtacattctttttcaaatggaagagctggttatagccaacaacatcagcatcgacatagtggacatgaaagagaagaggaaagaggagatggaggtttttctgtgtttatccagctgatgcccataattgtattgatcctcgtgtcattattaagccagttgatggtctctaatcctccttattccttatatcccagatctggaactgggcaaactattaaaatgcaaacagaaaacttgggtgttgtttattatgtcaacaaggacttcaaaaatgaatataaaggaatgttattacaaaaggtagaaaagagtgtggag

SEQ ID NO: 127658 - DNA, 6075 bp, Homo sapiens
  Payload ID: 4984
  Gene Symbol: DNAJB14
  Gene Name: DnaJ (Hsp40) homolog, subfamily B, member 14
  Uniprot ID: Q8TBM8
  ENST ID: ENST00000442697
  CDS Start-End: 156-1295
gtccgcccgggccgtcgcagccgctgccgcggtcccctgcgctcctccccgctgccgccgcacgcccccagccggtcccgcctcgcctcctccgcggcggcggcttccgcccttcttagctgcgctgccggaggaaacggaagaaggagcaagctatggaggggaacagggatgaggctgagaaatgtgtcgagatcgcccgggaggccctgaacgccggcaaccgcgagaaggcccagcgcttcctgcagaaggccgagaagctctacccactgccctcggcccgcgcactattggaaataattatgaaaaatggaagcacggctggaaatagccctcattgccgaaaaccatcaggtagtggcgatcaaagcaagcctaattgcacaaaggacagcacatctggtagtggtgaaggtggaaaaggctataccaaagaccaagtagatggagttctcagcataaacaaatgtaaaaattactatgaagtacttggagttacgaaagatgctggtgatgaagatttgaaaaaagcttatagaaagcttgctttgaagtttcatccagacaaaaaccatgcacctggagcaacagatgcttttaaaaagattggaaatgcttatgctgttttaagtaatccagaaaagcgaaaacagtatgacctcacgggcaatgaagaacaagcatgtaaccaccaaaacaatggcagatttaatttccatagaggttgtgaagctgatataactccagaagacttgtttaatatattttttgggggtggatttccttcaggtagtgtacattctttttcaaatggaagagctggttatagccaacaacatcagcatcgacatagtggacatgaaagagaagaggaaagaggagatggaggtttttctgtgtttatccagctgatgcccataattgtattgatcctcgtgtcattattaagccagttgatggtctctaatcctccttattccttatatcccagatctggaactgggcaaactattaaaatgcaaacagaaaacttgggtgttgtttattatgtcaacaaggacttcaaaaatgaatataaaggaatgttattacaaaaggtagaaaagagtgtggaggaagattatgtgactaatattcgaaataactgctggaaagaaagacaacaaaaaacagatatgcagtatgcagcaaaagtataccgtgatgatcgactccgaaggaaggcagatgccttgagcatggacaactgtaaagaattagagcggcttaccagtctttataaaggaggatgaactggaatttttatttataccttttagcgtactctttattttttctgtaagtaagtttggtttcatcatgagggatgaaggaaaagatttgatactgaaaactaaactgaatagttggttcctgaaatcttggactgtttatgacctactggctcctttaaatagtaactgaaaactaaaatggaatattttagttaacgcttctacaagtattttcattttaaaagcttacatgattcctaactaaagtgtcatgagaaaggattatcacacctgtagcaatttccagttttagtgattctccattttttcccttgtcatgtaaatatttatggaatgatcattttgtgtacatacaggttactgcttttttatttaaattcttttagtgtttagctccatgagacacttcagtttaaattgatggaataaatgttatatgacacatttacattttccttatcaaggtgtcaaatatgtggactttaaacaatgaaactttttcaaaaagaaaaaacaaaaactttaactttgtgtaaaatcttatagtattatcagcttagagggaattgatatttttaatattgccgttatattccaaaatatatattgagataaatgaactggtgtagaatatcagtttgctatttagttttatgaattactatacatatacatgcatagaaatgaaatgctatactgataaattttaaagaaaatatgaggaaatggctataaatattaaactaaaagggtcttcaacagtaaagtgcagttatgtcatttaaaattccaatactttaaaggccaccaaattttgatgtatatgtccttgaagggctgctaaaatttatgaagaggactcacattttcccccatagaaatttgcagtttcttggtgatcatttaagcaggatccaaagaagttcctttacaaataagtaataagaaaaatgagtactaaaatacagctttgtgccttttaaccctatgccaactcctaaacatataagtagattacagtatacttatctgatcagagcatgatctgtttggccacatgcaagtgtgagcagaaatagagcagcacgtagaatagtaacttaaagcaagtcatcctttaaaaattctgagctaaaatctatttaccattgagtaattgaattaatcccataggaataagctccttgtaagtaaatccatgatatgaattagaaaaaaaaaacagctggaaattgaagtttttgatgcctgtatactggatatgaaactatttgatttctagtcttctgtgtttagcagttgtaatattttaatgattttgcttcatactcggttaatggaacataaacatatctttgatacttctttgtgagtgagagaatgctagatagggtggctttgttctttgtttaagttttttttcctgaatgtagttaatttatggcatctgttgaataaaactgctaaaatgacctcttaaaaatgttctgttgtatccccttttccaggtgaatcaatagaaatgcctgattgaattagtaggttaaactaaacaacatactgtcataggaaaactggagagcttaaccaacttgctcttagaaatgttaccttaaaaaaaaaaaaaaagcagtgcttaagagaaaatacaattttaattattttgttgagcctgcagagtaagtttttaaaaatataagttcatagcattttaattaactttgaaagttcatatgcatcagaaaatttatgaaaatttgaatgaaaaaaatttcatctatttatttttctaattttaatggcaaatttacactattatggctgataattctgtgaacttaccttcttgttgactgattctttttcccttaatcccagctttaaggagataggtgaagttattgtacaaagttaagtgataccataaagtatatattataaagtcatacatggcttttggacagtattatatttcagttgcagtgctgcattccattaaatttcataaaatgctagggaaaatgtgtttgataaaattttctgcagtgagaaatgacagactgagtgcctgacaatttaagccacatatgaagtatgcaagtaaagattcagtccttaatgtcatctatatcatggtataaaagctcaacaagtatcttataatttggagttaactttataaagtaagaagagtttggatatcttgataaaagattttcatgtttgctgctttttttataataaaaatcccaacattttgccatcttatgtttagctacatgaacttcgcaatttcatcggctcattctaatgaccacctaaaagtcctcaatctttgaatattgctttattagctcctctaactggtattctaacagtttagcagcacttatatttattaatgctttacatttttacccctttttgtgtaaacacaaatacacccatgcatatacacacaaacattattgtccttgtgagggtttgggggaaatgaaaaatagtacctttctcctcttcttttgattccttagttcccaaatagactggtgctagtcatttagtcatctgtaaatttcgaaatgtagtttgattaaatgtgaactgaattctcagcaatgaaaaatgtcaagttgaattcatctaataagtgaaaataatatattttgtaaacagattacatttgaacacctaaataagtatttgtttcataatcattacatgcttgtttatgatttacaaagatttggtagagaaaagtacagtccttaaggcatatatatgccaatgcattaaactactcagcttttgtgccagctcaggtgttcataggaacaggaatgtggaataccagctttttactttaattatacttttatgctgaatttttcttccagttaaacctttaattacactagtatgtaaagtagttactgagaaaaataagtttttgatttcccttctgttgatctgtaacatttttaaatgaagctatttaacacatgacatgctaatgttacttaatggattcctatgtatttcattaaaaaaaagtctcccacctgtgttaagacagctaaatatttcttgatgttggcttgaggaccaagtgagccatcttgccagttaagcaagttttatatcagaggaccaaatggttaagaagagaatttgtacatttcttgagcttccccatgtgaagcttgggttcagtactatcctattactatccatcttcataatgagtgaagcaaactgaaagggaattcataatcttttttcttatctgaacagaaaaactaatgaaaatcaacaataaatctttattttaattttcattcaacagctgaaaaaccatgtctgttgaccacattggaccattgcctagttaaaatccataaaattccctataaaccaatgaaaagaaacttgtctggcaataatttccaacattttaaattctaatttttagttacaaagaaaaaggatagaatgaggcttttcaaggaattcttgctcatcccttcaattatttggcaggtaaaacagtcctagaattcagcttcctttttggttttattactattaaatagatactttcatataaatggaaacacttttcctcaaaacattaattcaaaacatactccttatattaaggattatagcaccatattttttgtatattccctatgtgtaactttttcctgttggtatgtgatatttttcatttaatatgactatctgctggtgttggggccaatagatttgtgaatattctgtggatgtgtctatgtataggtgtatatatatatatatatatttttttttttttttcccagctaattacctcaaatgtgtgattgtttaatatataccacactatgtttgcacagagcagggcttccattagcagtggatatttttatgtctgactttgaaaatcagtcaacacaatttcattggtgtgaattatttgttgctctttttcatattttaatggagagattcctattataaggcccatgcttcaaacataattatatctttctatatccagccatctggaaatacataggggtaagaagtatttcttgaaatgtccttgtttagtaagttagtaaaaactgggatgactagttgccaagatgtcttgtaactgcatagcagatgacacctggcatggcaagtctcattcacttcagcacaacactctgtacatttcagtctgatattctactttgccatttaaggacaccattaaaatcatagagattttcagtgacattggagtattgtaattattactttcaaaaaattatttttaataggatgattaaaccaatgagaagaaacacacataaatgatattttgcagtttatctgtattaagaaatgcttcttgccaatttctagttttagtttttggattgctacataagactttctttccatttactttatgtgtttttaaaagctgcaggtaatttttaaggtttgatggaattataatggaagccttgtataagttaaatgaaattggtaaaggagagcttactttgtctataatgcattcaggattaaaaattagatttcaaaatgaaatgtctgatttgtaaaatatttaatgttatatcagacttacataaaattttctgtgagaactcaaatgcatttgatttttaatgaatgttctgaatgaaatatgaatttttgtctttcagtctctgtagtttatctcaatatattaataaaaaggtctgttctcactgtaaaa

SEQ ID NO: 127659 - DNA, 3442 bp, Homo sapiens
  Payload ID: 4984
  Gene Symbol: DNAJB14
  Gene Name: DnaJ (Hsp40) homolog, subfamily B, member 14
  ENST ID: ENST00000420137
  CDS Start-End: 1-146
agcctaattgcacaaaggacagcacatctggtagtggtgaaggtggaaaaggctataccaaagaccaagtagatggagttctcagccttgaaagaaaaagaagagtagtccaaggtgtggtagaaataaggaaggaagagcattgatgcctctttgttctggggatttttctgaagaaagccatgttatcttgttggttagcacgattatgcaaacaagttgctcagtgacaatttggctcaatggggagaagtcttgcaataatactgcatccattgcataaagctttatggatattggaacattgatatgggatggtggacctgtacctaacacacacataaacaaatgtaaaaattactatgaagtacttggagttacgaaagatgctggtgatgaagatttgaaaaaagcttatagaaagcttgctttgaagtttcatccagacaaaaaccatgcacctggagcaacagatgcttttaaaaagattggaaatgcttatgctgttttaagtaatccagaaaagcgaaaacagtatgacctcacgggcaatgaagaacaagcatgtaaccaccaaaacaatggcagatttaatttccatagaggttgtgaagctgatataactccagaagacttgtttaatatattttttgggggtggatttccttcaggtagtgtacattctttttcaaatggaagagctggttatagccaacaacatcagcatcgacatagtggacatgaaagagaagaggaaagaggagatggaggtttttctgtgtttatccagctgatgcccataattgtattgatcctcgtgtcattattaagccagttgatggtctctaatcctccttattccttatatcccagatctggaactgggcaaactattaaaatgcaaacagaaaacttgggtgttgtttattatgtcaacaaggacttcaaaaatgaatataaaggaatgttattacaaaaggtagaaaagagtgtggaggaagattatgtgactaatattcgaaataactgctggaaagaaagacaacaaaaaacagatatgcagtatgcagcaaaagtataccgtgatgatcgactccgaaggaaggcagatgccttgagcatggacaactgtaaagaattagagcggcttaccagtctttataaaggaggatgaactggaatttttatttataccttttagcgtactctttattttttctgtaagtaagtttggtttcatcatgagggatgaaggaaaagatttgatactgaaaactaaactgaatagttggttcctgaaatcttggactgtttatgacctactggctcctttaaatagtaactgaaaactaaaatggaatattttagttaacgcttctacaagtattttcattttaaaagcttacatgattcctaactaaagtgtcatgagaaaggattatcacacctgtagcaatttccagttttagtgattctccattttttcccttgtcatgtaaatatttatggaatgatcattttgtgtacatacaggttactgcttttttatttaaattcttttagtgtttagctccatgagacacttcagtttaaattgatggaataaatgttatatgacacatttacattttccttatcaaggtgtcaaatatgtggactttaaacaatgaaactttttcaaaaagaaaaaacaaaaactttaactttgtgtaaaatcttatagtattatcagcttagagggaattgatatttttaatattgccgttatattccaaaatatatattgagataaatgaactggtgtagaatatcagtttgctatttagttttatgaattactatacatatacatgcatagaaatgaaatgctatactgataaattttaaagaaaatatgaggaaatggctataaatattaaactaaaagggtcttcaacagtaaagtgcagttatgtcatttaaaattccaatactttaaaggccaccaaattttgatgtatatgtccttgaagggctgctaaaatttatgaagaggactcacattttcccccatagaaatttgcagtttcttggtgatcatttaagcaggatccaaagaagttcctttacaaataagtaataagaaaaatgagtactaaaatacagctttgtgccttttaaccctatgccaactcctaaacatataagtagattacagtatacttatctgatcagagcatgatctgtttggccacatgcaagtgtgagcagaaatagagcagcacgtagaatagtaacttaaagcaagtcatcctttaaaaattctgagctaaaatctatttaccattgagtaattgaattaatcccataggaataagctccttgtaagtaaatccatgatatgaattagaaaaaaaaaacagctggaaattgaagtttttgatgcctgtatactggatatgaaactatttgatttctagtcttctgtgtttagcagttgtaatattttaatgattttgcttcatactcggttaatggaacataaacatatctttgatacttctttgtgagtgagagaatgctagatagggtggctttgttctttgtttaagttttttttcctgaatgtagttaatttatggcatctgttgaataaaactgctaaaatgacctcttaaaaatgttctgttgtatccccttttccaggtgaatcaatagaaatgcctgattgaattagtaggttaaactaaacaacatactgtcataggaaaactggagagcttaaccaacttgctcttagaaatgttaccttaaaaaaaaaaaaaaagcagtgcttaagagaaaatacaattttaattattttgttgagcctgcagagtaagtttttaaaaatataagttcatagcattttaattaactttgaaagttcatatgcatcagaaaatttatgaaaatttgaatgaaaaaaatttcatctatttatttttctaattttaatggcaaatttacactattatggctgataattctgtgaacttaccttcttgttgactgattctttttcccttaatcccagctttaaggagataggtgaagttattgtacaaagttaagtgataccataaagtatatattataaagtcatacatggcttttggacagtattatatttcagttgcagtgctgcattccattaaatttcataaaatgctagggaaaatgtgtttgataaaattttctgcagtgagaaatgacagactgagtgcctgacaatttaagccacatatgaagtatgcaagtaaagattcagtccttaatgtcatctatatcatggtataaaagctcaacaagtatcttataatttggagttaactttataaagtaagaagagtttggatatcttgataaaagattttcatgtttgctgctttttttataataaaaatcccaacattttgccatc

SEQ ID NO: 127660 - DNA, 339 bp, Homo sapiens
  Payload ID: 4984
  Gene Symbol: DNAJB14
  Gene Name: DnaJ (Hsp40) homolog, subfamily B, member 14
  ENST ID: ENST00000610281
  CDS Start-End: 10-339
gagcaagctatggaggggaacagggatgaggctgagaaatgtgtcgagatcgcccgggaggccctgaacgccggcaaccgcgagaaggcccagcgcttcctgcagaaggccgagaagctctacccactgccctcggcccgcgcactattggaaataattatgaaaaatggaagcacggctggaaatagccctcattgccgaaaaccatcaggtagtggcgatcaaagcaagcctaattgcacaaaggacagcacatctggtagtggtgaaggtggaaaaggctataccaaagaccaagtagatggagttctcagagctttatggatattggaacattga

SEQ ID NO: 127661 - DNA, 3176 bp, Homo sapiens
  Payload ID: 4985
  Gene Symbol: DNAJB2
  Gene Name: DnaJ (Hsp40) homolog, subfamily B, member 2
  Uniprot ID: P25686
  ENST ID: ENST00000336576
  CDS Start-End: 289-1263
gtgtgcccaaaatagccggctccgccctcttctcccggcagcccctgcaggcccccacccccccaggggacaggcggagccggccttctccccgtctctagtagtttccgcaccgctgacgcatgcctgcgcgcacagctgggccgggcgcgtcctacgcagcagccgcgagccgggctgcgggtgccagacggttcccggcggggggcaggggcggggcgccgcaggaggccgggactcctggcggaggagccccaaggaggcccgcctgacgactgaccagttgccatggcatcctactacgagatcctagacgtgccgcgaagtgcgtccgctgatgacatcaagaaggcgtatcggcgcaaggctctccagtggcacccagacaaaaacccagataataaagagtttgctgagaagaaatttaaggaggtggccgaggcatatgaagtgctgtctgacaagcacaagcgggagatttacgaccgctatggccgggaagggctgacagggacaggaactggcccatctcgggcagaagctggcagtggtgggcctggcttcaccttcaccttccgcagccccgaggaggtcttccgggaattctttgggagtggagacccttttgcagagctctttgatgacctgggccccttctcagagcttcagaaccggggttcccgacactcaggccccttctttaccttctcttcctccttccctgggcactccgatttctcctcctcatctttctccttcagtcctggggctggtgcttttcgctctgtttctacatctaccacctttgtccaaggacgccgcatcaccacacgcagaatcatggagaacgggcaggagcgggtggaagtggaggaggatgggcagctgaagtcagtcacaatcaatggtgtcccagatgacctggcactgggcttggagctgagccgtcgcgagcagcagccgtcagtcacttccaggtctgggggcactcaggtccagcagacccctgcctcatgccccttggacagcgacctctctgaggatgaggacctgcagctggccatggcctacagcctgtcagagatggaggcagctgggaagaaacccgcaggtgggcgggaggcacagcaccgacggcaggggcggcccaaggcccagcaccaagatccaggcttgggggggacccaggagggtgcgaggggtgaagcaaccaaacgcagtccatccccagaggagaaggcctctcgctgcctcatcctctgaacaccgggcccaacctgatctgatccagatcttgactggggggtctgactcactgtgggaagagaagaggggagtatcctgagttgtaggaactgctttccaactccaagctccctccacaagtttccctcccaggccccccacaccccagtgtggacttgggatttgctgtgctcagcccagggctgataggtccctggtgaagcccagggtggggggtgtcagggcagtggaggggcccgaggagccaggttgcatttattggatggggagctccaaggggcattagtggtttgggctgggccttttgtgccctggtactctgccacctgtgttgctgatggtgtcaaggaaggaggacttggcctagggttgtctgagccggagccggcagctccactggagagcagtgcaggcagagtggagcctcctgctctcctggaccagctgcagacccccaaccctggtttctgtgccatgttgcgctctgaccgtctctgttgcttctcttctggtgttgcttctcctccctcccattctctctgcaactccctgcgggccgcatcgcttgctttcactgccgtctggctaggactcccttcttccttccttccccgagaaggcctcaatgtggcgaggaagatgctggggccggtagggctgtgagatcttctggggaggctagccgggtggggcgggagcctctcagctgtccagattcagaactggagcccactcctcctccctctcgttgcctcagcctgccctcaccctcaggactaggcagaggtgaggctggctcaccctgaagaggtgggataggaccgggggaccccagagggaggcctaggaggggactgcacccatactgcttccctaccacaaatcagggctcagggagaggccatgcggccagcccaggtctgcatgctgagccccatcctccacagcttgccgctgacgctctctcctgtcaccccgcccctgctctctccccagatgtgttctgagctggatgccgggttccagaatcgctgcacagttccaacaggacagcgccttcccccatgcgctgggaggggaccctccatttctccccctcacccatgctgagtgtagagccggggcctgggtggcgggtgggggccgggtgggaggtggcagtagtcttagcctgtgcactctcttccttgggtgtttggtgctggctcctggggactacaaatcccagagtgcggtgtgcccggcctcatttctgatagatcccgcttgggggaggtggtgtatggttacggagctgtgcatcttgggacatgtagtagcccaggtcggcttgtcactcgctgtgagatggggagattttgtcttttgatttatccctgtagggctggcagggttgtagatgaagggggaatgatctgagccttggttcccctgacacgtcttgctagccccagggttagagtgggcagggcagagccgcgcagcacctgggagcggtacctttcccttgggcagcctggggtcccaggaacaagccagggcgagtggcatgtctgcctgagcagggtgtggccccagaaagctgaggagtgtgggctggcagagagcttcgagggcaaggccacccgcgggggcgtgtgtgtggtggggcttggcatgtgatggcagctccaggcatgccgctgcttgtatggctttctttggcctctgaccctgctgcccattctttccaacatcacagatgaactgcctctcctcctccctgcctggggagcccagtggccagggaggggagtggtggagccagtcgctgtaacactgagcctcagagacgaaccaaaaccagctgggctgagctcagatccagggggaaatgctggaagtcaataaaactgagttttgagagcttg

SEQ ID NO: 127662 - DNA, 1946 bp, Homo sapiens
  Payload ID: 4985
  Gene Symbol: DNAJB2
  Gene Name: DnaJ (Hsp40) homolog, subfamily B, member 2
  Uniprot ID: P25686
  ENST ID: ENST00000392086
  CDS Start-End: 212-1045
agccggccttctccccgtctctagtagtttccgcaccgctgacgcatgcctgcgcgcacagctgggccgggcgcgtcctacgcagcagccgcgagccgggctgcgggtgccagacggttcccggcggggggcaggggcggggcgccgcaggaggccgggactcctggcggaggagccccaaggaggcccgcctgacgactgaccagttgccatggcatcctactacgagatcctagacgtgccgcgaagtgcgtccgctgatgacatcaagaaggcgtatcggcgcaaggctctccagtggcacccagacaaaaacccagataataaagagtttgctgagaagaaatttaaggaggtggccgaggcatatgaagtgctgtctgacaagcacaagcgggagatttacgaccgctatggccgggaagggctgacagggacaggaactggcccatctcgggcagaagctggcagtggtgggcctggcttcaccttcaccttccgcagccccgaggaggtcttccgggaattctttgggagtggagacccttttgcagagctctttgatgacctgggccccttctcagagcttcagaaccggggttcccgacactcaggccccttctttaccttctcttcctccttccctgggcactccgatttctcctcctcatctttctccttcagtcctggggctggtgcttttcgctctgtttctacatctaccacctttgtccaaggacgccgcatcaccacacgcagaatcatggagaacgggcaggagcgggtggaagtggaggaggatgggcagctgaagtcagtcacaatcaatggtgtcccagatgacctggcactgggcttggagctgagccgtcgcgagcagcagccgtcagtcacttccaggtctgggggcactcaggtccagcagacccctgcctcatgccccttggacagcgacctctctgaggatgaggacctgcagctggccatggcctacagcctgtcagagatggaggcagctgggaagaaacccgcagatgtgttctgagctggatgccgggttccagaatcgctgcacagttccaacaggacagcgccttcccccatgcgctgggaggggaccctccatttctccccctcacccatgctgagtgtagagccggggcctgggtggcgggtgggggccgggtgggaggtggcagtagtcttagcctgtgcactctcttccttgggtgtttggtgctggctcctggggactacaaatcccagagtgcggtgtgcccggcctcatttctgatagatcccgcttgggggaggtggtgtatggttacggagctgtgcatcttgggacatgtagtagcccaggtcggcttgtcactcgctgtgagatggggagattttgtcttttgatttatccctgtagggctggcagggttgtagatgaagggggaatgatctgagccttggttcccctgacacgtcttgctagccccagggttagagtgggcagggcagagccgcgcagcacctgggagcggtacctttcccttgggcagcctggggtcccaggaacaagccagggcgagtggcatgtctgcctgagcagggtgtggccccagaaagctgaggagtgtgggctggcagagagcttcgagggcaaggccacccgcgggggcgtgtgtgtggtggggcttggcatgtgatggcagctccaggcatgccgctgcttgtatggctttctttggcctctgaccctgctgcccattctttccaacatcacagatgaactgcctctcctcctccctgcctggggagcccagtggccagggaggggagtggtggagccagtcgctgtaacactgagcctcagagacgaaccaaaaccagctgggctgagctcagatccagggggaaatgctggaagtcaataaaactgagttttgagagct

SEQ ID NO: 127663 - DNA, 823 bp, Homo sapiens
  Payload ID: 4985
  Gene Symbol: DNAJB2
  Gene Name: DnaJ (Hsp40) homolog, subfamily B, member 2
  ENST ID: ENST00000392087
  CDS Start-End: 91-823
cggcggggggcaggggcggggcgccgcaggaggccgggactcctggcggaggagccccaaggaggcccgcctgacgactgaccagttgccatggcatcctactacgagatcctagacgtgccgcgaagtgcgtccgctgatgacatcaagaaggcgtatcggcgcaaggctctccagtggcacccagacaaaaacccagataataaagagtttgctgagaagaaatttaaggaggtggccgaggcatatgaagtgctgtctgacaagcacaagcgggagatttacgaccgctatggccgggaagggctgacagggacaggaactggcccatctcgggcagaagctggcagtggtgggcctggcttcaccttcaccttccgcagccccgaggaggtcttccgggaattctttgggagtggagacccttttgcagagctctttgatttctcctcctcatctttctccttcagtcctggggctggtgcttttcgctctgtttctacatctaccacctttgtccaaggacgccgcatcaccacacgcagaatcatggagaacgggcaggagcgggtggaagtggaggaggatgggcagctgaagtcagtcacaatcaatggtgtcccagatgacctggcactgggcttggagctgagccgtcgcgagcagcagccgtcagtcacttccaggtctgggggcactcaggtccagcagacccctgcctcatgccccttggacagcgacctctctgaggatgaggacctgcagctggccatggcctacagcctgtcagagatggaggcagctgggaagaaacccgcaggtg

SEQ ID NO: 127664 - DNA, 652 bp, Homo sapiens
  Payload ID: 4985
  Gene Symbol: DNAJB2
  Gene Name: DnaJ (Hsp40) homolog, subfamily B, member 2
  ENST ID: ENST00000439026
  CDS Start-End: 208-652
aggtgcggccgggggcccgggtcaggctgggggccctggatcggactgctggagttggggggccccgatagggctcctgggcctgggcgtcgagatagctcttggccccggcctgcgggggcagataaggctgccggagggagcctagtcaccggccgcaagcagagcccgccccaaggaggcccgcctgacgactgaccagttgccatggcatcctactacgagatcctagacgtgccgcgaagtgcgtccgctgatgacatcaagaaggcgtatcggcgcaaggctctccagtggcacccagacaaaaacccagataataaagagtttgctgagaagaaatttaaggaggtggccgaggcatatgaagtgctgtctgacaagcacaagcgggagatttacgaccgctatggccgggaagggctgacagggacaggaactggcccatctcgggcagaagctggcagtggtgggcctggcttcaccttcaccttccgcagccccgaggaggtcttccgggaattctttgggagtggagacccttttgcagagctctttgatgacctgggccccttctcagagcttcagaaccggggttcccgacactcaggccccttctttaccttctcttcctccttccctgggcactccg

SEQ ID NO: 127665 - DNA, 686 bp, Homo sapiens
  Payload ID: 4985
  Gene Symbol: DNAJB2
  Gene Name: DnaJ (Hsp40) homolog, subfamily B, member 2
  ENST ID: ENST00000442681
  CDS Start-End: 319-686
gaggtgcggccgggggcccgggtcaggctgggggccctggatcggactgctggagttggggggccccgatagggctcctgggcctgggcgtcgagatagctcttggccccggcctgcgggggcagataaggctgccggagggagcctagtcaccggccgcaagcagagcccggtgtgctccgcttccaactgggagcgccttccgccacccggggagggggactgctgcagccacagggtggggctcttggttctttccgcctgactccttctcttctgcagccccaaggaggcccgcctgacgactgaccagttgccatggcatcctactacgagatcctagacgtgccgcgaagtgcgtccgctgatgacatcaagaaggcgtatcggcgcaaggctctccagtggcacccagacaaaaacccagataataaagagtttgctgagaagaaatttaaggaggtggccgaggcatatgaagtgctgtctgacaagcacaagcgggagatttacgaccgctatggccgggaagggctgacagggacaggaactggcccatctcgggcagaagctggcagtggtgggcctggcttcaccttcaccttccgcagccccgaggaggtcttccgggaattctttgggagtggagacccttttgcagagctctttgatgacctgggcccctt

SEQ ID NO: 127666 - DNA, 585 bp, Homo sapiens
  Payload ID: 4985
  Gene Symbol: DNAJB2
  Gene Name: DnaJ (Hsp40) homolog, subfamily B, member 2
  ENST ID: ENST00000421532
  CDS Start-End: 190-585
agtagtttccgcaccgctgacgcatgcctgcgcgcacagctgggccgggcgcgtcctacgcagcagccgcgagccgggctgcgggtgccagacggttcccggcggggggcaggggcggggcgccgcaggaggccgggactcctggcggaggagccccaaggaggcccgcctgacgactgaccagttgccatggcatcctactacgagatcctagacgtgccgcgaagtgcgtccgctgatgacatcaagaaggcgtatcggcgcaaggctctccagtggcacccagacaaaaacccagataataaagagtttgctgagaagaaatttaaggaggtggccgaggcatatgaagtgctgtctgacaagcacaagcgggagatttacgaccgctatggccgggaagggctgacagggacaggaactggcccatctcgggcagaagctggcagtggtgggcctggcttcaccttcaccttccgcagccccgaggaggtcttccgggaattctttgggagtggagacccttttgcagagctctttggtgagtggactctggaagcctctgaatggctcaacttccccctc

SEQ ID NO: 127667 - DNA, 828 bp, Homo sapiens
  Payload ID: 4985
  Gene Symbol: DNAJB2
  Gene Name: DnaJ (Hsp40) homolog, subfamily B, member 2
  ENST ID: ENST00000425450
  CDS Start-End: 145-828
ggagccggccttctccccgtctctagtagtttccgcaccgctgacgcatgcctgcgcgcacagctgggccgggcgcgtcctacgcagcagccgcgagccgggctgcggccccaaggaggcccgcctgacgactgaccagttgccatggcatcctactacgagatcctagacgtgccgcgaagtgcgtccgctgatgacatcaagaaggcgtatcggcgcaaggctctccagtggcacccagacaaaaacccagataataaagagtttgctgagaagaaatttaaggaggtggccgaggcatatgaagtgctgtctgacaagcacaagcgggagatttacgaccgctatggccgggaagggctgacagggacaggaactggcccatctcgggcagaagctggcagtggtgggcctggcttcaccttcaccttccgcagccccgaggaggtcttccgggaattctttgggagtggagacccttttgcagagctctttgatgacctgggccccttctcagagcttcagaaccggggttcccgacactcaggccccttctttaccttctcttcctccttccctgggcactccgatttctcctcctcatctttctccttcagtcctggggctggtgcttttcgctctgtttctacatctaccacctttgtccaaggacgccgcatcaccacacgcagaatcatggagaacgggcaggagcgggtggaagtggaggaggatgggcagctgaagtcagtcacaatcaatggtgtcccagatgacctggcactgggcttggagctgagccgtcgcgagcagcagccgtcagtcact

SEQ ID NO: 127668 - DNA, 2988 bp, Homo sapiens
  Payload ID: 4986
  Gene Symbol: DNAJB4
  Gene Name: DnaJ (Hsp40) homolog, subfamily B, member 4
  Uniprot ID: Q9UDY4
  ENST ID: ENST00000370763
  CDS Start-End: 258-1271
agagacacgtagtgaaaatgggaggatctagaaggaggctgtctcctgtgtagtgtatatttatctgtaagtgagccgttggggaaggattgaatacagagacgctgtctgcttgctgccttaagacagctagctgaattgctgattaacttttaaaatacccagcttggtttatttttcttagaatctgttgctaagactggggacgctgttttcttttacaaagggaaatctaagttaatttcaaggcattcgaaatggggaaagactattattgcattttgggaattgagaaaggagcttcagatgaagatattaaaaaggcttaccgaaaacaagccctcaaatttcatccggacaagaacaaatctcctcaggcagaggaaaaatttaaagaggtcgcagaagcttatgaagtattgagtgatcctaaaaagagagaaatatatgatcagtttggggaggaagggttgaaaggaggagcaggaggtactgatggacaaggaggtaccttccggtacacctttcatggcgatcctcatgctacatttgctgcatttttcggagggtccaacccctttgaaattttctttggaagacgaatgggtggtggtagagattctgaagaaatggaaatagatggtgatccttttagtgcctttggtttcagcatgaatggatatccaagagacaggaattctgtggggccatcccgcctcaaacaagatcctccagttattcatgaacttagagtatcacttgaagagatatatagtggttgtaccaaacggatgaagatttctcgaaaaaggctaaacgctgatggaaggagttacagatctgaggacaaaattcttaccattgagattaaaaaagggtggaaagaaggcaccaaaattacttttccaagagaaggagatgaaacaccaaatagtattccagcagacattgtttttatcattaaagacaaagatcatccaaaatttaaaagggatggatcaaatataatttatactgctaaaattagtttacgagaggcattgtgtggctgctcaattaatgtaccaacactggatggaagaaacatacctatgtcagtaaatgatattgtgaaacccggaatgaggagaagaattattggatatgggctgccatttccaaaaaatcctgaccaacgtggtgaccttctaatagaatttgaggtgtccttcccagatactatatcttcttcatccaaagaagtacttaggaaacatcttcctgcctcatagaatgaagaactttgttacacatattttgataaggcactgaaaatataaaaggactggtagtttactgatgtagatgtgaattctgtataaagatgtgtaaattcttttgagggttcattaaattgcatgaatagagacgggtcaaataaataggcaaaagggatttttacagttagagataaaagagaaaaccattcactgtattttatttcatttctcctgattcagatatttttagtaatttgcttatatgtaaaagttgtttttgtggagtcagtggatatatttctaatgaagtgctagactatccaattacttaatttcttatacctttagataatcagtatgaaaagttcccatttataatggaaatgaaaattcttaactaaactatacatgtaatatgtatttctagaagagaataaaaacccaagtcagttattagatttaaatcaccttctgaaatgctgctatagggctggtatctgtaaaagaatatcctgatgcatctgtttcaccattttgatttttaaagtatgctgtagcatttcttaataacatcgttgtgatgttcttaaggcagatctttcttcataaaaaggaaagtaatggcaatttctctcctgtggaaatcccaattgcttgaattactgatattttagaatagactttttaaaatgccatatgtaattttatgcaagttgactatatatcttgtacttaataaattataggctcattttgttctctgctagtttaaagtaattcgtttaataatagatgtgtttttagaggaaatgctgttacttggaattaattttccagttatacagtcttctataacttactaataatattctatatgtactttatgtaatttccctaaaaagaatgaactaccactacactatggtgttaaaccaaaatatagggaaaataaacactaactgctgcttatggataatgttgcaactacttgttatgcatataaatattttactttttcacatgtatagattgcatttcttaggtgttttaattttttaaatatatttatgttttaaaaatttagttttgttttctgttttataactatagtgagaatgatgttttgaagcaaaatttttggttataaaatagttttcaggattatatatatatatactggatcctatcgccttttagtagaatatgaaatattcttttagaaatccaatataaataggttataatagccatattctttattactttattgagatataatttacatgccataaagtttacccttaaaatatataattcagtggtttttagtgatatttacaaagtggtacaatcatcatcactttctaattccagaatattttcatcaccccaaaaagaaatcctaaatccattagcagttacttcccattcttcccttcctccagcccctgaaaacactaccatctacttttcatctgtatggatttgtctgttctggacatttcacataaatagactcaaacaatatatggctttttttttttttggtctggcctctttcatttagcttaatgttttcaaggttcatctatgttgtatcacgtatcagtactttattttttgtgtggcacgtcatatggatataccacaatttgtttatcttttcattaattatgggcatttggcttatttctacttttttggctattataaataatgctgctgtgaa

SEQ ID NO: 127669 - DNA, 686 bp, Homo sapiens
  Payload ID: 4986
  Gene Symbol: DNAJB4
  Gene Name: DnaJ (Hsp40) homolog, subfamily B, member 4
  ENST ID: ENST00000426517
  CDS Start-End: 171-686
gttaaggtctcttaagttaagaacagcattgtttcttgaccaaaatagattttgtagcttcttaggcgtagtttctcccaccccatcctgtgggtactcaaatgtaagatcatattctgaattgtcatcacaggactagggaaatctaagttaatttcaaggcattcgaaatggggaaagactattattgcattttgggaattgagaaaggagcttcagatgaagatattaaaaaggcttaccgaaaacaagccctcaaatttcatccggacaagaacaaatctcctcaggcagaggaaaaatttaaagaggtcgcagaagcttatgaagtattgagtgatcctaaaaagagagaaatatatgatcagtttggggaggaagggttgaaaggaggagcaggaggtactgatggacaaggaggtaccttccggtacacctttcatggcgatcctcatgctacatttgctgcatttttcggagggtccaacccctttgaaattttctttggaagacgaatgggtggtggtagagattctgaagaaatggaaatagatggtgatccttttagtgcctttggtttcagcatgaatggatatccaagagacaggaattctgtggggccatcccgcctcaaacaagatcctccagttattcatgaacttagagtatcacttgaagagatatat

SEQ ID NO: 127670 - DNA, 2391 bp, Homo sapiens
  Payload ID: 4987
  Gene Symbol: DNAJB5
  Gene Name: DnaJ (Hsp40) homolog, subfamily B, member 5
  Uniprot ID: O75953
  ENST ID: ENST00000312316
  CDS Start-End: 173-1219
gggggcgggctcccggtcccgctatcggcggccggcgggcaggcgactcctgtcccgggtggaggcggcggagccggagccgggggagggggcagcggctgtctcacggaccacggcggcgcccgcagctcctcaccgaaacaaggagaccagtgctggtccagtggctgtgatgggaaaagattattacaagattcttgggatcccatcgggggccaacgaggatgagatcaagaaagcctaccggaagatggccttgaagtaccacccagacaagaataaagaacccaacgctgaggagaagtttaaggagattgcagaggcctatgatgtgctaagtgaccccaagaaacggggcctgtatgaccagtatggggaggaaggcctgaagaccggcggtggcacatcaggtggctccagtggctcctttcactacacctttcatggggacccccatgccacctttgcctccttctttggtggctccaaccccttcgatatcttctttgccagcagccgctccactcggcccttcagtggctttgacccagatgacatggatgtggatgaagatgaggacccatttggcgctttcggccgttttggcttcaatgggctgagtaggggtccaaggcgagccccagaaccactgtaccctcggcgcaaggtgcaggaccccccagtggtgcacgagctgcgggtgtccctggaggagatctaccatggctccaccaagcgcatgaagatcacaaggcgtcgcctcaaccctgatgggcgaactgtgcgcaccgaggacaagatcctgcacatagtcatcaagcgtggctggaaggaaggcaccaagatcaccttccccaaagaaggcgacgccacacctgacaacatccctgctgacatcgtctttgtgctcaaagacaagccccatgcacacttccgccgagatggcaccaacgtgctctacagtgccctgatcagcctcaaggaggcgctgtgtggctgcactgtgaacattcccactatcgacggccgagtgatccctttgccctgcaatgatgtcatcaagccaggcaccgtgaagagactccgtggggagggccttcccttccccaaagtgccaactcagcgaggagacctcattgttgagttcaaagttcgcttcccagacagattaacaccacagacaagacagatccttaagcagcacctaccctgttcctaggctctgccccagccagtccagagcctaccacagcaatacccccaacactcactccactcaatgtgcacccagcttgatgtccactggacactggcaactttttctaaaatgcaaaaaaaagccactggttttcaggaaaatgttcctgtccctgaccccttttagagctgggctgcctggggggagtgggagggaggtggggagagctagcccaggccaggggtcaatgttcatgtcactagctttcaatccagtttccactgcagtggctggagagtgacctgagtgctacttgaagatatgtagagattccttatccatgcctgtacatagcatgtcctcctcccctcagctttgctaataccagtcccctcccttccctttggcttcctgctgttgggggtggaaaagactagaaaggacattgctttctcagccccacccccaggtccacagtgtccaaggtaatggcacacatattcatgcacaagaagcactcacctagagctgtctgtgcctctctgggagaaaggagagaggataagaagggaaagttcacaacctgtgaacagggacttgagcacgagacacttttcatctggagcaggggggtgagctcctcagcagcctccgtaacagctgccctgcctacacctgcagagctggaggttctgtcctccctgctgctctcaggagtgttcaagggtggagggcagggaatggggcctgaggtattaaggctaagaggtgggggacagggcccatctaccagccttcatcaggaagggaaagggctttggggtcaggtggcagctattccccaccaagagattcagggtcacaggtttttccccacacctctgaactcagggcctagccacccccaaacttccaaatcccacttttgtgatatgtgaagctactcatttcttacccttggaggctgtgtggggaatttccagcccttttatgcctgtgtgatcccaccccacccccatagttgtataaaggtcatagtgaagaagctgggggaagactgcttcagccagatcctggggtggggtctttaggttttctcactttgacaacccccgaatgtttttatagtagtttttttgtatttttttgtaatgacagtattatgtaaaaaataaagtattttaaaaatatgg

SEQ ID NO: 127671 - DNA, 484 bp, Homo sapiens
  Payload ID: 4987
  Gene Symbol: DNAJB5
  Gene Name: DnaJ (Hsp40) homolog, subfamily B, member 5
  ENST ID: ENST00000458263
  CDS Start-End: 386-484
gtcccgggtggaggcggcggagccggagccgggggagggggcagcggctgtctcacggaccacggcggcgcccgcagctcctcaccggtatacacgctgccactcacaaacacacgcttgcactcccagcctcactgacacgctgccatacagccgctcacagccagccagacactgctgcacctgagagcaggtggccgcgggtcttctcccttcactctccacatttggggatcaggtccggcacctgctgcgccagacaggccttgctgggcacgcgcctctgagagtccaaggaggtggcttccagagctgcagcacttcaggccggctccggtggagcgatcagagaaacaaggagaccagtgctggtccagtggctgtgatgggaaaagattattacaagattcttgggatcccatcgggggccaacgaggatgagatcaagaaagcctaccggaagatggccttgaagtaccaccca

SEQ ID NO: 127672 - DNA, 615 bp, Homo sapiens
  Payload ID: 4987
  Gene Symbol: DNAJB5
  Gene Name: DnaJ (Hsp40) homolog, subfamily B, member 5
  ENST ID: ENST00000443266
  CDS Start-End: 150-615
cacctcgctcagcagggcctctcaggggtcctcagtctggcccaaggaccagggcctcagcctagccccaagagtgggccacaaccttcagcttcctgctgggaaaacccaggagaaacaaggagaccagtgctggtccagtggctgtgatgggaaaagattattacaagattcttgggatcccatcgggggccaacgaggatgagatcaagaaagcctaccggaagatggccttgaagtaccacccagacaagaataaagaacccaacgctgaggagaagtttaaggagattgcagaggcctatgatgtgctaagtgaccccaagaaacggggcctgtatgaccagtatggggaggaaggcctgaagaccggcggtggcacatcaggtggctccagtggctcctttcactacacctttcatggggacccccatgccacctttgcctccttctttggtggctccaaccccttcgatatcttctttgccagcagccgctccactcggcccttcagtggctttgacccagatgacatggatgtggatgaagatgaggacccatttggcgctttcggccgttttggcttcaatgggctgagtaggggtccaaggcgag

SEQ ID NO: 127673 - DNA, 2589 bp, Homo sapiens
  Payload ID: 4987
  Gene Symbol: DNAJB5
  Gene Name: DnaJ (Hsp40) homolog, subfamily B, member 5
  Uniprot ID: O75953
  ENST ID: ENST00000453597
  CDS Start-End: 29-1417
ctgagctgagtgacaggaagacggttcaatgggcggcgcggaggcggagccgtgggggcgggctcccggtcccgctatcggcggccggcgggcaggcgactcctgtcccgggtggaggcggcggagccggagccgggggagggggcagcggctgtctcacggaccacggcggcgcccgcagctcctcaccgcagcacccccactgcaggcccgaggagctttccggagcttcccacactcctggggagaagacttcttagccagcttgatgtttaaaattcagctggagcccttaaaacttcgagcgtggacgctgaatgggtttgtaaagtttcgaaacaaggagaccagtgctggtccagtggctgtgatgggaaaagattattacaagattcttgggatcccatcgggggccaacgaggatgagatcaagaaagcctaccggaagatggccttgaagtaccacccagacaagaataaagaacccaacgctgaggagaagtttaaggagattgcagaggcctatgatgtgctaagtgaccccaagaaacggggcctgtatgaccagtatggggaggaaggcctgaagaccggcggtggcacatcaggtggctccagtggctcctttcactacacctttcatggggacccccatgccacctttgcctccttctttggtggctccaaccccttcgatatcttctttgccagcagccgctccactcggcccttcagtggctttgacccagatgacatggatgtggatgaagatgaggacccatttggcgctttcggccgttttggcttcaatgggctgagtaggggtccaaggcgagccccagaaccactgtaccctcggcgcaaggtgcaggaccccccagtggtgcacgagctgcgggtgtccctggaggagatctaccatggctccaccaagcgcatgaagatcacaaggcgtcgcctcaaccctgatgggcgaactgtgcgcaccgaggacaagatcctgcacatagtcatcaagcgtggctggaaggaaggcaccaagatcaccttccccaaagaaggcgacgccacacctgacaacatccctgctgacatcgtctttgtgctcaaagacaagccccatgcacacttccgccgagatggcaccaacgtgctctacagtgccctgatcagcctcaaggaggcgctgtgtggctgcactgtgaacattcccactatcgacggccgagtgatccctttgccctgcaatgatgtcatcaagccaggcaccgtgaagagactccgtggggagggccttcccttccccaaagtgccaactcagcgaggagacctcattgttgagttcaaagttcgcttcccagacagattaacaccacagacaagacagatccttaagcagcacctaccctgttcctaggctctgccccagccagtccagagcctaccacagcaatacccccaacactcactccactcaatgtgcacccagcttgatgtccactggacactggcaactttttctaaaatgcaaaaaaaagccactggttttcaggaaaatgttcctgtccctgaccccttttagagctgggctgcctggggggagtgggagggaggtggggagagctagcccaggccaggggtcaatgttcatgtcactagctttcaatccagtttccactgcagtggctggagagtgacctgagtgctacttgaagatatgtagagattccttatccatgcctgtacatagcatgtcctcctcccctcagctttgctaataccagtcccctcccttccctttggcttcctgctgttgggggtggaaaagactagaaaggacattgctttctcagccccacccccaggtccacagtgtccaaggtaatggcacacatattcatgcacaagaagcactcacctagagctgtctgtgcctctctgggagaaaggagagaggataagaagggaaagttcacaacctgtgaacagggacttgagcacgagacacttttcatctggagcaggggggtgagctcctcagcagcctccgtaacagctgccctgcctacacctgcagagctggaggttctgtcctccctgctgctctcaggagtgttcaagggtggagggcagggaatggggcctgaggtattaaggctaagaggtgggggacagggcccatctaccagccttcatcaggaagggaaagggctttggggtcaggtggcagctattccccaccaagagattcagggtcacaggtttttccccacacctctgaactcagggcctagccacccccaaacttccaaatcccacttttgtgatatgtgaagctactcatttcttacccttggaggctgtgtggggaatttccagcccttttatgcctgtgtgatcccaccccacccccatagttgtataaaggtcatagtgaagaagctgggggaagactgcttcagccagatcctggggtggggtctttaggttttctcactttgacaacccccgaatgtttttatagtagtttttttgtatttttttgtaatgacagtattatgtaaaaaataaagtattttaaaaatatgg

SEQ ID NO: 127674 - DNA, 2818 bp, Homo sapiens
  Payload ID: 4987
  Gene Symbol: DNAJB5
  Gene Name: DnaJ (Hsp40) homolog, subfamily B, member 5
  Uniprot ID: O75953
  ENST ID: ENST00000454002
  CDS Start-End: 382-1644
cattgagtaggttcttggggattggggtcgggtcctccccagtgagaggcgacaggagctcactgcctctcgggccctcacaatcacacctgtcacaggtatacacgctgccactcacaaacacacgcttgcactcccagcctcactgacacgctgccatacagccgctcacagccagccagacactgctgcacctgagagcaggtggccgcgggtcttctcccttcactctccacatttggggatcaggtccggcacctgctgcgccagacaggccttgctgggcacgcgcctctgagagtccaaggaggtggcttccagagctgcagcacttcaggccggctccggtggagcgatcagaggtgaggggcttggctgggcatgtttaagcgcacagtgctctcctgcccacccccagcagcacccccactgcaggcccgaggagctttccggagcttcccacactcctggggagaagacttcttagccagcttgatgtttaaaattcagctggagcccttaaaacttcgagcgtggacgctgaatgggtttgtaaagtttcgaaacaaggagaccagtgctggtccagtggctgtgatgggaaaagattattacaagattcttgggatcccatcgggggccaacgaggatgagatcaagaaagcctaccggaagatggccttgaagtaccacccagacaagaataaagaacccaacgctgaggagaagtttaaggagattgcagaggcctatgatgtgctaagtgaccccaagaaacggggcctgtatgaccagtatggggaggaaggcctgaagaccggcggtggcacatcaggtggctccagtggctcctttcactacacctttcatggggacccccatgccacctttgcctccttctttggtggctccaaccccttcgatatcttctttgccagcagccgctccactcggcccttcagtggctttgacccagatgacatggatgtggatgaagatgaggacccatttggcgctttcggccgttttggcttcaatgggctgagtaggggtccaaggcgagccccagaaccactgtaccctcggcgcaaggtgcaggaccccccagtggtgcacgagctgcgggtgtccctggaggagatctaccatggctccaccaagcgcatgaagatcacaaggcgtcgcctcaaccctgatgggcgaactgtgcgcaccgaggacaagatcctgcacatagtcatcaagcgtggctggaaggaaggcaccaagatcaccttccccaaagaaggcgacgccacacctgacaacatccctgctgacatcgtctttgtgctcaaagacaagccccatgcacacttccgccgagatggcaccaacgtgctctacagtgccctgatcagcctcaaggaggcgctgtgtggctgcactgtgaacattcccactatcgacggccgagtgatccctttgccctgcaatgatgtcatcaagccaggcaccgtgaagagactccgtggggagggccttcccttccccaaagtgccaactcagcgaggagacctcattgttgagttcaaagttcgcttcccagacagattaacaccacagacaagacagatccttaagcagcacctaccctgttcctaggctctgccccagccagtccagagcctaccacagcaatacccccaacactcactccactcaatgtgcacccagcttgatgtccactggacactggcaactttttctaaaatgcaaaaaaaagccactggttttcaggaaaatgttcctgtccctgaccccttttagagctgggctgcctggggggagtgggagggaggtggggagagctagcccaggccaggggtcaatgttcatgtcactagctttcaatccagtttccactgcagtggctggagagtgacctgagtgctacttgaagatatgtagagattccttatccatgcctgtacatagcatgtcctcctcccctcagctttgctaataccagtcccctcccttccctttggcttcctgctgttgggggtggaaaagactagaaaggacattgctttctcagccccacccccaggtccacagtgtccaaggtaatggcacacatattcatgcacaagaagcactcacctagagctgtctgtgcctctctgggagaaaggagagaggataagaagggaaagttcacaacctgtgaacagggacttgagcacgagacacttttcatctggagcaggggggtgagctcctcagcagcctccgtaacagctgccctgcctacacctgcagagctggaggttctgtcctccctgctgctctcaggagtgttcaagggtggagggcagggaatggggcctgaggtattaaggctaagaggtgggggacagggcccatctaccagccttcatcaggaagggaaagggctttggggtcaggtggcagctattccccaccaagagattcagggtcacaggtttttccccacacctctgaactcagggcctagccacccccaaacttccaaatcccacttttgtgatatgtgaagctactcatttcttacccttggaggctgtgtggggaatttccagcccttttatgcctgtgtgatcccaccccacccccatagttgtataaaggtcatagtgaagaagctgggggaagactgcttcagccagatcctggggtggggtctttaggttttctcactttgacaacccccgaatgtttttatagtagtttttttgtatttttttgtaatgacagtattatgtaaaaaataaagtattttaaaaatatggca

SEQ ID NO: 127675 - DNA, 852 bp, Homo sapiens
  Payload ID: 4987
  Gene Symbol: DNAJB5
  Gene Name: DnaJ (Hsp40) homolog, subfamily B, member 5
  ENST ID: ENST00000469798
  CDS Start-End: 118-435
cgggtggaggcggcggagccggagccgggggagggggcagcggctgtctcacggaccacggcggcgcccgcagctcctcaccgaaacaaggagaccagtgctggtccagtggctgtgatgggaaaagattattacaagattcttgggatcccatcgggggccaacgaggatgagatcaagaaagcctaccggaagatggccttgaagtaccacccagacaagaataaagaacccaacgctgaggagaagtttaaggagattgcagaggcctatgatgtgctaagtgaccccaagaaacggggcctgtatgaccagtatggggaggaagcagccgctccactcggcccttcagtggctttgacccagatgacatggatgtggatgaagatgaggacccatttggcgctttcggccgttttggcttcaatgggctgagtaggggtccaaggcgagccccagaaccactgtaccctcggcgcaaggtgcaggaccccccagtggtgcacgagctgcgggtgtccctggaggagatctaccatggctccaccaagcgcatgaagatcacaaggcgtcgcctcaaccctgatgggcgaactgtgcgcaccgaggacaagatcctgcacatagtcatcaagcgtggctggaaggaaggcaccaagatcaccttccccaaagaaggcgacgccacacctgacaacatccctgctgacatcgtctttgtgctcaaagacaagccccatgcacacttccgccgagatggcaccaacgtgctctacagtgccctgatcagcctcaaggaggcgctgtgtggctgcactgtgaacattcccactatcgacggccgagtgatcc

SEQ ID NO: 127676 - DNA, 851 bp, Homo sapiens
  Payload ID: 4987
  Gene Symbol: DNAJB5
  Gene Name: DnaJ (Hsp40) homolog, subfamily B, member 5
  ENST ID: ENST00000537321
  CDS Start-End: 235-851
gtcccgggtggaggcggcggagccggagccgggggagggggcagcggctgtctcacggaccacggcggcgcccgcagctcctcaccggtccggcacctgctgcgccagacaggccttgctgggcacgcgcctctgagagtccaaggaggtggcttccagagctgcagcacttcaggccggctccggtggagcgatcagagaaacaaggagaccagtgctggtccagtggctgtgatgggaaaagattattacaagattcttgggatcccatcgggggccaacgaggatgagatcaagaaagcctaccggaagatggccttgaagtaccacccagacaagaataaagaacccaacgctgaggagaagtttaaggagattgcagaggcctatgatgtgctaagtgaccccaagaaacggggcctgtatgaccagtatggggaggaaggcctgaagaccggcggtggcacatcaggtggctccagtggctcctttcactacacctttcatggggacccccatgccacctttgcctccttctttggtggctccaaccccttcgatatcttctttgccagcagccgctccactcggcccttcagtggctttgacccagatgacatggatgtggatgaagatgaggacccatttggcgctttcggccgttttggcttcaatgggctgagtaggggtccaaggcgagccccagaaccactgtaccctcggcgcaaggtgcaggaccccccagtggtgcacgagctgcgggtgtccctggaggagatctaccatggctccaccaagcgcatgaagatcacaaggcgtcgcctcaaccctgatgggcgaactgtgcgcac

SEQ ID NO: 127677 - DNA, 3068 bp, Homo sapiens
  Payload ID: 4987
  Gene Symbol: DNAJB5
  Gene Name: DnaJ (Hsp40) homolog, subfamily B, member 5
  Uniprot ID: O75953
  ENST ID: ENST00000545841
  CDS Start-End: 381-1427
ggggattggggtcgggtcctccccagtgagaggcgacaggagctcactgcctctcgggccctcacaatcacacctgtcacaggtatacacgctgccactcacaaacacacgcttgcactcccagcctcactgacacgctgccatacagccgctcacagccagccagacactgctgcacctgagagcaggtggccgcgggtcttctcccttcactctccacatttggggatcaggtccggcacctgctgcgccagacaggccttgctgggcacgcgcctctgagagtccaaggaggtggcttccagagctgcagcacttcaggccggctccggtggagcgatcagagaaacaaggagaccagtgctggtccagtggctgtgatgggaaaagattattacaagattcttgggatcccatcgggggccaacgaggatgagatcaagaaagcctaccggaagatggccttgaagtaccacccagacaagaataaagaacccaacgctgaggagaagtttaaggagattgcagaggcctatgatgtgctaagtgaccccaagaaacggggcctgtatgaccagtatggggaggaaggcctgaagaccggcggtggcacatcaggtggctccagtggctcctttcactacacctttcatggggacccccatgccacctttgcctccttctttggtggctccaaccccttcgatatcttctttgccagcagccgctccactcggcccttcagtggctttgacccagatgacatggatgtggatgaagatgaggacccatttggcgctttcggccgttttggcttcaatgggctgagtaggggtccaaggcgagccccagaaccactgtaccctcggcgcaaggtgcaggaccccccagtggtgcacgagctgcgggtgtccctggaggagatctaccatggctccaccaagcgcatgaagatcacaaggcgtcgcctcaaccctgatgggcgaactgtgcgcaccgaggacaagatcctgcacatagtcatcaagcgtggctggaaggaaggcaccaagatcaccttccccaaagaaggcgacgccacacctgacaacatccctgctgacatcgtctttgtgctcaaagacaagccccatgcacacttccgccgagatggcaccaacgtgctctacagtgccctgatcagcctcaaggaggcgctgtgtggctgcactgtgaacattcccactatcgacggccgagtgatccctttgccctgcaatgatgtcatcaagccaggcaccgtgaagagactccgtggggagggccttcccttccccaaagtgccaactcagcgaggagacctcattgttgagttcaaagttcgcttcccagacagattaacaccacagacaagacagatccttaagcagcacctaccctgttcctaggctctgccccagccagtccagagcctaccacagcaatacccccaacactcactccactcaatgtgcacccagcttgatgtccactggacactggcaactttttctaaaatgcaaaaaaaagccactggttttcaggaaaatgttcctgtccctgaccccttttagagctgggctgcctggggggagtgggagggaggtggggagagctagcccaggccaggggtcaatgttcatgtcactagctttcaatccagtttccactgcagtggctggagagtgacctgagtgctacttgaagatatgtagagattccttatccatgcctgtacatagcatgtcctcctcccctcagctttgctaataccagtcccctcccttccctttggcttcctgctgttgggggtggaaaagactagaaaggacattgctttctcagccccacccccaggtccacagtgtccaaggtaatggcacacatattcatgcacaagaagcactcacctagagctgtctgtgcctctctgggagaaaggagagaggataagaagggaaagttcacaacctgtgaacagggacttgagcacgagacacttttcatctggagcaggggggtgagctcctcagcagcctccgtaacagctgccctgcctacacctgcagagctggaggttctgtcctccctgctgctctcaggagtgttcaagggtggagggcagggaatggggcctgaggtattaaggctaagaggtgggggacagggcccatctaccagccttcatcaggaagggaaagggctttggggtcaggtggcagctattccccaccaagagattcagggtcacaggtttttccccacacctctgaactcagggcctagccacccccaaacttccaaatcccacttttgtgatatgtgaagctactcatttcttacccttggaggctgtgtggggaatttccagcccttttatgcctgtgtgatcccaccccacccccatagttgtataaaggtcatagtgaagaagctgggggaagactgcttcagccagatcctggggtggggtctttaggttttctcactttgacaacccccgaatgtttttatagtagtttttttgtatttttttgtaatgacagtattatgtaaaaaataaagtattttaaaaatatggcatctgagcaggagcaacaaacctgggatgggggtggctgaggagggccactgtcatcctccctcccgggctctggtcacctttgagaagcccaagcaggccctcagtataagctgaagctgacctctgccttcctcgaagcctcctgggatttctaaaacttatacttcaaacacagcacagacagaaagtaccactcagctattagaagaaacatctatttgggaaggaaaaatatccctgctcatgagagacagagaccattgtcttcagatgtgctagcatgaaaacagattttctcttcttgtctaaattttctctgagtcagacaaattttccttctaggagaaaatttttttctaggagggggtggagaactttttttttttttttttttttttgacacggagtcttgctctgtcgcccaggctggagtgcagtgatgcgatcttggttcactgcagcctct

SEQ ID NO: 127678 - DNA, 683 bp, Homo sapiens
  Payload ID: 4987
  Gene Symbol: DNAJB5
  Gene Name: DnaJ (Hsp40) homolog, subfamily B, member 5
  ENST ID: ENST00000539059
  CDS Start-End: 49-683
aggaggcagatcctgaaagagcttgccctgtgtctgcggaggcaagagatgtatgggcctagagcagctagcagaaacaaggagaccagtgctggtccagtggctgtgatgggaaaagattattacaagattcttgggatcccatcgggggccaacgaggatgagatcaagaaagcctaccggaagatggccttgaagtaccacccagacaagaataaagaacccaacgctgaggagaagtttaaggagattgcagaggcctatgatgtgctaagtgaccccaagaaacggggcctgtatgaccagtatggggaggaaggcctgaagaccggcggtggcacatcaggtggctccagtggctcctttcactacacctttcatggggacccccatgccacctttgcctccttctttggtggctccaaccccttcgatatcttctttgccagcagccgctccactcggcccttcagtggctttgacccagatgacatggatgtggatgaagatgaggacccatttggcgctttcggccgttttggcttcaatgggctgagtaggggtccaaggcgagccccagaaccactgtaccctcggcgcaaggtgcaggaccccccagtggtgcacgagctgcgggtgtccctggaggagatctaccatggctccaccaagcgcatgaagat

SEQ ID NO: 127679 - DNA, 2527 bp, Homo sapiens
  Payload ID: 4988
  Gene Symbol: DNAJB6
  Gene Name: DnaJ (Hsp40) homolog, subfamily B, member 6
  Uniprot ID: O75190
  ENST ID: ENST00000262177
  CDS Start-End: 206-1186
agttgacgccgccgtgccgccgccgcgtgacgcatttcctgtttgttgttggagaaaggagagaaaggaaagcgcgaggagccgccgccaccaccagcgcagcagtcctggagctgtgaggagattcgggccgtcaccctgcctcccctgcgtcccgccaccggccgcttctgtcctcggacccattccaacaatctcgtaaaacatggtggattactatgaagttctaggcgtgcagagacatgcctcacccgaggatattaaaaaggcatatcggaaactggcactgaagtggcatccagataaaaatcctgagaataaagaagaagcagagagaaaattcaagcaagtagcggaggcatatgaagtgctgtcggatgctaagaaacgggacatctatgacaaatatggcaaagaaggattaaatggtggaggaggaggtggaagtcattttgacagtccatttgaatttggcttcacattccgtaacccagatgatgtcttcagggaattttttggtggaagggacccattttcatttgacttctttgaagacccttttgaggacttctttgggaatcgaaggggtccccgaggaagcagaagccgagggacggggtcgtttttctctgcgttcagtggatttccgtcttttggaagtggattttcttcttttgatacaggatttacttcatttgggtcactaggtcacgggggcctcacttcattctcttccacgtcatttggtggtagtggcatgggcaacttcaaatcgatatcaacttcaactaaaatggttaatggcagaaaaatcactacaaagagaattgtcgagaacggtcaagaaagagtagaagttgaagaagatggccagttaaagtccttaacaataaatggtgtggccgacgacgatgccctcgctgaggagcgcatgcggagaggccagaacgccctgccagcccagcctgccggcctccgcccgccgaagccgccccggcctgcctcgctgctgagacacgcgcctcactgtctctctgaggaggagggcgagcaggaccgacctcgggcacccgggccctgggaccccctcgcgtccgcagcaggattgaaagaaggtggcaagaggaagaagcagaagcagagagaggagtcgaagaagaagaagtcgaccaaaggcaatcactagaccggacttgaggcacgcggtgcacccccagacgctggcgctccaccgtgctcggcatgcggtcgtgcacacgcgctaggtagcagcgtcggtcaggactgtctcgaggccacactcgctcggcaggattatgcgatcacggatcagtcagagcagggtcaggagacggggctgacggcacgggtggcggggacagacgtttgggacttggccgcgactctctgcttctctccagctctcaatctgctgcattttcctctagtgcttccggatcctcttcattcttttcggctactcaaccactccgcatgctgctggaatatttctggctttagaagtacaggagggcgcagatggctaactgagtaacattcatgaaatgaggctttctgtggcggcgtagtgtttggaattagaaggtaattcagtagagtgtaacttagagaatattgcaagtgacacattgaatcctgcccgtcagggcaccttttcctcagagcaatccggccacacgaatagaaggctgtcgtgaatcacatcagatgtaaaatcattccttctgtttactcttttaattttcatcctttgcaggtagtgcaaattcaacttcaaatatggtgtaggttttgctagattccatatttttttcttggatttttgctaattatttttagcaaaaaatttttgctcagtggcactctccctagtgtccatgggttagggccatgctggggaaaacgggccggtatttacacacgcgcaaaacacccagagacggcacaaggaggttgaactcatgtttcagttcgcgaacattgactccttacgaaagtcacttcattctaactagatgcgcccacttccggtcattatttcgtttgcatgatgtattgcttcttcacgttttgtttttattgagcacggagtagaattccagggctgccttgacttcttccctgcatgctccctcccagtgactttccttccctttcacatgaggatctgccgttcatgttgctttctcctttgtcctcttggacttgagggcattgtgaaaagctttgctgtgatttaaaaatgccagcaattttaatctagcagtgttgaagctgggaattttttggcgcaatccatgtagcagtgacccaggcttgggagccagaaacaagtgtgacctgggattttatttaacacaactgttgccaaagagttggctttgtttatttggttttggcggggagaggagtggtatttgatgctttctgtggacaatgtaaccctaaacacatcatgtattttaaatgccacctacataaataaaacataagcatattgaataca

SEQ ID NO: 127680 - DNA, 398 bp, Homo sapiens
  Payload ID: 4988
  Gene Symbol: DNAJB6
  Gene Name: DnaJ (Hsp40) homolog, subfamily B, member 6
  ENST ID: ENST00000439402
  CDS Start-End: 264-398
ttcactatgttgttcaggctggtctcgaactcctgacctcaggtgatccacccgcctcggcttcgcaaagtgctggattacaggtgtgagcccgcgcgtccggctgtcactttaaagagtattataagagggcacttcataacttgggcaggtatttttagtcatcctgaacgtgtcgctgtggactgggtgtcaccgcgggaccgcacagacaccttactgtcgtctgctgtaaaggacccattccaacaatctcgtaaaacatggtggattactatgaagttctaggcgtgcagagacatgcctcacccgaggatattaaaaaggcatatcggaaactggcactgaagtggcatccagataaaaatcctgagaataaagaagaagcagagagaaaa

SEQ ID NO: 127681 - DNA, 566 bp, Homo sapiens
  Payload ID: 4988
  Gene Symbol: DNAJB6
  Gene Name: DnaJ (Hsp40) homolog, subfamily B, member 6
  ENST ID: ENST00000437030
  CDS Start-End: 368-566
accaccagcgcagcagtcctggagctgtgaggagattcgggccgtcaccctgcctcccctgcgtcccgccaccggccgcttctgtcctcgaaacgggagtggcttgcggagcaggaatgccgcagccgtgccgccaagttcggagggagaagaagcaggtgggggaccgcaaagccctgtttctagaactccggacggattgttcagaagtttgtggaagagcaggctgcctttctcactcagaatgtttgtctgctttgctttgcgttaaagaatctgcaccgtagttgatgcaactgaagtttatataagaagtttacattaactcttacctaaggaaggacccattccaacaatctcgtaaaacatggtggattactatgaagttctaggcgtgcagagacatgcctcacccgaggatattaaaaaggcatatcggaaactggcactgaagtggcatccagataaaaatcctgagaataaagaagaagcagagagaaaattcaagcaagtagcggaggcatatgaagtgctgtcggatgctaagaaacgggacatctatgaca

SEQ ID NO: 127682 - DNA, 590 bp, Homo sapiens
  Payload ID: 4988
  Gene Symbol: DNAJB6
  Gene Name: DnaJ (Hsp40) homolog, subfamily B, member 6
  ENST ID: ENST00000453383
  CDS Start-End: 296-590
actcgcgtctgaaaccagaaacgggagtggcttgcggagcaggaatgccgcagccgtgccgccaagttcggagggagaagaagcaggtgggggaccgcaaagccctgtttctagaactccggacggattgttcagaagtttgtggaagagcaggctgcctttctcactcagaatgtttgtctgctttgctttgcgttaaagaatctgcaccgtagttgatgcaactgaagtttatataagaagtttacattaactcttacctaaggaaggacccattccaacaatctcgtaaaacatggtggattactatgaagttctaggcgtgcagagacatgcctcacccgaggatattaaaaaggcatatcggaaactggcactgaagtggcatccagataaaaatcctgagaataaagaagaagcagagagaaaattcaagcaagtagcggaggcatatgaagtgctgtcggatgctaagaaacgggacatctatgacaaatatggcaaagaaggattaaatggtggaggaggaggtggaagtcattttgacagtccatttgaatttggcttcacattccgtaacccagatgatg

SEQ ID NO: 127683 - DNA, 1159 bp, Homo sapiens
  Payload ID: 4988
  Gene Symbol: DNAJB6
  Gene Name: DnaJ (Hsp40) homolog, subfamily B, member 6
  ENST ID: ENST00000443280
  CDS Start-End: 147-782
agagaaaggaaagcgcgaggagccgccgccaccaccagcgcagcagtcctggagctgtgaggagattcgggccgtcaccctgcctcccctgcgtcccgccaccggccgcttctgtcctcggacccattccaacaatctcgtaaaacatggtggattactatgaagttctaggcgtgcagagacatgcctcacccgaggatattaaaaaggcatatcggaaactggcactgaagtggcatccagataaaaatcctgagaataaagaagaagcagagagaaaattcaagcaagtagcggaggcatatgaagtgctgtcggatgctaagaaacgggacatctatgacaaatatggcaaagaaggattaaatggtggaggaggaggtggaagtcattttgacagtccatttgaatttggcttcacattccgtaacccagatgatgtcttcagggaattttttggtggaagggacccattttcatttgacttctttggtgtggccgacgacgatgccctcgctgaggagcgcatgcggagaggccagaacgccctgccagcccagcctgccggcctccgcccgccgaagccgccccggcctgcctcgctgctgagacacgcgcctcactgtctctctgaggaggagggcgagcaggaccgacctcgggcacccgggccctgggaccccctcgcgtccgcagcaggattgaaagaaggtggcaagaggaagaagcagaagcagagagaggagtcgaagaagaagaagtcgaccaaaggcaatcactagaccggacttgaggcacgcggtgcacccccagacgctggcgctccaccgtgctcggcatgcggtcgtgcacacgcgctaggtagcagcgtcggtcaggactgtctcgaggccacactcgctcggcaggattatgcgatcacggatcagtcagagcagggtcaggagacggggctgacggcacgggtggcggggacagacgtttgggacttggccgcgactctctgcttctctccagctctcaatctgctgcattttcctctagtgcttccggatcctcttcattcttttcggctactcaaccactccgcatgctgctggaatatttctggctttagaagtacaggagggcgcagatggctaactgagtaacattcatg

SEQ ID NO: 127684 - DNA, 1609 bp, Homo sapiens
  Payload ID: 4988
  Gene Symbol: DNAJB6
  Gene Name: DnaJ (Hsp40) homolog, subfamily B, member 6
  Uniprot ID: O75190
  ENST ID: ENST00000429029
  CDS Start-End: 206-931
agttgacgccgccgtgccgccgccgcgtgacgcatttcctgtttgttgttggagaaaggagagaaaggaaagcgcgaggagccgccgccaccaccagcgcagcagtcctggagctgtgaggagattcgggccgtcaccctgcctcccctgcgtcccgccaccggccgcttctgtcctcggacccattccaacaatctcgtaaaacatggtggattactatgaagttctaggcgtgcagagacatgcctcacccgaggatattaaaaaggcatatcggaaactggcactgaagtggcatccagataaaaatcctgagaataaagaagaagcagagagaaaattcaagcaagtagcggaggcatatgaagtgctgtcggatgctaagaaacgggacatctatgacaaatatggcaaagaaggattaaatggtggaggaggaggtggaagtcattttgacagtccatttgaatttggcttcacattccgtaacccagatgatgtcttcagggaattttttggtggaagggacccattttcatttgacttctttgaagacccttttgaggacttctttgggaatcgaaggggtccccgaggaagcagaagccgagggacggggtcgtttttctctgcgttcagtggatttccgtcttttggaagtggattttcttcttttgatacaggatttacttcatttgggtcactaggtcacgggggcctcacttcattctcttccacgtcatttggtggtagtggcatgggcaacttcaaatcgatatcaacttcaactaaaatggttaatggcagaaaaatcactacaaagagaattgtcgagaacggtcaagaaagagtagaagttgaagaagatggccagttaaagtccttaacaataaatggtaaggagcagctgctgcgcttggataacaagtaattcaacgcacgcacttaacagaaatgttaaactataacaagcaccatttgaggattaacaggaacatttttttgaagatttcaaacgaactcgactttcagtataattgtacctaaagtatttataaacagctcatcggagcctctatttgtcatagacttttgagttgattgttgggaccacataataggaccattttttttttgtctttaaaattgttgtaaatctctgtatgcactttgcttttttattaaacgtactccaaggtgagtcttgactctttagtgtaggacaagattgtacactaacaccagcatggacctgcttttcattgtgtctgaaatgtgagccacgtagtgtcggcctgctgtgaagttaacattgccaggacgattcttctacagaaataatttcaatttttttcagtatttagtagtgaaagatattaatacattaatggtaatacatttctggtttaatataaattaaggatgttttctagttgtgcatgaatgctggcaacttagtaagttttgacaattgtttaaatatgtaatgttaagcttaggtttaaaaaagtaaagctggtaaactgggtctttgtcatttgctttaaaaaaaaaaaaaaagaaaataaatgcgaatgtgttggtgcattcttcctgagtgggatctgga

SEQ ID NO: 127685 - DNA, 852 bp, Homo sapiens
  Payload ID: 4988
  Gene Symbol: DNAJB6
  Gene Name: DnaJ (Hsp40) homolog, subfamily B, member 6
  ENST ID: ENST00000417758
  CDS Start-End: 168-852
gttgttggagaaaggagagaaaggaaagcgcgaggagccgccgccaccaccagcgcagcagtcctggagctgtgaggagattcgggccgtcaccctgcctcccctgcgtcccgccaccggccgcttctgtcctcggtgagggacccattccaacaatctcgtaaaacatggtggattactatgaagttctaggcgtgcagagacatgcctcacccgaggatattaaaaaggcatatcggaaactggcactgaagtggcatccagataaaaatcctgagaataaagaagaagcagagagaaaattcaagcaagtagcggaggcatatgaagtgctgtcggatgctaagaaacgggacatctatgacaaatatggcaaagaaggattaaatggtggaggaggaggtggaagtcattttgacagtccatttgaatttggcttcacattccgtaacccagatgatgtcttcagggaattttttggtggaagggacccattttcatttgacttctttgaagacccttttgaggacttctttgggaatcgaaggggtccccgaggaagcagaagccgagggacggggtcgtttttctctgcgttcagtggatttccgtcttttggaagtggattttcttcttttgatacaggatttacttcatttgggtcactaggtcacgggggcctcacttcattctcttccacgtcatttggtggtagtggcatgggcaacttcaaatcgatatcaacttcaactaaaatggttaatggcagaaaaatcactacaaagagaattgtcgagaacggtcaagaaagagtagaagttgaagaagatggccagttaaagtccttaacaa

SEQ ID NO: 127686 - DNA, 506 bp, Homo sapiens
  Payload ID: 4988
  Gene Symbol: DNAJB6
  Gene Name: DnaJ (Hsp40) homolog, subfamily B, member 6
  ENST ID: ENST00000412557
  CDS Start-End: 131-506
tttttctaaggctcccgcactcgcgtctgaaaccagaaacgggagtggcttgcggagcaggaatgccgcagccgtgccgccaagttcggagggagaagaagcaggacccattccaacaatctcgtaaaacatggtggattactatgaagttctaggcgtgcagagacatgcctcacccgaggatattaaaaaggcatatcggaaactggcactgaagtggcatccagataaaaatcctgagaataaagaagaagcagagagaaaattcaagcaagtagcggaggcatatgaagtgctgtcggatgctaagaaacgggacatctatgacaaatatggcaaagaaggattaaatggtggaggaggaggtggaagtcattttgacagtccatttgaatttggcttcacattccgtaacccagatgatgtcttcagggaattttttggtggaagggacccattttcatttgacttctttgaagacccttttgaggacttctttgggaatc

SEQ ID NO: 127687 - DNA, 1022 bp, Homo sapiens
  Payload ID: 4988
  Gene Symbol: DNAJB6
  Gene Name: DnaJ (Hsp40) homolog, subfamily B, member 6
  ENST ID: ENST00000441561
  CDS Start-End: 586-1022
atactaatgtggtaatcagtgaactatttgcttccgtttccttcagtcactattccctggcgaagtctccacgcgctcccgttcgccggggaacttagggtatccgggcttccctaaattgacaagcgggggccggcgccttcgcccgccttcgctggccgccgcttggtttgttcttcttctccttcggggacttctccgcccgcgcccgcgcccgcgccccagctttcgtcccgctgtgcggagatgccacccagctccaccgcaggaccgcggagcgagaggcggcagacgcgctccgggggccgccggtcaagaggaagatgaagggcgcgacgacttcgcggtttccagaatgggctccttctggcccaacaataagtgccatttggaatcttctcggccttctctgtgccttccgcgcgtctgggctccccggagagaaaggaaagcgcgaggagccgccgccaccaccagcgcagcagtcctggagctgtgaggagattcgggccgtcaccctgcctcccctgcgtcccgccaccggccgcttctgtcctcggacccattccaacaatctcgtaaaacatggtggattactatgaagttctaggcgtgcagagacatgcctcacccgaggatattaaaaaggcatatcggaaactggcactgaagtggcatccagataaaaatcctgagaataaagaagaagcagagagaaaattcaagcaagtagcggaggcatatgaagtgctgtcggatgctaagaaacgggacatctatgacaaatatggcaaagaaggattaaatggtggaggaggaggtggaagtcattttgacagtccatttgaatttggcttcacattccgtaacccagatgatgtcttcagggaattttttggtggaagggacccattttcatttgacttctttgaagacccttttgaggacttctttgggaatcgaaggggtccccgaggaagcagaagccgagggacggggtcgtttttctctgcgttcagtgg

SEQ ID NO: 127688 - DNA, 614 bp, Homo sapiens
  Payload ID: 4988
  Gene Symbol: DNAJB6
  Gene Name: DnaJ (Hsp40) homolog, subfamily B, member 6
  ENST ID: ENST00000441291
  CDS Start-End: 126-515
gccgccgccaccaccagcgcagcagtcctggagctgtgaggagattcgggccgtcaccctgcctcccctgcgtcccgccaccggccgcttctgtcctcggacccattccaacaatctcgtaaaacatggtggattactatgaagttctaggcgtgcagagacatgcctcacccgaggatattaaaaaggcatatcggaaactggcactgaagtggcatccagataaaaatcctgagaataaagaagaagcagagagaaaattcaagcaagtagcggaggcatatgaagtgctgtcggatgctaagaaacgggacatctatgacaaatatggcaaagaaggattaaatggtggaggaggaggtggaagtcattttgacagtccatttgaatttggcttcacattccgtaacccagatgatgtcttcagggaattttttggtggaagggacccattttcatttgacttctttggacagggcagtgtttgggttgaagtcctgtgttctgatcggtgattctcatggtgaccaagcgaggaagaaggcccgctcttccaacaccatggcttctcttctggggcacacgagaagacccttttgaggacttctttggga

SEQ ID NO: 127689 - DNA, 7992 bp, Homo sapiens
  Payload ID: 4988
  Gene Symbol: DNAJB6
  Gene Name: DnaJ (Hsp40) homolog, subfamily B, member 6
  ENST ID: ENST00000459889
  CDS Start-End: 149-1153
ggagagaaaggaaagcgcgaggagccgccgccaccaccagcgcagcagtcctggagctgtgaggagattcgggccgtcaccctgcctcccctgcgtcccgccaccggccgcttctgtcctcggacccattccaacaatctcgtaaaacatggtggattactatgaagttctaggcgtgcagagacatgcctcacccgaggatattaaaaaggcatatcggaaactggcactgaagtggcatccagataaaaatcctgagaataaagaagaagcagagagaaaattcaagcaagtagcggaggcatatgaagtgctgtcggatgctaagaaacgggacatctatgacaaatatggcaaagaaggattaaatggtggaggaggaggtggaagtcattttgacagtccatttgaatttggcttcacattccgtaacccagatgatgtcttcagggaattttttggtggaagggacccattttcatttgacttctttgaagacccttttgaggacttctttgggaatcgaaggggtccccgaggaagcagaagccgagggacggggtcgtttttctctgcgttcagtggatttccgtcttttggaagtggattttcttcttttgatacaggatttacttcatttgggtcactaggtcacgggggcctcacttcattctcttccacgtcatttggtggtagtggcatgggcaacttcaaatcgatatcaacttcaactaaaatggttaatggcagaaaaatcactacaaagagaattgtcgagaacggtcaagaaagagtagaagttgaagaagatggccagttaaagtccttaacaataaatggtgtggccgacgacgatgccctcgctgaggagcgcatgcggagaggccagaacgccctgccagcccagcctgccggcctccgcccgccgaagccgccccggcctgcctcgctgctgagacacgcgcctcactgtctctctgaggaggagggcgagcaggaccgacctcgggcacccgggccctgggaccccctcgcgtccgcagcaggtgtgcaaagggaggcagccgtggagcaggcgcagagtgagacttctctgggtgccagaggacagcgaggacacaaaccgcgcctgggctgctgtgttctgacctgagcgggcgtgggcggtcgggcggggcgggaggaggtagcctcgctctgctcctctcccgctcgcggcgccccacgccacggtggctccgggccccccaccgttaaaacggggtccgcgtgtcctgtacgcagcgtgttgctccgcaaaggatgacagagctgccacggcagtgcgaggtgctgcttttaccgtagacgtgccttttcgtagctttcagcgtagagcttgaggcctgtggcttaggccgggtggtctcgtgctggtggggtctgcgtttgcccctgcccctccgtcagcttcaccttctcgtgccttcttctgcgctgggtgcagaacaaaagaccccctcaagtcaagcctccttgtgaagcgtagtctgcccgcccaccccccgtggggttcttggccgccctgccctcctcccacctgttagggagccggatagtctctgaagtgagtgccccggagaagttctgggtcaccctgaggacgtgctgtgcatgtaggcttggccctgactgcgtcctaaagcccagggtccatgtagtgtgaatcgtgcgtcagttggaagtatttgtgcctcttctggttcttatcaccgcacgcggtgaggtgaccccagccgctcatgtcgtgcaggaagacatggatggttgatccctgggtttgggggaccgaagcggatgtcgtgaggttacttctgtggacttgggccgaacagcactgtctaagcaggacatgaaaagaagggggaagcgtctctccttttcccttcatggaactttccattgaaaaattagccccttccagtccttctcggatgaagcacagttgccggttacgcttccgaggaggacggaaggtgcacccccagccgtgagagcctcaggatgtgccgcctgtgggtgggcacggcagcccctccagccggccgcccacctgccgtgctgcgctcacctttgctgtgtgagtctgtgctgtgtcactgagtgacagacagaggcagttgcaggctgcatgcacccagaaagaactccccctgcactaagcgggcatgggggaggctccccagggtccctgcactgagcggggtgggggaggctccccacggttccctgcactgagcggggtgggggagactccccacggttccctgcactgagcgggcgtggggaaggttcccaggatccctgcactgagcggggtgggggagactccccacggttccctgcactgagcgggcgtggggaaggttcccaggatccctgcactgagcgggcgtggggaaggttcccaggatccctgcactgagcgggcgtaggggaggctccccaggatccctgcactgagcgggcgttggggaggctccccagggtctgttgtgcgctcctggtactggagggtctgatggccgtagggagggtgcactgtttgtcgatgggtctttgcaaggtgcaggatagagcagggttgtagctgtagtgtccctgaaccactggggttaggaggccaccggaagcctggcctgctaggggccttgtgatttcgcaggccccgagaacgtggtgtgcaggtgcgggccgcctgggggagccatgtttaaagtgcggtgaggctcctggaacggcacccaccgcaggcccgaggccacacctgtatgtcagaactgggcgggtcttctcctcccaggccttcagcgcctgtggctatggctgtgggcgggactgatacgggcaggcaggcgctgttctccccacgtattctcggcttccccgccatacaccgtttctgagtggggagaactggttgactgctgaatcccaacacaaatccttagagcaaagaggccagtgatggcttttgtttctgcccggatcctctttgtggatcttccgttttgcggcttttcctctcatttgtttcctttttttaatcgcttcatgagatcttgaagataccaaagtaaccatcaaagatttaaagacgtgatttttatacaaatatataacgaacacgtcagagacttttacttaagttcttactgagagatgacaaagctgactcaaaggatgagtcaagaaaccgctgcagagttggagacagaactggagtgaaattgcaaagcagggtggttttggtctctgcagaggccatttgcgactcactcaccaactccggtgtcagggtgctggtgggtgacagggaagaggttgagcaagcctccgcccctgcaggctcgctcattatacaatgagcacctgcaccaccaaatccgaacaactgtacatgcttacagagaagggcacgtgctagtgtgggagtgacaaagtcacacgggtgcagaccccttagctccagcctgctgggtgttctgacgaatggactttgtagcgataacacaggctcctgagtcaggatactggtttgctgcatttctgcgtcactgaaggtctcgctttccccgaagccccttgtcacagaaaacccatgactcttggccaggcctctgggtgcctggaagatcccactatcatctttttgtgggatttgcatgtcctggtcaaggttcctgtaaaaggaatacagtgaggagaccggccacccgacagtattgatggcccccactttggcctccagccgtctgacccgtccctgaatcgagcaggtcctgtcggagctcccaggagtgagcgagcttccactcacagggtcacagccaggtgtgcagcccccaggcctgggcggttctagggcatgattttttttaggctggaaatgagctctcacttgagatgcacccctcaaaatactgaacgtactgcttctgtgagaatttcccctccttgtgtctggtgtgattgacaacgggtgcagccagtggaagcaggaatgtcggggagcgcggggtgcagggggtgccctgtcacagtcagcggggagcgcctgtccctgctgcgtggtgtggggttcccgtggctggcatttgctgctgtgtggagtcctcaaacccagcgctcgccctgcctgcgttcagaggacagaggcaccaccgggaacccaccggatcctcactcaggctttggaaaggccgagtgatgttttgtgtttgtgaattccacacatactgtaggagtatcaagaacacgtaactgttaaaaaaggaaaagtaaaattactgaacaggaaagaaagaataaagcaggtcctttgtttttttggctgaggaaagcagcctgccctggaacgctgtagaatgtctccctttttgtgaagcacagcatggagctctcggaactgaagatgggaatctaaccctgccctcagctttcaacagctcgaagtttgtctttttaatgaaactaatttgtgtatttatacttaagggttttcaagtccttaaacttgataagaaaacttaagtcgttttctatcaggacaagtttttaagtagtcactggtgggagagcgtgcctctgtggactgtgcccaaggctggcggtcccacgaagtcccagagcccgcgagccggtgcccaaggccatgtctgtgatttgcaggaggttcaggtgacaggaaggcctgctctgtttttctcacttcaattttggacttttttttttttttttttttttttgagacagtctcgctctgtcgcccaggctggagtgcagtggcgtgatctcggctcactgcaacctctgcctcaagggttccagcgattttcctgcctcacctccccagtggccggaactacaggtgcttgccaccacttctggctcatttttgtatttttagtagagatgtggtttctccatgttggactggctgctctcgaactcctgacctcaggtgatccccccgcttcagcctcccaaagtgctgggattacaggcgggagccaccgcgcccggcaatagtggaggcttgaagaacaccggaaagtggtttccttgtaccggacccgcccctcccccaccatcccggcagccccagggcgggtgagggcgactgcagtgtggtcacctcaggctttccgtccctagctcataaaggcccagtggcagcagttgctttaaaggagctccgttactccctttgttctggggtcttggtaaagtttgctttgctgaagcggaggaaccgcaggcggtgctgacccccccaccccgcccccatcccacggggtcccttgggtcccggggcacgaggctcctctgagggacacggcctccaagagctggctctgccctggccgccctccacagtcacggcggctccccgcatgctcctcgggacggagatctcctggcttcctcccgcttcctttcctctgcgttttccgcagagccgcctccctgctttggaagcaggtactcagcggcctctgcagccgccaacggcacacaggcctctctctgttcgttctttctttccgtaaccgtagcttgaggcacatttcctaaatatgcagcatggaacgcttggcggttctgaacgcgcatctcgtgctgctcctgtagggcggttaggacgcgctcctctggcgaggaaggtggcagcctccactgtgcacgggtcacaggcgagtgtggtgtggtgtggttgtgggtggggtgtggactggatctgcaggcttgtccctctctcgtggagagctgtcggggtccaggcagtgctcagtggtgagagccacagcacatttgaaagtccacatgtgtttgccccactgtggtccaggacatgtgtgagccacactcagtggacttgcacctgtgacatgttggtcagcgtggcggccgtcagctgggtgtggaatgcatctgattggagcctggcacccggcctaccatgattgtgattctctggggcgagtcctgagtgtgggcagggcctcaggcccccaagagggctgtgagcaggcaccttcctgtgaggcacgatgccaccatgtgaagttgtgtgggtctttggagagttctggcaggttgagggcctgtgcgtgtgggacccaggcctgccctgcctgctgccggccatgttccctctgcccagtcatgttgacaattgtggccaaattcaacatcgggcctgtttcctgcacccacgttggcacacactgagttcaagacagtttctgcagaaatgaatccagaggtgtttatttctggcacgttggatcagacgttcagagggtgggcgtctttctccatgcacttcagctggatcagtcagtgtcagccattgactttagcaacagggaaatgaaagactttcctcaataagaaatgggactttctcacgctggatggcacagagctggcaaacatgaggccagtccacaccaaggctttgcctgcagaaaggctgcactgtggccagcgggggaagcggaggagacacctgtggacaccctccccacaggattgaaagaaggtggcaagaggaagaagcagaagcagagagaggagtcgaagaagaagaagtcgaccaaaggcaatcactagaccggacttgaggcacgcggtgcacccccagacgctggcgctccaccgtgctcggcatgcggtcgtgcacacgcgctaggtagcagcgtcggtcaggactgtctcgaggccacactcgctcggcaggattatgcgatcacggatcagtcagagcagggtcaggagacggggctgacggcacgggtggcggggacagacgtttgggacttggccgcgactctctgcttctctccagctctcaatctgctgcattttcctctagtgcttccggatcctcttcattcttttcggctactcaaccactccgcatgctgctggaatatttctggctttagaagtacaggagggcgcagatggctaactgagtaacattcatgaaatgaggctttctgtggcggcgtagtgtttggaattagaaggtaattcagtagagtgtaacttagagaatattgcaagtgacacattgaatcctgcccgtcagggcaccttttcctcagagcaatccggccacacgaatagaaggctgtcgtgaatcacatcagatgtaaaatcattccttctgtttactcttttaattttcatcctttgcaggtagtgcaaattcaacttcaaatatggtgtaggttttgctagattccatatttttttcttggatttttgctaattatttttagcaaaaaatttttgctcagtggcactctccctagtgtccatgggttagggccatgctggggaaaacgggccggtatttacacacgcgcaaaacacccagagacggcacaaggaggttgaactcatgtttcagttcgcgaacattgactccttacgaaagtcacttcattctaactagatgcgcccacttccggtcattatttcgtttgcatgatgtattgcttcttcacgttttgtttttattgagcacggagtagaattccagggctgccttgacttcttccctgcatgctccctcccagtgactttccttccctttcacatgaggatctgccgttcatgttgctttctcctttgtcctcttggacttgagggcattgtgaaaagctttgctgtgatttaaaaatgccagcaattttaatctagcagtgttgaagctgggaattttttggcgcaatccatgtagcagtgacccaggcttgggagccagaaacaagtgtgacctgggattttatttaacacaactgttgccaaagagttggctttgtttatttggttttggcggggagaggagtggtatttgatgctttctgtggacaatgtaaccctaaacacatcatgtattttaaatgccacctacataaataaaacataagcatattg

SEQ ID NO: 127690 - DNA, 1005 bp, Homo sapiens
  Payload ID: 4988
  Gene Symbol: DNAJB6
  Gene Name: DnaJ (Hsp40) homolog, subfamily B, member 6
  ENST ID: ENST00000634080
  CDS Start-End: 1-1005
atggtggattactatgaagttctaggcgtgcagagacatgcctcacccgaggatattaaaaaggcatatcggaaactggcactgaagtggcatccagataaaaatcctgagaataaagaagaagcagagagaaaattcaagcaagtagcggaggcatatgaagtgctgtcggatgctaagaaacgggacatctatgacaaatatggcaaagaaggattaaatggtggaggaggaggtggaagtcattttgacagtccatttgaatttggcttcacattccgtaacccagatgatgtcttcagggaattttttggtggaagggacccattttcatttgacttctttgaagacccttttgaggacttctttgggaatcgaaggggtccccgaggaagcagaagccgagggacggggtcgtttttctctgcgttcagtggatttccgtcttttggaagtggattttcttcttttgatacaggatttacttcatttgggtcactaggtcacgggggcctcacttcattctcttccacgtcatttggtggtagtggcatgggcaacttcaaatcgatatcaacttcaactaaaatggttaatggcagaaaaatcactacaaagagaattgtcgagaacggtcaagaaagagtagaagttgaagaagatggccagttaaagtccttaacaataaatggtgtggccgacgacgatgccctcgctgaggagcgcatgcggagaggccagaacgccctgccagcccagcctgccggcctccgcccgccgaagccgccccggcctgcctcgctgctgagacacgcgcctcactgtctctctgaggaggagggcgagcaggaccgacctcgggcacccgggccctgggaccccctcgcgtccgcagcaggtgtgcaaagggaggcagccgtggagcaggcgcagagtgagacttctctgggtgccagaggacagcgaggacacaaaccgcgcctgggctgctgtgttctgacctga

SEQ ID NO: 127691 - DNA, 2578 bp, Homo sapiens
  Payload ID: 4989
  Gene Symbol: DNAJB7
  Gene Name: DnaJ (Hsp40) homolog, subfamily B, member 7
  Uniprot ID: Q7Z6W7
  ENST ID: ENST00000307221
  CDS Start-End: 133-1062
taacattgtctttaacataaaagtgtacctatttgcagtcactacctctatcaccaccaccagcagagcctgagctgaggaaaccacggttctcaatacccagcacacccacttccaactatctgttaaaacatggtggattactatgaagttctaggactgcaaagatatgcttcacctgaggacattaaaaaagcttatcataaagtggcacttaaatggcaccctgataaaaatccagaaaataaagaagaagcagagagaaaattcaaagaagtagctgaggcatacgaggtattatcaaatgatgagaaacgggacatttatgataaatatggcacagaaggattaaacggaggtggaagtcattttgatgatgaatgtgagtacggcttcacattccataagccagatgatgtttttaaagaaatttttcatgaaagggatccattttcttttcacttctttgaagactcgcttgaggacctgttaaatcgtccaggaagctcctatggaaacagaaacagagatgcaggatactttttctccactgccagtgaatatccaatttttgagaaattttcttcatatgatacaggatatacatcacagggttcattggggcatgaaggccttacttctttctcttccctggcttttgataatagtgggatggacaactacatatctgttacaacttcagacaaaatcgttaatggcagaaatattaatacaaagaaaattattgaaagtgatcaagaaagagaagctgaagataatggagagttgacattttttcttgtaaatagtgtggccaatgaagagggctttgcaaaagaatgcagctggagaacacagtcattcaacaactattcaccaaattctcacagctccaaacatgtatctcaatatactttcgtggacaatgatgagggaggtatatcttgggttaccagcaacagagatccccctattttctcagcaggagtcaaagagggtggtaagaggaaaaaaaagaagcgtaaagaggtgcaaaagaagtctaccaaaaggaattgttaaattgactcttcaaatatataacatttgaacacaattgtgtgtgttttggttaatcacaaattttgtagataacacttaatactatactaagagcttttcaacacttttagcaggattgtggacatttggttagtagtttttttgaatgggtatgtcagaaaaggatgagtttgtggtgacagttggtgctaataagaatttgcctgggcagtatagtgagatcttttctctacaaaaaatttaaaaattagccaagtgtggtggtgtgcacctgtagtcccagctactcgggaagctggtagaaagactgcttgagcctggaagacataggttgcagtgtaatgggatcacgccactgcactccagcttgggtgacaaagtaagaccctgtcttaaaaaaaaaaaaaaggaatttggaaaactgcaatgagttttttacttttgaatttttctttagtagagtttatagcctatttttcttttttctaattaaaaccactatacaaacttacgaaacatgcatagcattagaagacaagaatgtatcaagacacacaggttcagactacacaattattcatgaaatggctgttttccaatggaggaacagcatttgatgcattataacttaaaggtactacaaattaaaaattaaagtataaagtattttaagttagaaatagacttagctgggtgcagtggctcacacctgtaatcctagcatcttgggaggcccaggcaggagggttgaagtcagaatttcacgacagtccgggtaacataatgagacctgtcctctatgaaaaaacttttttaaaaatttagctgggtgtggtggtacgtgcctgtaggcctagctacttaggaggctgaggtgggaggattgcttgagcccaggagtttgaggttgtagggagctatgatcttgccattgcactccagctgagagtgtgaccctgtctctaaagaaaaactatagaaaatttaaaaaattaaaaaacgggtaacatggtaaattttatgtagtatattttaccacattttttttaaaggccagtcttatcctgaattcctcagagcagtctgtatggtaggccatcagtgaatcactccagacaggaaattttctatttttgtttagagtttgtacacaaaatctacaaatacattactctaaaatagcacctatagccattttaatttagtcatgttgggagaaaaatagatgggttacaaatacatcagatatcgagcaaatggtttgagttacatctagcagcactaaaacttattcaactttggccaaatacaaatgcgaaattagaaaaaaattataatatctgctatttttaaaagacagctatagtcaagagcttgtgttttgtatcggtatttgatttttagtgggcagatgggagaaggaaaggttatttattctatagaagagactgcggacaattagtattcaaagtttattttcagaaaataaaataataaaagcccagggtattttaaa

SEQ ID NO: 127692 - DNA, 2465 bp, Homo sapiens
  Payload ID: 4990
  Gene Symbol: DNAJB8
  Gene Name: DnaJ (Hsp40) homolog, subfamily B, member 8
  Uniprot ID: Q8NHS0
  ENST ID: ENST00000319153
  CDS Start-End: 1662-2360
acaccgcctttgccatcaccaccgtcattgccccctctactaccaccaccatcaccaccaccgggtctgcctcagccagacccaccactgcctctaattagactgccaccatcatcactgccaccaccactgcccctccaatgccttcctgatgtcaccatctgctttctctctgctatcctcacacccaactccatcacaaccaccaccttcatctgagccgccatcaccctcacagtacacagccctcaaatgtgtaccaaggaggaggacatttactacacgctgcaccctgaacagtctgggaccagcggtcagggaacaaggaatcgagatgctcacctgcagctcccaggtgagcggctctctagagcttgcctgggagctgctgaggagctcacggtattccaggaagctccccatccatgcctcagcctgtggctcagaagcagggtcttcgcagaagattgccccgagctgttgcaaagctcaccattgtcacctgcctgcaacggcctctcttttccactctccaaatcccttgtattggcaggctctagtctggaattataccggtgatgggattctggaaaatccctcagatttctccaggatgcaaggagaccatggaagaggaacaagcctgcaagggacagcaggtgctaactgctaaccgagacatagtgacaaaaatccagccacagagataaagaatcaggttcatctgtagctacatccagtggagaagttctgctcttcaactcctctgctaagccacatgtgtcagcaggtgtagaattgagtggaacacttctttggatttgctgtccgctgcagccttggccctggtttcacatcccctccctcactgactcgctgtgtgaccttgagcactgtgtgtctctgagcctggttcatccaagagtttaccgacggccctcgtgtgccagccactgtcctagacagggacagactttcccgcctttgtggagcttaccccggaagacctggccagataatgggcacaaaaaaagcaggctcttgtccccaccccagcctgcctgaaccccaccttggcctcctcttgcctcagctgctgcccagccatcggccgagtggacatacccaggacgcccttgcccgcctcccccaccacggccacagacctttgtcactcaccaaggctggaatcccgtggctgatcctgcctctgccctttggctcccgggactcagcccacaccacctgggtcacagagcatcccattcccacacaccgttgtggccacctcaccagcaggggcaggcccatatgcccaggtttgcctggtgaggagctgggggcgggggtatgccccgccccgggagctgacgtcataaaaggagctctggagggcagcccactctggcctggccccacagcggcagtgtccctcccctccccccactcctctcagtgggggcccctccagtccctgagaattggtactacgaaaaggtgaactcctgggcagaatcttgcctagagcttgcggagtccagccaggcccctgctgaagggccccagaccaccggccacttctcccccgtccatctgaccagctgggcccctgcgcccacctggcctccacgttccctctcctctcacccacacccctggccatggctaactactacgaagtgctgggcgtgcaggccagcgcttccccggaggacatcaagaaagcctaccgcaagctggcccttcgttggcaccccgacaagaaccctgacaataaggaggaggcggagaagaagttcaagctggtgtctgaggcctatgaggttctgtctgactccaagaaacgctccctgtatgaccgtgctggctgtgacagctggcgggctggtggcggggccagcacgccctaccacagccccttcgacaccggctacaccttccgtaaccctgaggacatcttccgggagttttttggtggcctggaccctttctcctttgagttctgggacagcccattcaatagtgaccgtggtggccggggccatggcctgaggggggccttctcggcaggctttggagaatttccggccttcatggaggccttctcatccttcaacatgctgggctgcagcgggggcagccacaccaccttctcatccacctccttcgggggctccagttctggcagctcggggttcaagtcggtgatgtcgtccaccgagatgatcaatggccacaaggtcaccaccaagcgcatcgtggagaacgggcaggagcgcgtggaggtggaggaagacgggcagctcaagtcggtgactgtgaacggcaaggagcagctcaaatggatggacagcaagtaggcgctggccacccggccctgccttcccaccaccaccaccgtgcatggggcagcaaacacgtggggccgcagacatagcctgatggttaataaatgtgccaagtga

SEQ ID NO: 127693 - DNA, 3365 bp, Homo sapiens
  Payload ID: 4990
  Gene Symbol: DNAJB8
  Gene Name: DnaJ (Hsp40) homolog, subfamily B, member 8
  Uniprot ID: Q8NHS0
  ENST ID: ENST00000469083
  CDS Start-End: 2559-3257
acacgctgcaccctgaacagtctgggaccagcggtcagggaacaaggaatcgagatgctcacctgcagctcccaggtgagcggctctctagagcttgcctgggagctgctgaggagctcacggtattccaggaagctccccatccatgcctcagcctgtggctcagaagcagggtcttcgcagaagattgccccgagctgttgcaaagctcaccattgtcacctgcctgcaacggcctctcttttccactctccaaatcccttgtattggcaggctctagtctggaattataccggtgatgggattctggaaaatccctcagatttctccaggatgcaaggagaccatggaagaggttggtgtaatgccaagttagcaacagaaaatacagagccccacacctcagtgccatcaccatcgccatcggcactcacaccagcatgtccaccactgtgtccttctcacccctcggcacccccctctaccattgcctcttccacaaccaccctcaccaccatcctccattaatagcacaattcctgcctcctatcccatcaccaccacgggtgtccccggcaccagcagcaccaacactgctcccagcagagccatcgttaccagccccgctgtcagtcccatcttgagcatctggcatatgttggagaactgctcactccctcttccccatgggaatctcaggcctctcttcctattgccctgagatttgcagaaccttcctgaaggaaacattctttgccccatggatactggccttgaccatgggatgcagcaagactgccacacatcatggcccaacagaagctttcagaggcagcccaagttcctgctgtctctgagtggcactgtcatgagagaggggtgtgcaggtcagagctgattctccagcctgggacccacagtgagaagctatgggaggtggggccctggcagctgcctgtaggcaccagtgagtgaagtggggggaactagatgtttgtcgtgagccactgagaggtggaagctgtcactgtggtatagccgaacaagatacaacctctgctacctccaccaccttcaccttcatcatcaccattactgtcaccactgccaaccacaccaatggctcactaggagccattcccatcacctcctcatcatacctgcaccatcactgccaaccacaacaaaggctcgctgttaccatctcctctggcatgaccatcaccaccaccactaccatcatcaattactctcaagcacaagccttgctgctgtcaccaccagcatcaccatcatcatgatcaactccaccatcacccataattactctccccctcacacccaccatgaccattacctccacatcaacactgctcccatggtcacctctactatataatgacaccttatccatctccatggacacccaccgtgcctctccccaccagcaacacagtcaacagcagtgcctctcccactgccaccgccatcatggagaactgtgcagggcaagcatctttctcccgccccaggaacaagcctgcaagggacagcaggtgctaactgctaaccgagacatagtgacaaaaatccagccacagagataaagaatcaggttcatctgtagctacatccagtggagaagttctgctcttcaactcctctgctaagccacatgtgtcagcaggtgtagaattgagtggaacacttctttggatttgctgtccgctgcagccttggccctggtttcacatcccctccctcactgactcgctgtgtgaccttgagcactgtgtgtctctgagcctggttcatccaagagtttaccgacggccctcgtgtgccagccactgtcctagacagggacagactttcccgcctttgtggagcttaccccggaagacctggccagataatgggcacaaaaaaagcaggctcttgtccccaccccagcctgcctgaaccccaccttggcctcctcttgcctcagctgctgcccagccatcggccgagtggacatacccaggacgcccttgcccgcctcccccaccacggccacagacctttgtcactcaccaaggctggaatcccgtggctgatcctgcctctgccctttggctcccgggactcagcccacaccacctgggtcacagagcatcccattcccacacaccgttgtggccacctcaccagcaggggcaggcccatatgcccaggtttgcctggtgaggagctgggggcgggggtatgccccgccccgggagctgacgtcataaaaggagctctggagggcagcccactctggcctggccccacagcggcagtgtccctcccctccccccactcctctcagtgggggcccctccagtccctgagaattggtactacgaaaaggtgaactcctgggcagaatcttgcctagagcttgcggagtccagccaggcccctgctgaagggccccagaccaccggccacttctcccccgtccatctgaccagctgggcccctgcgcccacctggcctccacgttccctctcctctcacccacacccctggccatggctaactactacgaagtgctgggcgtgcaggccagcgcttccccggaggacatcaagaaagcctaccgcaagctggcccttcgttggcaccccgacaagaaccctgacaataaggaggaggcggagaagaagttcaagctggtgtctgaggcctatgaggttctgtctgactccaagaaacgctccctgtatgaccgtgctggctgtgacagctggcgggctggtggcggggccagcacgccctaccacagccccttcgacaccggctacaccttccgtaaccctgaggacatcttccgggagttttttggtggcctggaccctttctcctttgagttctgggacagcccattcaatagtgaccgtggtggccggggccatggcctgaggggggccttctcggcaggctttggagaatttccggccttcatggaggccttctcatccttcaacatgctgggctgcagcgggggcagccacaccaccttctcatccacctccttcgggggctccagttctggcagctcggggttcaagtcggtgatgtcgtccaccgagatgatcaatggccacaaggtcaccaccaagcgcatcgtggagaacgggcaggagcgcgtggaggtggaggaagacgggcagctcaagtcggtgactgtgaacggcaaggagcagctcaaatggatggacagcaagtaggcgctggccacccggccctgccttcccaccaccaccaccgtgcatggggcagcaaacacgtggggccgcagacatagcctgatggttaataaatgtgccaagtgagtt

SEQ ID NO: 127694 - DNA, 2715 bp, Homo sapiens
  Payload ID: 4991
  Gene Symbol: DNAJB9
  Gene Name: DnaJ (Hsp40) homolog, subfamily B, member 9
  Uniprot ID: Q9UBS3
  ENST ID: ENST00000249356
  CDS Start-End: 547-1218
atgactcgggtgaggcccctggagaccggggccggcgacggatgcagggcggccctcctcactgaggatgcgccacaggtccaggcctctcgagcccctgcgcctgcgctagcattctgccgggaaagccgcctcgtctgtcgactcacttccgcctcctccggtttaagcaccgccttttcgggggttgaagccggaagtggcgcacagccctagcagcaacaacagttttccacgtgcgcgtagggcgccgggatcacgtggggaggcagaagccaatggggaagcgtttcgtgtaggtcttctgaggtggtggcgccagcggctacctcctgcctgtgaggagctggctgagaggggactgggcgccggcggggaaggaggagcgctaggtcggtgtacgaccgagattagggtgcgtgccagctccgggaggccgcggtgaggggccgggcccaagctgccgacccgagccgatcgtcagggtcgccagcgcctcagctctgtggaggagcagcagtagtcggagggtgcaggatattagaaatggctactccccagtcaattttcatctttgcaatctgcattttaatgataacagaattaattctggcctcaaaaagctactatgatatcttaggtgtgccaaaatcggcatcagagcgccaaatcaagaaggcctttcacaagttggccatgaagtaccaccctgacaaaaataagagcccggatgctgaagcaaaattcagagagattgcagaagcatatgaaacactctcagatgctaatagacgaaaagagtatgatacacttggacacagtgcttttactagtggtaaaggacaaagaggtagtggaagttcttttgagcagtcatttaacttcaattttgatgacttatttaaagactttggcttttttggtcaaaaccaaaacactggatccaagaagcgttttgaaaatcatttccagacacgccaggatggtggttccagtagacaaaggcatcatttccaagaattttcttttggaggtggattatttgatgacatgtttgaagatatggagaaaatgttttcttttagtggttttgactctaccaatcagcatacagtacagactgaaaatagatttcatggatctagcaagcactgcaggactgtcactcaacgaagaggaaatatggttactacatacactgactgttcaggacagtagttcttattctattctcactaaatccaactggttgactcttcctcattatctttgatgctaaacaattttctgtgaactattttgacaagtgcatgatttcactttaaacaatttgatatagctattaaatatatttaagggttttttttttttgacaaattcaacattcaacgagtagacaaaatgctaattatttccctgattaggaaagtttctttaaaaaacacgtaattttgcctagtgctttttctctacctgcccttgggctcactaatatcaccagtattattaccaagaaaatattgagtttacctgattaaactttaaaagttaattgtagatttaaattgtgtgaacctaatgatttttgcagtgaaacctttactaattcaaagttgcatgttctatgacatctgtgacttgcgttgcagagtgtacatgaaactgtataattgagtcattcagtaaaggagaacagtatcttggttaattgctactgaaaggttgagaaaggaatggtttgatatttaccacagcgctgtgcctttctacagtagaactggggtaaaggaaatggttttattgcccatagtcatttaggctggaaaaaagttgaaaacttaacgaaatattgccaagagattgttatgtgtttggttccagcctaaaaatgattttgtagtgttgaaatcatagctacttacatagctttttcatatttctttcttagttgttggcactcttaggtcttagtatggatttatgtgtttgtgtgtgtgtagtttatcctctctctcatctttatctagagattgactgatacctcattctgtttgtaaaaccagccagtaatttctgtgcaaccttactatgtgcaatatttttaaatcctgagaaatgtgtgcttttgttttcggatagacttatttctttagttctgcacttttccacattatactccatatgagtattaatcctatggatacatattaaaacaagtgtctcatacaacattgtatgtgagagaaatataaatatttacaacctgatattcgttgttgttttattgttaaaagtttattatgcaactctggaggtatagagggcatataagctatgggacatatgctgatcacaggctatattcatgaagttacttttgaccaacctgaaaactgataggattttgtttgtcatttggtaatttctactgcattcttaccatccttctctcacaaattttgatagcttgaagatctttttaattataattttgttgtatttgtttcctaggagcaagtgttcctgctgccagttctttcctctttaggcgtggttgagaaaaagcagaaactttacataaagctgtatttcttaatcatctttaatttgaaacttaagaaaatgaatttattctgttatatttatgtaacttatttcctggaagttatatctactagttttgtttgataataataaaattagctataccttgaa

SEQ ID NO: 127695 - DNA, 2268 bp, Homo sapiens
  Payload ID: 4992
  Gene Symbol: DNAJC25
  Gene Name: DnaJ (Hsp40) homolog, subfamily C , member 25
  Uniprot ID: Q9H1X3
  ENST ID: ENST00000313525
  CDS Start-End: 57-1139
gcgcggctgagtgctgcagaatcgctggggtggcagagccgccagcgaggctggggatgggggcgccgctgctctctcccggctggggagccggggctgccggccggcgctggtggatgctgctggcgcccctgctgccggcgctgctgctggtgcggcccgcgggggccctggtggaggggctctactgcggcacgcgggactgctacgaggtgctgggcgtgagccgctcggcgggcaaggcggagatcgcgcgggcctaccgccagctggcccggcgctaccaccctgaccgctaccggccccagcccggagacgagggccccgggcggacgccgcagagcgccgaggaggctttcctgctggtggcaaccgcctacgagacactcaaggatgaagaaacacgaaaagattatgattacatgctggatcatccagaagagtactacagccattactaccactactatagcaggcgcttggcccctaaggtggatgttagagtagtgattttggtcagcgtgtgtgctatttcggtgtttcagtttttcagctggtggaatagctacaataaggcaatcagctacctagccacagtgcccaagtaccgtatccaagctacagagattgccaagcagcagggactgctcaaaaaagccaaagaaaaaggcaaaaacaaaaagtccaaagaagaaattcgtgacgaggaggagaacatcataaagaacattataaaaagtaaaatagatataaaggggggctatcagaaaccccaaatctgtgatcttctcctgtttcaaattatcttagctccttttcacctatgctcatatatagtttggtattgtcggtggatctataattttaacatcaaaggcaaagaatatggagaggaagagagattatacattatacgtaaatctatgaagatgtcaaagtctcaatttgatagtctagaagatcatcagaaagaaacttttcttaaacgagagctctggatcaaggagaattatgaggtctacaagcaagaacaagaggaagaattaaagaaaaagttggcaaatgaccccagatggaagagatacaggagatggatgaagaatgaagggcctgggcggttaacatttgtggatgactgaagattgatggaatgctactatgccaaaccttaattgtgatattattttcataactgaattattttagaaatgtatcaattgactgctgctcagcagtaactaaaattcctcaagtatttgattaaacagaataatgtcaaaatttaaaccttcccttaaaactttatacataagacatttatgattgttcaatttttataatctatttgtggattttgttaaaagatttcacatgaagatttattagttgccatttaaaatttttatatgtttagttaaaagatttgacatgaaaatttattagataccatttaaaaattttatgtgttatgtgtttattctttgagaatgttaccttactgtttgtaatagtgctacatttttctgctttcatggcctctgtattttcacaaaacaccaaaaacagcatttaattatattatcatgagtgtgtttctggacacaaacttctgcagtagaatgacctaacatgtcgttttcattgcagtcattataggattgaaatacgttcaaaataacctctctaggaaagtcttctgctagaatttctcccctctattcattataatattctttgtttttaaagccagtcaaatataatagtcttaataagatcagaaactctccaggagagtgagtctaccctcacgtccttgtaggatgatcttgattatagtcttattataggactataactgtattctcaacatttctccagaaaggaccttgtaaaaaggtcttttgtaccacagtattggttttttcccctctctcttcacttaaaaaaaaaaatagcaaggcagaaatagtgtattgaaaagttgttcatctattatgaagtccttgagtggtgaaaaatccgttgtacatgagaacatttctatgcatttaagccagaaacgaggtacatggctgtgtgctcttctgtcaaccaatgaaatgtgttttcacatgtgtggcagtgcaagtaaataacacattatttgactgaatcaggcatgatactgcaccaaagtgttggtacatattcacggtagtaaatcagtacccctgttaaaggatttatcccattgcttcatattaataaaatggttacaatatatcacaa

SEQ ID NO: 127696 - DNA, 2498 bp, Homo sapiens
  Payload ID: 4992
  Gene Symbol: DNAJC25
  Gene Name: DnaJ (Hsp40) homolog, subfamily C , member 25
  ENST ID: ENST00000447096
  CDS Start-End: 49-456
gagtgctgcagaatcgctggggtggcagagccgccagcgaggctggggatgggggcgccgctgctctctcccggctggggagccggggctgccggccggcgctggtggatgctgctggcgcccctgctgccggcgctgctgctggtgcggcccgcgggggccctggtggaggggctctactgcggcacgcgggactgctacgaggtgctgggcgtgagccgctcggcgggcaaggcggagatcgcgcgggcctaccgccagctggcccggcgctaccaccctgaccgctaccggccccagcccggagacgagggccccgggcggacgccgcagagcgccgaggaggctttcctgctggtggcaaccgcctacgagacactcaagtcctcctgcatatgcccaagaggattgggagtggaatggacaccagcagaagcaccacagttattcctgtagagattagaaacaaggagcttattgccctgcttgtcaaggctcaggacagacaggaggaagaaacaagtataaaggttttggttttggaaagaagttggaatctccagaccctgggaccttaagatccacaaaattgctgaaagaaaaagtactaccttattgaaaggatgaagaaacacgaaaagattatgattacatgctggatcatccagaagagtactacagccattactaccactactatagcaggcgcttggcccctaaggtggatgttagagtagtgattttggtcagcgtgtgtgctatttcggtgtttcagtttttcagctggtggaatagctacaataaggcaatcagctacctagccacagtgcccaagtaccgtatccaagctacagagattgccaagcagcagggactgctcaaaaaagccaaagaaaaaggcaaaaacaaaaagtccaaagaagaaattcgtgacgaggaggagaacatcataaagaacattataaaaagtaaaatagatataaaggggggctatcagaaaccccaaatctgtgatcttctcctgtttcaaattatcttagctccttttcacctatgctcatatatagtttggtattgtcggtggatctataattttaacatcaaaggcaaagaatatggagaggaagagagattatacattatacgtaaatctatgaagatgtcaaagtctcaatttgatagtctagaagatcatcagaaagaaacttttcttaaacgagagctctggatcaaggagaattatgaggtctacaagcaagaacaagaggaagaattaaagaaaaagttggcaaatgaccccagatggaagagatacaggagatggatgaagaatgaagggcctgggcggttaacatttgtggatgactgaagattgatggaatgctactatgccaaaccttaattgtgatattattttcataactgaattattttagaaatgtatcaattgactgctgctcagcagtaactaaaattcctcaagtatttgattaaacagaataatgtcaaaatttaaaccttcccttaaaactttatacataagacatttatgattgttcaatttttataatctatttgtggattttgttaaaagatttcacatgaagatttattagttgccatttaaaatttttatatgtttagttaaaagatttgacatgaaaatttattagataccatttaaaaattttatgtgttatgtgtttattctttgagaatgttaccttactgtttgtaatagtgctacatttttctgctttcatggcctctgtattttcacaaaacaccaaaaacagcatttaattatattatcatgagtgtgtttctggacacaaacttctgcagtagaatgacctaacatgtcgttttcattgcagtcattataggattgaaatacgttcaaaataacctctctaggaaagtcttctgctagaatttctcccctctattcattataatattctttgtttttaaagccagtcaaatataatagtcttaataagatcagaaactctccaggagagtgagtctaccctcacgtccttgtaggatgatcttgattatagtcttattataggactataactgtattctcaacatttctccagaaaggaccttgtaaaaaggtcttttgtaccacagtattggttttttcccctctctcttcacttaaaaaaaaaaatagcaaggcagaaatagtgtattgaaaagttgttcatctattatgaagtccttgagtggtgaaaaatccgttgtacatgagaacatttctatgcatttaagccagaaacgaggtacatggctgtgtgctcttctgtcaaccaatgaaatgtgttttcacatgtgtggcagtgcaagtaaataacacattatttgactgaatcaggcatgatactgcaccaaagtgttggtacatattcacggtagtaaatcagtacccctgttaaaggatttatcccattgcttcatattaataaaatggttacaatatatcacaa

SEQ ID NO: 127697 - DNA, 2572 bp, Homo sapiens
  Payload ID: 4992
  Gene Symbol: DNAJC25
  Gene Name: DnaJ (Hsp40) homolog, subfamily C , member 25
  ENST ID: ENST00000463589
  CDS Start-End: 49-474
gagtgctgcagaatcgctggggtggcagagccgccagcgaggctggggatgggggcgccgctgctctctcccggctggggagccggggctgccggccggcgctggtggatgctgctggcgcccctgctgccggcgctgctgctggtgcggcccgcgggggccctggtggaggggctctactgcggcacgcgggactgctacgaggtgctgggcgtgagccgctcggcgggcaaggcggagatcgcgcgggcctaccgccagctggcccggcgctaccaccctgaccgctaccggccccagcccggagacgagggccccgggcggacgccgcagagcgccgaggaggctttcctgctggtggcaaccgcctacgagacactcaagatattggttatgttccagtcctcctgcatatgcccaagaggattgggagtggaatggacaccagcagaagcaccacagttattcctgtagagattagaaacaaggagcttattgccctgcttgtcaaggctcaggacagacaggaggaagaaacaagtataaaggttttggttttggaaagaagttggaatctccagaccctgggaccttaagatccacaaaattgctgaaagaaaaagtactaccttattgaaagattataaactaaggccatttaatggactgtcctatgaagttggatatcttgtcattttacaggatgaagaaacacgaaaagattatgattacatgctggatcatccagaagagtactacagccattactaccactactatagcaggcgcttggcccctaaggtggatgttagagtagtgattttggtcagcgtgtgtgctatttcggtgtttcagtttttcagctggtggaatagctacaataaggcaatcagctacctagccacagtgcccaagtaccgtatccaagctacagagattgccaagcagcagggactgctcaaaaaagccaaagaaaaaggcaaaaacaaaaagtccaaagaagaaattcgtgacgaggaggagaacatcataaagaacattataaaaagtaaaatagatataaaggggggctatcagaaaccccaaatctgtgatcttctcctgtttcaaattatcttagctccttttcacctatgctcatatatagtttggtattgtcggtggatctataattttaacatcaaaggcaaagaatatggagaggaagagagattatacattatacgtaaatctatgaagatgtcaaagtctcaatttgatagtctagaagatcatcagaaagaaacttttcttaaacgagagctctggatcaaggagaattatgaggtctacaagcaagaacaagaggaagaattaaagaaaaagttggcaaatgaccccagatggaagagatacaggagatggatgaagaatgaagggcctgggcggttaacatttgtggatgactgaagattgatggaatgctactatgccaaaccttaattgtgatattattttcataactgaattattttagaaatgtatcaattgactgctgctcagcagtaactaaaattcctcaagtatttgattaaacagaataatgtcaaaatttaaaccttcccttaaaactttatacataagacatttatgattgttcaatttttataatctatttgtggattttgttaaaagatttcacatgaagatttattagttgccatttaaaatttttatatgtttagttaaaagatttgacatgaaaatttattagataccatttaaaaattttatgtgttatgtgtttattctttgagaatgttaccttactgtttgtaatagtgctacatttttctgctttcatggcctctgtattttcacaaaacaccaaaaacagcatttaattatattatcatgagtgtgtttctggacacaaacttctgcagtagaatgacctaacatgtcgttttcattgcagtcattataggattgaaatacgttcaaaataacctctctaggaaagtcttctgctagaatttctcccctctattcattataatattctttgtttttaaagccagtcaaatataatagtcttaataagatcagaaactctccaggagagtgagtctaccctcacgtccttgtaggatgatcttgattatagtcttattataggactataactgtattctcaacatttctccagaaaggaccttgtaaaaaggtcttttgtaccacagtattggttttttcccctctctcttcacttaaaaaaaaaaatagcaaggcagaaatagtgtattgaaaagttgttcatctattatgaagtccttgagtggtgaaaaatccgttgtacatgagaacatttctatgcatttaagccagaaacgaggtacatggctgtgtgctcttctgtcaaccaatgaaatgtgttttcacatgtgtggcagtgcaagtaaataacacattatttgactgaatcaggcatgatactgcaccaaagtgttggtacatattcacggtagtaaatcagtacccctgttaaaggatttatcccattgcttcatattaataaaatggttacaatata

SEQ ID NO: 127698 - DNA, 2106 bp, Homo sapiens
  Payload ID: 4993
  Gene Symbol: DNAJC1
  Gene Name: DnaJ (Hsp40) homolog, subfamily C, member 1
  Uniprot ID: Q96KC8
  ENST ID: ENST00000376980
  CDS Start-End: 292-1956
gcagcccaggcgccgggcgctgcctctacagctgtgtgtaggcctgggggcgagggtcttcggaacgtagcgctggctgcggccccgcccgcctacccacccgcccgtccggcagccggctcccgccgcctccgcgctctgtctggggccagccacctggcgggccgctccggtgcgcctgcccgcgcttttcactgacaggcgctgttccccacagccagcgccgcccgccacgtcccagctctcggccaacggagctgcgcggcgggtgacctttccgagcccagcgcgatgacggctccttgctcccagccggcgcagcttcctggacgccgccagctcgggctggtgccgttcccgccgccgccgccgcggacgccgctgctgtggctgctgctgctgctgctggccgccgtggcgccggcgcgcggctgggagagcggagacctggagttgtttgacttagtggaggaggtgcagctcaacttctaccagttcctcggggtgcagcaggatgcatcatctgcagacatcagaaaagcatatcgtaagctttcactaactttacatccagacaagaataaagatgaaaatgcagaaactcagtttagacaattggtggccatttatgaagttttaaaggatgatgaacgaaggcagaggtatgatgatattctgatcaatggacttccagattggcgacagcctgtattctactacaggcgggtgagaaaaatgagcaatgctgagctggcattactcttgttcattattctcacagtgggtcattatgctgtggtttggtcaatctacctggaaaaacaactggatgaactactaagtagaaaaaagagagaaaagaaaaaaaagactggcagcaagagtgtggatgtatcaaaactcggtgcttcagaaaaaaatgaaagattgctgatgaaaccacagtggcatgatttgcttccatgcaaactggggatttggttttgccttacactaaaagcattacctcacctcatccaggatgctgggcagttttatgctaaatataaagaaacaagattgaaggaaaaggaagatgcactgactagaactgaacttgaaacacttcaaaaacagaagaaagttaaaaaaccaaaacctgaatttcctgtatacacacctttagaaactacatatattcagtcttatgatcatggaacttccatagaagaaattgaggaacaaatggatgattggttggaaaacaggaaccgaacacagaaaaaacaggcacctgaatggacagaagaggacctcagccaactgacaagaagtatggttaagttcccaggagggactccaggtcgatgggaaaagattgcccacgaattgggtcgatctgtgacagatgtgacaaccaaagccaagcaactgaaggattcagtgacctgctccccaggaatggttagactctccgaactcaaatcgacagttcagaattccaggcccatcaaaacggccaccaccttgcccgatgacatgatcacccagcgagaggacgcagagggggtggcagcggaggaggagcaggagggagactccggtgagcaggagaccggggccactgatgcccggcctcggaggcggaagccagccaggctgctggaggctacagcgaagccggagccagaggagaagtccagagccaagcggcagaaggactttgacatagcagaacaaaacgagtccagcgacgaggagagcctgagaaaagagagagctcggtctgcagaggagccgtggactcaaaatcaacagaaacttctggaactggcgttgcagcagtacccaaggggatcctctgaccgctgggacaaaatagccagatgtgtcccgtccaagagcaaggaagactgtatcgctaggtacaagttgctggttgaactggtccaaaagaaaaaacaagctaaaagctgaatattctgggagatgatgttcaccttcattttccaaaatgaatatcttaaaaatcttatgcagaaatttgcattttgtacctcaatatttctacgtcatgtgccttagtaaaaaaaaataataaataaataaaagatgagtgttgtgcta

SEQ ID NO: 127699 - DNA, 682 bp, Homo sapiens
  Payload ID: 4993
  Gene Symbol: DNAJC1
  Gene Name: DnaJ (Hsp40) homolog, subfamily C, member 1
  ENST ID: ENST00000476103
  CDS Start-End: 152-481
gtctggggccagccacctggcgggccgctccggtgcgcctgcccgcgcttttcactgacaggcgctgttccccacagccagcgccgcccgccacgtcccagctctcggccaacggagctgcgcggcgggtgacctttccgagcccagcgcgatgacggctccttgctcccagccggcgcagcttcctggacgccgccagctcgggctggtgccgttcccgccgccgccgccgcggacgccgctgctgtggctgctgctgctgctgctggccgccgtggcgccggcgcgcggctgggagagcggagacctggagttgtttgacttagtggaggaggtgcagctcaacttctaccagttcctcggggtgcagcaggatgcatcatctgcagacatcagaaaagcatatcgtaagctttcactaactttacatccagacaagaataaagatgaaaatgcagaaactcagtttagacaagtatgatgatattctgatcaatggacttccagattggcgacagcctgtattctactacaggcgggtgagaaaaatgagcaatgctgagctggcattactcttgttcattattctcacagtgggtcattatgctgtggtttggtcaatctacctggaaaaacaactggatgaactactaagtagaaaaaagagagaaaagaaaaaaaa

SEQ ID NO: 127700 - DNA, 20129 bp, Homo sapiens
  Payload ID: 4994
  Gene Symbol: DNAJC10
  Gene Name: DnaJ (Hsp40) homolog, subfamily C, member 10
  Uniprot ID: Q8IXB1
  ENST ID: ENST00000264065
  CDS Start-End: 416-2797
agaccggcgcgtgaggaacctaccggtaccggccgcgcgctggtagtcgccggtgtggctgcacctcaccaatcccgtgcgccgcggctgggccgtcggagagtgcgtgtgcttctctcctgcacgcggtgcttgggctcggccaggcggggtccgccgccagggtttgaggatgggggagtagctacaggaagcgaccccgcgatggcaaggtatatttttgtggaatgaaaaggaagtattagaaatgagctgaagaccattcacagattaatatttttggggacagatttgtgatgcttgattcacccttgaagtaatgtagacagaagttctcaaatttgcatattacatcaactggaaccagcagtgaatcttaatgttcacttaaatcagaacttgcataagaaagagaatgggagtctggttaaataaagatgactatatcagagacttgaaaaggatcattctctgttttctgatagtgtatatggccattttagtgggcacagatcaggatttttacagtttacttggagtgtccaaaactgcaagcagtagagaaataagacaagctttcaagaaattggcattgaagttacatcctgataaaaacccgaataacccaaatgcacatggcgattttttaaaaataaatagagcatatgaagtactcaaagatgaagatctacggaaaaagtatgacaaatatggagaaaagggacttgaggataatcaaggtggccagtatgaaagctggaactattatcgttatgattttggtatttatgatgatgatcctgaaatcataacattggaaagaagagaatttgatgctgctgttaattctggagaactgtggtttgtaaatttttactccccaggctgttcacactgccatgatttagctcccacatggagagactttgctaaagaagtggatgggttacttcgaattggagctgttaactgtggtgatgatagaatgctttgccgaatgaaaggagtcaacagctatcccagcctcttcatttttcggtctggaatggccccagtgaaatatcatggagacagatcaaaggagagtttagtgagttttgcaatgcagcatgttagaagtacagtgacagaactttggacaggaaattttgtcaactccatacaaactgcttttgctgctggtattggctggctgatcactttttgttcaaaaggaggagattgtttgacttcacagacacgactcaggcttagtggcatgttggatggtcttgttaatgtaggatggatggactgtgccacccaggataacctttgtaaaagcttagatattacaacaagtactactgcttattttcctcctggagccactttaaataacaaagagaaaaacagtattttgtttctcaactcattggatgctaaagaaatatatttggaagtaatacataatcttccagattttgaactactttcggcaaacacactagaggatcgtttggctcatcatcggtggctgttattttttcattttggaaaaaatgaaaattcaaatgatcctgagctgaaaaaactaaaaactctacttaaaaatgatcatattcaagttggcaggtttgactgttcctctgcaccagacatctgtagtaatctgtatgtttttcagccgtctctagcagtatttaaaggacaaggaaccaaagaatatgaaattcatcatggaaagaagattctatatgatatacttgcctttgccaaagaaagtgtgaattctcatgttaccacgcttggacctcaaaattttcctgccaatgacaaagaaccatggcttgttgatttctttgccccctggtgtccaccatgtcgagctttactaccagagttacgaagagcatcaaatcttctttatggtcagcttaagtttggtacactagattgtacagttcatgagggactctgtaacatgtataacattcaggcttatccaacaacagtggtattcaaccagtccaacattcatgagtatgaaggacatcactctgctgaacaaatcttggagttcatagaggatcttatgaatccttcagtggtctcccttacacccaccaccttcaacgaactagttacacaaagaaaacacaacgaagtctggatggttgatttctattctccgtggtgtcatccttgccaagtcttaatgccagaatggaaaagaatggcccggacattaactggactgatcaacgtgggcagtatagattgccaacagtatcattctttttgtgcccaggaaaacgttcaaagataccctgagataagattttttcccccaaaatcaaataaagcttatcattatcacagttacaatggttggaatagggatgcttattccctgagaatctggggtctaggatttttacctcaagtatccacagatctaacacctcagactttcagtgaaaaagttctacaagggaaaaatcattgggtgattgatttctatgctccttggtgtggaccttgccagaattttgctccagaatttgagctcttggctaggatgattaaaggaaaagtgaaagctggaaaagtagactgtcaggcttatgctcagacatgccagaaagctgggatcagggcctatccaactgttaaattttatttctacgaaagagcaaagagaaattttcaagaagagcagataaataccagagatgcaaaagcaatcgctgccttaataagtgaaaaattggaaactctccgaaatcaaggcaagaggaataaggatgaactttgataatgttgaagatgaagaaaaagtttaaaagaaattctgacagatgacatcagaagacacctatttagaatgttacatttatgatgggaatgaatgaacattatcttagacttgcagttgtactgccagaattatctacagcactggtgtaaaagaagggtctgcaaactttttctgtaaagggccggtttataaatattttagactttgcaggctataatatatggttcacacatgagaacaagaatagagtcatcatgtattctttgttatttgcttttaacaacctttaaaaaatattaaaacgattcttagctcagagccatacaaaagtaggctggattcagtccatggaccatagattgctgtccccctcgacggacttataatgtttcaggtggctggcttgaacatgagtctgctgtgctatctacataaatgtctaagttgtataaagtccactttcccttcacgttttttggctgacctgaaaagaggtaacttagtttttggtcacttgttctcctaaaaatgctatccctaaccatatatttatatttcgttttaaaaacacccatgatgtggcacagtaaacaaaccctgttatgctgtattattatgaggagattcttcattgttttctttccttctcaaaggttgaaaaaatgcttttaatttttcacagccgagaaacagtgcagcagtatatgtgcacacagtaagtacacaaatttgagcaacagtaagtgcacaaattctgtagtttgccgtatcatccaggaaaacctgagggaaaaaaattatagcaattaactgggcattgtagagtatcctaaatatgttatcaagtatttagagttctatattttaaagatatatgtgttcatgtattttctgaaattgctttcatagaaattttcccactgatagttgatttttgaggcatctaatatttacatatttgccttctgaactttgttttgacctgtatcctttatttacattgggtttttctttcgtagttttggtttttcactcctgtccagtctatttattattcaaataggaaaaattactttacaggttgttttactgtagcttataatgatactgtagttattccagttactagtttactgtcagagggctgcctttttcagataaatattgacataataactgaagttatttttataagaaaatcaagtatataaatctaggaaagggatcttctagtttctgtgttgtttagactcaaagaatcacaaatttgtcagtaacatgtagttgtttagttataattcagagtgtacagaatggtaaaaattccaatcagtcaaaagaggtcaatgaattaaaaggcttgcaactttttcaaaaacctgttagaatatgctttattgtgttttgaggagttttcctttttttcttttcaatatcactttatcctgctcaccagtatttcctcataagggttattatagccataattaatgttaaaatagactttgttcttcatattctcccatctttttcgctactatatactctgtctggattctgctgtatgcctgttggcatatatggaacagtcaccacttgtcacacttaacaccagctttttgaattatgatcagtaatggcaagagcctttcattctcgaatgtttaaagcctaggagttctacaaaattggcttctttctacaagaatcccaaaatggaatgcctaaagaagtcttacttgggtaaatacttactaaaatatactggttatgtgcatatcaccacactggacactgaggagtgttcaaaaggaatctaagacatggtccccatcttccaactgtctgtaattcactgttttgtcattgagctcataaggtacttacattactacctataaatgtttcctgtacttgttagttgttgagaaacattttaggcagtaaataaaatagtaaatattatgtgtcctataatttgacctaagctgtgtgcctttggaatcagctctaagccagggccccctgggagtcatgttaagaaacacgtatcataaagtgacatacatcaaggttatcttatatagtcataacagtattattgggtctttcaaaaacagctggcagattgagcttttaatggctatattgatacagtagatagagcacctctaaggagtaccaggtataatgtgccatttctctcagcaacaccatttttgtgtgcagctgaccctctaacatggtatcaattctagctgaccaaagcacattctatcaggcagccaggcttggaaattaggtccatttaaagtatgtggcttacagtcaggtatggtggtgtgcgcctattgtcccatctacttgagaggctgaggcaggagggattgcttgggctcaggattttgaatccagcctgggcaacatagcaagaccccatctctaataaataaattatgttttgggcattaatgatgtttgtctattctgatttctcaaattttatttaggtctttcatagcttttttatttaaaggtatatgattaagataaaggaaaagtaaaatgaaatgtttatgtaattttatattctcaaaattttctttaaatttgctctgttttctgacagtgctcaaagtgggaatttttttagaagtacggttatcaaaaaaacacatttcctatgggacacacatttcaaagatgtttagtacgataaaatttttagtaaaagggtagcacttttaagtcatttgaatagaatatttgtgtaatatttagtctagtgttagtccttaaatctgccaacaaaaccagatagatgtcttaaagtaggcacatttattccattgtgactgttaagaaataataaaagattaaattaacaaaatgcattttaaatttttatgatacctatagaaaattgataatgaagatgaaaagtaaataacctttctgataatattctactttacacatatactgaaaacttacttacatatacccaaattcttctagtgaagaagtttgtaatatggtttgagtatttgtcccctccaaatctcatgttgaaatatgatccccagtgttggatatggggcctggtgggaggtgtttgggtgatgggggctgatccctcataaatggctttgtgccttccccagtggtaatgagttcctgctgtgtttattcctgcaagagctggttgttaaaaggaacttggcaccaccacctcctctctttctcgctccttctctgtgtgacatgccttctccccccgtgccttctgccatgagtaaaagctccctgagacctcaccagaagctgagcagatgctggtgccatgtttttacagcctgcagaactgcaagtcaaataaacgttttctttataaggtaaccagtcccaggtattccttcattgcaatgcaaaacagactaatacagtttcttttcagtaagaattacaaaatttaggccaatgaccaagctgagtataaattactaatcatacacaaaaatgtgtttcactggcttgagtcatttttctgtttaacactgaatttacacttagattcttgtactgtcactgagtccccttgtaaacagctaggtatattttgtgaatggaaactagccaaaaatacagccaaagtctcaacgccaaactggtctacatcagtatggactccagaaatgcatctttcaaccacttgattgcattaagtagtcatttgagtgcatcacctagtggcctttggtcctgaaagttagcaatcatccccaaaaaggtctgtgttaataactgatagacaatcttcattaagcaactgctgttttttttttttaatacttcaagttctgcaatacatgtgcagaacatgcaggtttgttacataggtatacatgtgccatggtggtttgctgcacccatcaacctgtcatctacattagctatttcttctaatgttgtccttccccttgccccctaccccgccgacaggccccattgttgatgttcccctccctgtgtccatatgttctcattgttcaactcccacttacgagtgacaacatgtggtgtttggttttctgttcctgttagtttgctgagaataatggtttccggcttcatccctgtccctgcaaaggacatgaacgcatccttttttatggctgcatagtattccatggtgtgtttgtgcccgtttctttatccagtctaacattgatgggcattttggttggttccaagtgtttcctattgtgaatagtgctccaataaacatacgtgtgcatgtgtctttatagtaaaattatttataatcctttaggtatatacccagtaacgggattgctgggtcaaatggtatttctatttctagatccttgaggaatcgccacactgtcttccacaatggttgaacaaatttacactcccactaacagtgtaaaagcattcctatttctccacatcctctccagcatctgttgtttcctcactttttaatgatcgccattctaactgatgtgacatggtatctcattgtgtttttgatttgcatttctctaatgaccactgatgatgagctttttttcatatctttgttggccacctaaatgtcttcttttgagaagtgtctgttcatatcctttgcccacttttaatgggatttttttcttgtaaatttaagttccttgtagattctggatattagccctttgtcagatggatagattgcaaaaagtttctcccattctgtaggttgcctgttcactctgatcatagtttcttttgccatgcagaagctctttaattagatcccatttatctgttttggcttttattgccattgcttttggtgttctagtcatgaagtctttgcccatgcctatgtcctgaatggtgttgcctaggttttcttctaggttttttatggtttcagaccttacatttaagtctttaatctatcaacttaatttttatataaggtgtaaggaaggggtcccagtttcagttttctacatgtggctagcctgttttcccaacatcatttattaaatagggaatcctttccccattgcttgtttttgtcaggtttgtcaaagatcagatggttgtagaagtgtggcgttatttctgagggctgtgttctgttccattggtctatagctctgttttggtaccagtaccatgctgttttggttactgagccttgtagtatagttcgttctttttgcttaggattgccttggctatatgggctcttttttttttggttccatatgaaatttaaagtagttttttccaattctgtgaagaaagtcaatggtagcttgatgggaatagcattgaatctataaattactttgggcagtatgactatttcacaatattaattcttcctatccatgagcatggaatgctttttccatttgtttctgtcctctctcatttccttgagcagtggtttgtagttcttgaagaggtccttcacgtcccttgtaagttgtattcctaggtatttaattctctttgtagcaattgtgaatgggagttcactcacgatttggctctctgtttgtcaattattggtgtataggaatgcttgtgatttttgcacattaattttgtatcctgagactttgctgaagttgcttatcagcttaaggagtttttgggctgagatgatggggttttctaaatatacaattatgtcatctgcaaacagagataatttgacttcctctcttcctgtttgaatacgctttctttctcttgcctgattgtcctggccagaacttccagtacataggagtggtgagagagggcatccttgtcttgtgccggttttcaaagggaatgcttgcagcttttgcccattcagtatgatattggctgtggttttgtcataaatagctcttattattttgagatatgttccatcatatctagttttttgagtgtttttagcatgaaagggtgttaattttatcgaaggccttttctgcatctattgagataatcatgtttttgtcataactgctatttcaaatgtttggaggaagtaaaatgtctttaaaagaataagtgttgatttttggaaaatatgaaattggaaacttagaaaacttgaattctaagtggctatttatattaccaagcggtaaaacattagctaactaaaacatggttctgaagccagttaactagcaaaaagtcccacctatgcattgaaatatctttctcaagtcattagataaagtatatggcgttaaggcaaaaaatacatatacacacacaaaaaaaatatttcagcagccactgccaactgaaagtaataaaatgaaacaatttgttggctttaatgtatttaggaaaaatcatttatttacaaaacatcttccctttcttatcatgaaaattatgaagatgaggtaaagtctgttccatttttcctctatttttgagaaatcttagatttatctttaccagtctgtaacccagctttcttgttttatattttaaatatactttctattttgtgacaggagtgaaaaaatgtttaatgattttaaacatgtttatatatatttttcagacttggaacagcagtatctcatgttttactataaaaacttgggtatattacttgaagatcaactatattgttatttttagtatgttagcaattcatctgtcaataatcaccaaagaactcaagaatgaataacatgatctatcaaaaggcctataatctcaatcttcatgttaagactttggaaagttaatttgtattaattaactaatataaattaatcctatcaagttaatttgtaataaattcaagatgcaaaaagaaaacctatttcactaccgaaattaaataaactttaaaattcattttgttggctgggtgcagtagctcacgcccataatcccagcactttgggaggccaagtggaaggatcacttaaggccaggagttcaagaccagcctagccaacatagtgaaaccccatctctactaaaaatacaaaaactagctgggcatggaggtgtgtgcctgtaatcatctaccctggaggctgagacaggagaattgcatgaacccggaggcaaaggttgcagtgagcagagatcacaccactgccctccagcctgggtgacggagtaagaccctgtctaaaaaaaaacaaaacaacaaaaaaaatcattttgttggtattttatataaacttaagaaacctccccacacaaacacacacagccatattgtcatctctgaagacagcagccacatgtgtcttattccctgcagtgttggcagaacctagcacattgttgacccgtagaagcacagtgtgtatttcaattgacaaacagccagaagtattatactgttgactgtgtttaaaactaatttgccagagctctactgtgataagaatttctgactagaaattataaattcattgttttatgccttaaaaattataaataatgataagtttaatttgcagcccttatagcttagaggcattgtagttgatattatagtaacccttttagatgttagtaacttttattgtaaaatttaaggtagctctacctgctaaagtagcacctattcttttgaaaggaactttctcaaaggatttttagggcttcataatttcttgttgctctgtgtaaatccctctgataggcttccctgaaggattttaagcagaaataacatcaggtaccagtagatggcagtgaaaaataagcagacacatttttctgataaaatgccatttctacctcagtacttgataagaatcacacagtctagctggcctttgtgttttcactaaaaatatcctgaattatcagtcagttatgtttgactatgagaaattgcagaaaagttaaaagtatttcgcatccaaaagtttgtaatctagtgtaataaataggacagatactcaaagtgtatgaatggtatgacaataaatttagaaaatcatacaggcacacacactgctatagacatgtaaagatacatacatgtattggagctcagcagattcccattcatgaagaatggtgcctgtgtaacagtataaatggatcacttctaataaataaaacataaaattggactaatagcttaatttttttttttaattcaaaaatctcagggttttctggggcttttagtactcctttgtgaaataagacacatagtcttcaggtaaaaagaaagagctcttggtcacagaaatgggtgtactgaattctcgccctgtagtcaagtacttactatgagtttggaaaaattgcttacttcatatctgtatcctaattatcctaattaactcgtttgttaagtggaaaaaatatttcagtaggtagtcatataaataagatgaggtaatgtgtttagaaaaacaaatcaatgtgcaggcaagaatcgggaatgtgggaaattttgtaggacaaatggtatgatttctttaatgaaaaagacagagaaaggtatcgtatagcttaaaaggaaaaagaaaaagaggcttttcagtcatgagccaaatgcagtatgtgggctatatttgcatcttgatttgaacagactattgtatacatttatatatacatagatctatagagacagtaggatatatttcatatatatatgaaacagttggggaaatcagaatatttgaatttgatattaactaagaattgtttgcaggggatgttgttgcatattctaatgactttttttaataatgaaaatgtttggcatttgctttaaaataatccagtaaccaggatctgagagaaaccaaaaaaaagtggggagataataatccagggactttgggtagttgttaaatggatggctgtatcataagtattgaagctgataagggatagatatgggttgattatatatttgttttgctggaaaatgttccatgatacagttttaataacagttttaatttcagaaacgcaaaatattgtttttacaactaagataacattgaaatttatacagaaccccaaatgacaagtgtataatcaactgccaggaaatcagtttacctgttagaggtagaaaagttacaggataaaaatggaattggttggcactaagtaggaccactttcgaagagaatgggtagaattcattttcttttcattacttcctttcagcgtggagcctgagcatcatttcaccattttgagcctcaagctctcaatatactggaaaattgtaatcctgttcccttcactgaggtcataatactgaattctgaaatggaaataattgactagagattgtctagtcaaactagactgatgaggtctcaccattttcttcaaggaagatcaactgaacctgcctgaaggcacagggtacaccatcttcctaaggtgtgacctcctgttcccaaaggaatagacctaggtgaccaaccagcagcacctagcttttgccagctacgcagctttgaatagccttccacccttgtgtccttcaaaccccattcttgccaaagccaagttctctccctccctctcaacagatttctcagcacacatcagatttcacaccgatctatgaaaaactatttttagagattattactatggtccgaatgtttatatcccctcctgctctccctaaaattatgttgaaatcctaacccccaaggtaatggtattaggaatgtgaggcctttgggaagggtttaagtcatgagggcagagacctcctttttgagattggtacacttataaaagagaccccagtatcttgctcgtcccttctgccatgggagaacacggtgagagcgagccatctgtaaaccaacaaacaaggccctcaccaggcactcaatctgccagcactttgatagtggacttcccagcctccagaactatgagaaataaatgtgtttttttaagccagccagttcattttgttatagcagcctggacagacaatatattgaaaaaaatcagttttgcagttccactggtcaggtgaatgccagaggagctggtccacagtcataggcgttaaacttcttttggaaactatactggcttgacagtctccccatactgattcagactccagcaaggtgcacatcacccgctagtcattgtggcttctgctgctttaaggttctggaattatggaagaaaatagggtgggcctactgtctcttcccactgtttacctggtgttttgattctgaatagtttataagctctgctattcaagaagtttatacaaacccgtaatgtactaccaaaccgttcattcattatgacaaaactgcctaccaaagccacagactttaagtctttgcaggattaccactgaaagttcacatgcttggttagcagtcttaacctctaaccaactgaacaaatcgaagacatttaatttagtcaaaataggcatgggaatgaaagtgagacttagaggcaaagaatgaggccaggtgcggtggctcacacctgtaactccagcactttggaaggcccaggcagaaggattcctgcagaccaggatttcaagaccagcctggacaacctggtgaaacctcctctctacaagaaaattcaaaaattagccaggcgtggtagggtatgcctgtagtcccagctacttgggaggctgaggtgggaggactgcttgagcccaggaggtccaggctgcagtgagccgtgatcacaccactgcactccagactgggaggcagaggaagaccccgtctcaaaaaacaaaaggtaaagaatgattttaggaattaggtgtctctaaattgaagtaatgctcacatagaaaaattaaggcatattattttactgtactctcagaaagatgtttaacaaatacttgaagagccactatttaagataaatgagagtcctttccaatttgagcctcgcagagtggttcctacagagaagggtggcaagaagggctgttctgccatcaatgaggtggtgacccgagaatatgccatcagcgtccacaagcccatccatggagtgggattcaagaagcatacccctcagagcactcaaagagatccggaagtgtgccacaaaggaaatgcgcgttgataccagcctctacaaagctgtcggggccaggcgaataaaggatgtcccatgtcttatccataagcagtagtccagaaaacatagcgaggatgaaaattcaccaaacgagctcttatactttggttacctatgtacctgttaccacttgcagaaatcaacagacaaggtggatgagaactgtaaatcatcaaataagttataaaaccaccaaaaaataggagaaaatgggagtaaaaacaaaatgtataaaaagtattaaaatttgaaaaatatcttggaaataaggatggacagtttaagtacttatctcaaaaggaaaaatgttagcaattggttgtagcaatacgtccgtctgtaagtgatggtcatatttgtgttcttttgtcccagagaacaaaaggaagtgagcttatcccacagcacaagtaacgtctatttatctcagaggaaatccagggaagttcctacttgggaaaacggaaaggtagactattcagaagttttctaaaatggacttcaagctctatgactttatgatcacttagtatgtctacggattttttggggaagagagatttcacgttaaaggtcattttgtgtcttctttaaaactcttgattccttttagagttttttaaattgtgataaagtacatgtaacaaaatttattaatcattttaaagtagcatacagttcagtagtgttaagtaatttcacattgttcaacccatctccgtgactttatcttgcaaaactgaaattttatatccataaagcaaaacctttttatttaccaatgctgctagaccctgacaaccaccaccctactttctatcaatatgactaccatagatatttaatgtaagtgaaatcatacaccatttatctttttgtgattccttattttacttagcgtaagtcctcgagactcacccatgttgtagcatgtgtcataattttcttgttttgagacggagtcttactctgtccccctggctggagtgcagtggtgtgatctcagctcactgcaacctccacctcccaggttcaagcgattctcctgcctcaccctcccaagtagctgggactgcaggcatgtgccaccacgctggctaatttttgtatgtttaacggagacaaggttttagtgtgttggccaggctggtctcgaactcttgacctcaggtgatccgcctgccttggtctcccaaagtgctgggattacaggcgtgagccaccgcacccagccaattttcttcctttttaaggctgaataatattcaattatatatacattctacattttgttattcgtccgttgataggctgccttcaccctttggccattgcaaataatgctgctataaacatgggtgtacaaatatcagaaaccctgctttcagttctttcagctatatacctagaagtgtaagtctatatcatagtaattctatttttaatatggggggacctccatactgtttttcatagcagctgcaccattttacattcccaccaatagtgcacaagagttctgatttttccacatcctcaccaacactcattttttttaaatagtaggtatcccaatgagtgtgcgttcatatcccattggagttttgatttgtacttttagagtctttaaattattactttttccatatcaaagtactttgtgggaagttggttattttacattctcataccatgctttgtattactttcccatttggatgcccttttcatccttcacctcatcctgtaaacccaaaatctaacttaaatcccaaatccaacttccactgtaaagcctttgctgacttctttacttcacattgatttctgaatttctaaaagttcctcattgtctaccacaaaactaagtatttgtttataagaaaaagctttatttagtcctatattattctctgattattccatatgttatcttccaaactagattgttaggtcttcaagagcagaagaaatttattttatacttataaacttcaagatttgctgaagtactttgggtgctaaatgcttctagcttattcgtttagtttacatgactttctgcatgtgaaacttgagaaaactgcaaatctaataccttggtcttacagaactgaacaatacttaaatgtgtttaaacctgctatataaaatgtcagatgtaaaagcgaatatctaatgaagcaccttttcccttttctaaaattcaatagtaagggccaggcacagtggctcacacctgaaatcccagcgctttgggaggccgaggcgggtggatcccttgaggttaagagttcaagaccagcctggccaacatggtgaaacgccgtctctactaaaaatacaaaaaaaaatggccaggcgtggtggtgcacgcctgtaatcccagctacttgggagtctgagacaggaaaatcgcttgaacccgggaggcagaggttacagtgagctgaggtcacgtcactgtactccagcctgggcaacaagagtgaaactctatctcaaaaaaaaaaaaaaaaattacaatagtaataattatgccttctaacactaaaatcaaataaccttacttatcagttacattgcctactaagctgacttattttctgacttttcctttgctttattctcttatttcttccaagtaaccatattctcttttaccctcctgttcaactgtctatgctccttctctctttgttcactattttgatatttaaatgttatgacttattttcaagtaaatatttttttaatttcttcatttgggataaaatattcactacataaatttagtggataaatacccccacagagatcgaccctgcatgaaatgtgttccctcagaagtagggcaattcattcattatgagatcaagccataaaatttaaatccaagcagtaattctccaattaaagtaactctagagcttagttttcagtcctcctgaatcataactagttggcaacaaaaactagtatgccttggtgtgaataaaccttaacatagaaactcacccagcctcaaaagttaaaaattaagagagatatgtattcaggtggccatttatacacaatatttttgaatactattctggccaaattagtataaaatgggttactctaaaatgaaattttaaaagtatataaacatcttaaactttaaaacttcagcccagctagaagtcaacgtgtgtttctgaaactatgctggggaaagtagctctgtccataatgattatatagttgttagcaaaatattggtcaaaactttttcagtttaatgagtttcaagatattcttcaaactggcctctgtgaactctttcttgacaagtgaaacctggctccaacaatgactactttattctacctctcatttattttctgtttaataaatccagtatttgggcatacaaactgtatacaacattttataacactctaatgtggataagacacctcaaaaacaggagtttagtcatttcagtcacatgtttctaatacatgataagatttgcagttatcgtttaattaattgcaatatggaaatagatactaaaaaatctaaattgcatcttacatttcaacaatggatgtttaaagcgtttaaaagttatgttttgcattttacaacatattgaagatacacattttaaatttaactctaaacaatgcaataatctagagaatcagagaattggatcctgaaacaccttataagttcagtcctgttgattagtatgtttccctgtcctagagtgcatgaactttcaaagccaggacacaatcttgttcacttttcatgccatcatcttgacactcaatacatgttcaaagagtaaattaaagaaaaaagagatgctcaagtcaatttataagtaatcctcacaaatgcttgcataccatcagtgaacaattatttttttatctccatgctataatcttgcacaagtttcattagaattaaatgcactatctgaagtctatgtttattaaatgaggattacagtagttggttatctttgtgaggggttttgagggttgtggaacaggataacattttgaggtacaaaaaataatgaagaggatatattccaatttctttccttccccaaggcttttcattacagctgttataaaccctggtagaattgattggtttccttttcagcttcctgttttgtccctcaatgttcacaaaagtcccatctgataaatgtattgtttaacctctcattgtttgaaagaacacctctttgctccccacagattacagacctattggcttaagcagtccatctaaatgcatgccagtttctttcttgataaattagaggcctataacctcaaaccagtttatctgcaagagaagtgtgtgaagttagactcaattcttccgctaatggaacatcgtaatcctccttgtcatctttcctttggccttcctgaatagaaatcatttatgaggaagttacatgagctcaacatgagccccatgtcactcagcaaacatttatttgagtacttacaatgtgctaggctttgttctatgcatttaagatagtgtattaaatgtattgacctcatgaagattctattctcgcagtggggagatagacaataaacaattaatataagcaaatgttaagtatgttagaagtatgttagaagatgtgctgtgaaataaagaaaaaggtagaccagggtatgagggattaggagtgtgggggcagcagcaggagagtttcggtattaaatagggtggacagggcaggtctcttggagaagatgccattgaaggaggtggaaaaaatgtagccactaaatgggctgagggtagagcatatgaacagagagaaaggccagaggacaggctccaaggcatgcttggcaggttcaaggaacagcagggaggctcatgtggctggaatggagtgagctagcaggagagaagatgaagttagagggagagagaaagtggggagccagatcatagagggctttgcaggtcacttgtaaggactttagctttctaacttttgtaaggacttcaacttctactcacagtgaaattgtgaaattccagaaccaaaaagaagatcctggtaaaagagaaactttcagcaaaatatatttaacattttatttgagtgaagaacaattcatccatcaggcagcactgagaaccagaagacattcagagagctctgctttgcgaggtatgcagtgaacattcatagacagaaaacaaaaattaagtacagaaatagcttgattggttacagataggcatttgccttatttggacatggtctgctccaaataaggcaagttggcagcatgcaattggctgtgacctatctgttacaaaaatatatctatataatcctaaattaggtttcagtttatttaagtactaaattaggttgcaatttattacatgggaactcaaagtctggagacagcctcaggccaaggtcctcttgcttatttaatttagcaatcctaaaattttccagagaggaaacacatcacacacacacacacacacacacacacacacacacacacacacactacctacaaaaaaataacaattagaaagtaattggagcttgaagtattctagaagactttggagcaaagccttccaaattctgagaggaaaatatttttaacctaggattctattcatacctacccagactaacaagtagcaggcagatgataaatatatttttaggtggttaggtgatgaaacacctcctccaaatgaaggcataaacaacaatgcatggggatccaagaaacagtgactccaacccaagagagcagtgaacaaatccacaggacagcagctaagtaggaggcctaaacatcacctggggcagatggggcgagagagcagagagcttgggaaagaagtctctgaggagaaagaatgaggcaataagtcagatgcgtatttgcggacctcagaaaaatttgagtacataggaaacaatagatgaaggatagaaataatccattcagattctctcctttgcatgatgaccacattaaacttacagagtaagaaatgtcattctagatttgattctactgtttgtctttgcagtgagctatgtttttttataacatgtagaagtgaaataaacttgtcacaaaaatgcaaa

SEQ ID NO: 127701 - DNA, 2988 bp, Homo sapiens
  Payload ID: 4994
  Gene Symbol: DNAJC10
  Gene Name: DnaJ (Hsp40) homolog, subfamily C, member 10
  ENST ID: ENST00000418559
  CDS Start-End: 1-828
atgggagtctggttaaataaagatgactatatcagagacttgaaaaggatcattctctgttttctgatagtgtatatggccattttagtgggcacagatcaggatttttacagtttacttggagtgtccaaaactgcaagcagtagagaaataagacaagctttcaagaaattggcattgaagttacatcctgataaaaacccgaataacccaaatgcacatggcgattttttaaaaataaatagagcatatgaagtactcaaagatgaagatctacggaaaaagtatgacaaatatggagaaaagggacttgaggataatcaaggtggccagtatgaaagctggaactattatcgttatgattttggtatttatgatgatgatcctgaaatcataacattggaaagaagagaatttgatgctgctgttaattctggagaactgtggtttgtaaatttttactccccaggctgttcacactgccatgatttagctcccacatggagagactttgctaaagaagtggatgggttacttcgaattggagctgttaactgtggtgatgatagaatgctttgccgaatgaaaggagtcaacagctatcccagcctcttcatttttcggtctggaatggccccagtgaaatatcatggagacagatcaaaggagagtttagtgagttttgcaatgcagcatgttagaagtacagtgacagaactttggacaggaaattttgtcaactccatacaaactgcttttgctgctggtattggctggctgatcactttttgttcaaaaggaggagtttctcaactcattggatgctaaagaaatatatttggaagtaatacataatcttccagattttgaactactttcggcaaacacactagaggatcgtttggctcatcatcggtggctgttattttttcattttggaaaaaatgaaaattcaaatgatcctgagctgaaaaaactaaaaactctacttaaaaatgatcatattcaagttggcaggtttgactgttcctctgcaccagacatctgtagtaatctgtatgtttttcagccgtctctagcagtatttaaaggacaaggaaccaaagaatatgaaattcatcatggaaagaagattctatatgatatacttgcctttgccaaagaaagtgtgaattctcatgttaccacgcttggacctcaaaattttcctgccaatgacaaagaaccatggcttgttgatttctttgccccctggtgtccaccatgtcgagctttactaccagagttacgaagagcatcaaatcttctttatggtcagcttaagtttggtacactagattgtacagttcatgagggactctgtaacatgtatatttgctggaaagaagttaaaacaatgaacaagccttttgaaatctttgtttaaatgaaattattttctcagtataacattcaggcttatccaacaacagtggtattcaaccagtccaacattcatgagtatgaaggacatcactctgctgaacaaatcttggagttcatagaggatcttatgaatccttcagtggtctcccttacacccaccaccttcaacgaactagttacacaaagaaaacacaacgaagtctggatggttgatttctattctccgtggtgtcatccttgccaagtcttaatgccagaatggaaaagaatggcccggacattaactggactgatcaacgtgggcagtatagattgccaacagtatcattctttttgtgcccaggaaaacgttcaaagataccctgagataagattttttcccccaaaatcaaataaagcttatcattatcacagttacaatggttggaatagggatgcttattccctgagaatctggggtctaggatttttacctcaagtatccacagatctaacacctcagactttcagtgaaaaagttctacaagggaaaaatcattgggtgattgatttctatgctccttggtgtggaccttgccagaattttgctccagaatttgagctcttggctaggatgattaaaggaaaagtgaaagctggaaaagtagactgtcaggcttatgctcagacatgccagaaagctgggatcagggcctatccaactgttaaattttatttctacgaaagagcaaagagaaattttcaagaagagcagataaataccagagatgcaaaagcaatcgctgccttaataagtgaaaaattggaaactctccgaaatcaaggcaagaggaataaggatgaactttgataatgttgaagatgaagaaaaagtttaaaagaaattctgacagatgacatcagaagacacctatttagaatgttacatttatgatgggaatgaatgaacattatcttagacttgcagttgtactgccagaattatctacagcactggtgtaaaagaagggtctgcaaactttttctgtaaagggccggtttataaatattttagactttgcaggctataatatatggttcacacatgagaacaagaatagagtcatcatgtattctttgttatttgcttttaacaacctttaaaaaatattaaaacgattcttagctcagagccatacaaaagtaggctggattcagtccatggaccatagattgctgtccccctcgacggacttataatgtttcaggtggctggcttgaacatgagtctgctgtgctatctacataaatgtctaagttgtataaagtccactttcccttcacgttttttggctgacctgaaaagaggtaacttagtttttggtcacttgttctcctaaaaatgctatccctaaccatatatttatatttcgttttaaaaacacccatgatgtggcacagtaaacaaaccctgttatgctgtattattatgaggagattcttcattgttttctttccttctcaaaggttgaaaaaatgcttttaatttttcacagccgagaaacagtgcagcagtatatgtgc

SEQ ID NO: 127702 - DNA, 605 bp, Homo sapiens
  Payload ID: 4994
  Gene Symbol: DNAJC10
  Gene Name: DnaJ (Hsp40) homolog, subfamily C, member 10
  ENST ID: ENST00000444005
  CDS Start-End: 1-366
gccccagtgaaatatcatggagacagatcaaaggagagtttagtgagttttgcaatgcagcatgttagaagtacagtgacagaactttggacaggaaattttgtcaactccatacaaactgcttttgctgctggtattggctggctgatcactttttgttcaaaaggaggagattgtttgacttcacagacacgactcaggcttagtggcatgttggatggtcttgttaatgtaggatggatggactgtgccacccaggataacctttgtaaaagcttagatattacaacaagtactactgcttattttcctcctggagccactttaaataacaaagagaaaaacagtattttgctgcttcattgagagaatcagaccagcagagagagagagttatatgacaaaatatgctgaggataaaatattgacaaataaagaagatttgttagaagggccttttatactcgtttgtgttttaaataagagactcgggccgaaaacaagtttaagataagatcttttctcaactcattggatgctaaagaaatatatttggaagtaatacataatcttccagattttgaactactttcggcaaacacact

SEQ ID NO: 127703 - DNA, 1669 bp, Homo sapiens
  Payload ID: 4994
  Gene Symbol: DNAJC10
  Gene Name: DnaJ (Hsp40) homolog, subfamily C, member 10
  Uniprot ID: Q8IXB1
  ENST ID: ENST00000537515
  CDS Start-End: 21-1019
gaacttgcataagaaagagaatgggagtctggttaaataaagatgactatatcagagacttgaaaaggatcattctctgttttctgatagtgtatatggccattttagtgggcacagatcaggatttttacagtttacttggagtgtccaaaactgcaagcagtagagaaataagacaagctttcaagaaattggcattgaagttacatcctgataaaaacccgaataacccaaatgcacatggcgattttttaaaaataaatagagcatatgaagtactcaaagatgaagatctacggaaaaagtatgacaaatatggagaaaagggacttgaggataatcaaggtggccagtatgaaagctggaactattatcgttatgattttggtatttatgatgatgatcctgaaatcataacattggaaagaagagaatttgatgctgctgttaattctggagaactgtggtttgtaaatttttactccccaggctgttcacactgccatgatttagctcccacatggagagactttgctaaagaagtggatgggttacttcgaattggagctgttaactgtggtgatgatagaatgctttgccgaatgaaaggagtcaacagctatcccagcctcttcatttttcggtctggaatggccccagtgaaatatcatggagacagatcaaaggagagtttagtgagttttgcaatgcagcatgttagaagtacagtgacagaactttggacaggaaattttgtcaactccatacaaactgcttttgctgctggtattggctggctgatcactttttgttcaaaaggaggagattgtttgacttcacagacacgactcaggcttagtggcatgttggatggtcttgttaatgtaggatggatggactgtgccacccaggataacctttgtaaaagcttagatattacaacaagtactactgcttattttcctcctggagccactttaaataacaaagagaaaaacagtattttgctgcttcattgagagaatcagaccagcagagagagagagttatatgacaaaatatgctgaggataaaatattgacaaataaagaagatttgttagaagggccttttatactcgtttgtgttttaaataagagactcgggccgaaaacaagtttaagataagatctgtatcattgtattttactctaaaaactcctaagtggtttggtttttagatgaaaacctctataatgagcaaaagtccattccaattttccacttctaagttcctcttaattaatcttaattattggttggggaatgaagtgtctttgatagtctattattcttccttctagtgttataaaaattcttaagtgaatgtgtaaaacattggcattctgtaaaacatgattagcattaaaattaagctaaagataatgtggtttttcttgatgattgggaggtcactcaggatttttctgagcatttttatagaatacacatcatagttaattaaaaattccagttaatgcaacatcttataatggaatttattgtatatcactatttaagaaacagcttagttatataatatttttgataattgccaaaatacactttttttgaaaaaagacatttggaattgtttgaaaaactatttaccttctataatcattttcct

SEQ ID NO: 127704 - DNA, 5783 bp, Homo sapiens
  Payload ID: 4994
  Gene Symbol: DNAJC10
  Gene Name: DnaJ (Hsp40) homolog, subfamily C, member 10
  Uniprot ID: Q8IXB1
  ENST ID: ENST00000616986
  CDS Start-End: 647-2890
gcattggtgagggggcgcgggctgcttggccagggcagttccctcagctccgggttggagccggagccggagccggatcccgcgcacaccgccacgtcaacctaaacctacaccgccctctccaccccaccgccgcagcgcccgctgggcccgcagcgggtctccccaggcagcgtcctccacgcctttcccacaatgctccgcgccaggccccgccccggctcgccgtggagaccggcgcgtgaggaacctaccggtaccggccgcgcgctggtagtcgccggtgtggctgcacctcaccaatcccgtgcgccgcggctgggccgtcggagagtgcgtgtgcttctctcctgcacgcggtgcttgggctcggccaggcggggtccgccgccagggtttgaggatgggggagtagctacaggaagcgaccccgcgatggcaaggtatatttttgtggaatgaaaaggaagtattagaaatgagctgaagaccattcacagattaatatttttggggacagatttgtgatgcttgattcacccttgaagtaatgtagacagaagttctcaaatttgcatattacatcaactggaaccagcagtgaatcttaatgttcacttaaatcagaacttgcataagaaagagaatgggagtctggttaaataaagatgactatatcagagacttgaaaaggatcattctctgttttctgatagtgtatatggccattttagtgggcacagatcaggatttttacagtttacttggagtgtccaaaactgcaagcagtagagaaataagacaagctttcaagaaattggcattgaagttacatcctgataaaaacccgaataacccaaatgcacatggcgattttttaaaaataaatagagcatatgaagtactcaaagatgaagatctacggaaaaagtatgacaaatatggagaaaagggacttgaggataatcaaggtggccagtatgaaagctggaactattatcgttatgattttggtatttatgatgatgatcctgaaatcataacattggaaagaagagaatttgatgctgctgttaattctggagaactgtggtttgtaaatttttactccccaggctgttcacactgccatgatttagctcccacatggagagactttgctaaagaagtggatgggttacttcgaattggagctgttaactgtggtgatgatagaatgctttgccgaatgaaaggagtcaacagctatcccagcctcttcatttttcggtctggaatggccccagtgaaatatcatggagacagatcaaaggagagtttagtgagttttgcaatgcagcatgttagaagtacagtgacagaactttggacaggaaattttgtcaactccatacaaactgcttttgctgctggtattggctggctgatcactttttgttcaaaaggaggagattgtttgacttcacagacacgactcaggcttagtggcatgttgtttctcaactcattggatgctaaagaaatatatttggaagtaatacataatcttccagattttgaactactttcggcaaacacactagaggatcgtttggctcatcatcggtggctgttattttttcattttggaaaaaatgaaaattcaaatgatcctgagctgaaaaaactaaaaactctacttaaaaatgatcatattcaagttggcaggtttgactgttcctctgcaccagacatctgtagtaatctgtatgtttttcagccgtctctagcagtatttaaaggacaaggaaccaaagaatatgaaattcatcatggaaagaagattctatatgatatacttgcctttgccaaagaaagtgtgaattctcatgttaccacgcttggacctcaaaattttcctgccaatgacaaagaaccatggcttgttgatttctttgccccctggtgtccaccatgtcgagctttactaccagagttacgaagagcatcaaatcttctttatggtcagcttaagtttggtacactagattgtacagttcatgagggactctgtaacatgtataacattcaggcttatccaacaacagtggtattcaaccagtccaacattcatgagtatgaaggacatcactctgctgaacaaatcttggagttcatagaggatcttatgaatccttcagtggtctcccttacacccaccaccttcaacgaactagttacacaaagaaaacacaacgaagtctggatggttgatttctattctccgtggtgtcatccttgccaagtcttaatgccagaatggaaaagaatggcccggacattaactggactgatcaacgtgggcagtatagattgccaacagtatcattctttttgtgcccaggaaaacgttcaaagataccctgagataagattttttcccccaaaatcaaataaagcttatcattatcacagttacaatggttggaatagggatgcttattccctgagaatctggggtctaggatttttacctcaagtatccacagatctaacacctcagactttcagtgaaaaagttctacaagggaaaaatcattgggtgattgatttctatgctccttggtgtggaccttgccagaattttgctccagaatttgagctcttggctaggatgattaaaggaaaagtgaaagctggaaaagtagactgtcaggcttatgctcagacatgccagaaagctgggatcagggcctatccaactgttaaattttatttctacgaaagagcaaagagaaattttcaagaagagcagataaataccagagatgcaaaagcaatcgctgccttaataagtgaaaaattggaaactctccgaaatcaaggcaagaggaataaggatgaactttgataatgttgaagatgaagaaaaagtttaaaagaaattctgacagatgacatcagaagacacctatttagaatgttacatttatgatgggaatgaatgaacattatcttagacttgcagttgtactgccagaattatctacagcactggtgtaaaagaagggtctgcaaactttttctgtaaagggccggtttataaatattttagactttgcaggctataatatatggttcacacatgagaacaagaatagagtcatcatgtattctttgttatttgcttttaacaacctttaaaaaatattaaaacgattcttagctcagagccatacaaaagtaggctggattcagtccatggaccatagattgctgtccccctcgacggacttataatgtttcaggtggctggcttgaacatgagtctgctgtgctatctacataaatgtctaagttgtataaagtccactttcccttcacgttttttggctgacctgaaaagaggtaacttagtttttggtcacttgttctcctaaaaatgctatccctaaccatatatttatatttcgttttaaaaacacccatgatgtggcacagtaaacaaaccctgttatgctgtattattatgaggagattcttcattgttttctttccttctcaaaggttgaaaaaatgcttttaatttttcacagccgagaaacagtgcagcagtatatgtgcacacagtaagtacacaaatttgagcaacagtaagtgcacaaattctgtagtttgccgtatcatccaggaaaacctgagggaaaaaaattatagcaattaactgggcattgtagagtatcctaaatatgttatcaagtatttagagttctatattttaaagatatatgtgttcatgtattttctgaaattgctttcatagaaattttcccactgatagttgatttttgaggcatctaatatttacatatttgccttctgaactttgttttgacctgtatcctttatttacattgggtttttctttcgtagttttggtttttcactcctgtccagtctatttattattcaaataggaaaaattactttacaggttgttttactgtagcttataatgatactgtagttattccagttactagtttactgtcagagggctgcctttttcagataaatattgacataataactgaagttatttttataagaaaatcaagtatataaatctaggaaagggatcttctagtttctgtgttgtttagactcaaagaatcacaaatttgtcagtaacatgtagttgtttagttataattcagagtgtacagaatggtaaaaattccaatcagtcaaaagaggtcaatgaattaaaaggcttgcaactttttcaaaaacctgttagaatatgctttattgtgttttgaggagttttcctttttttcttttcaatatcactttatcctgctcaccagtatttcctcataagggttattatagccataattaatgttaaaatagactttgttcttcatattctcccatctttttcgctactatatactctgtctggattctgctgtatgcctgttggcatatatggaacagtcaccacttgtcacacttaacaccagctttttgaattatgatcagtaatggcaagagcctttcattctcgaatgtttaaagcctaggagttctacaaaattggcttctttctacaagaatcccaaaatggaatgcctaaagaagtcttacttgggtaaatacttactaaaatatactggttatgtgcatatcaccacactggacactgaggagtgttcaaaaggaatctaagacatggtccccatcttccaactgtctgtaattcactgttttgtcattgagctcataaggtacttacattactacctataaatgtttcctgtacttgttagttgttgagaaacattttaggcagtaaataaaatagtaaatattatgtgtcctataatttgacctaagctgtgtgcctttggaatcagctctaagccagggccccctgggagtcatgttaagaaacacgtatcataaagtgacatacatcaaggttatcttatatagtcataacagtattattgggtctttcaaaaacagctggcagattgagcttttaatggctatattgatacagtagatagagcacctctaaggagtaccaggtataatgtgccatttctctcagcaacaccatttttgtgtgcagctgaccctctaacatggtatcaattctagctgaccaaagcacattctatcaggcagccaggcttggaaattaggtccatttaaagtatgtggcttacagtcaggtatggtggtgtgcgcctattgtcccatctacttgagaggctgaggcaggagggattgcttgggctcaggattttgaatccagcctgggcaacatagcaagaccccatctctaataaataaattatgttttgggcattaatgatgtttgtctattctgatttctcaaattttatttaggtctttcatagcttttttatttaaaggtatatgattaagataaaggaaaagtaaaatgaaatgtttatgtaattttatattctcaaaattttctttaaatttgctctgttttctgacagtgctcaaagtgggaatttttttagaagtacggttatcaaaaaaacacatttcctatgggacacacatttcaaagatgtttagtacgataaaatttttagtaaaagggtagcacttttaagtcatttgaatagaatatttgtgtaatatttagtctagtgttagtccttaaatctgccaacaaaaccagatagatgtcttaaagtaggcacatttattccattgtgactgttaagaaataataaaagattaaattaacaaaa

SEQ ID NO: 127705 - DNA, 1010 bp, Homo sapiens
  Payload ID: 4994
  Gene Symbol: DNAJC10
  Gene Name: DnaJ (Hsp40) homolog, subfamily C, member 10
  ENST ID: ENST00000613960
  CDS Start-End: 1-534
atgggagtctggttaaataaagatgactatatcagagacttgaaaaggatcattctctgttttctgatagtgtatatggccattttagtgggcacagatcaggatttttacagtttacttggagtgtccaaaactgcaagcagtagagaaataagacaagctttcaagaaattggcattgaagttacatcctgataaaaacccgaataacccaaatgcacatggcgattttttaaaaataaatagagcatatgaagtactcaaagatgaagatctacggaaaaagtatgacaaatatggagaaaagggacttgaggataatcaaggtggccagtatgaaagctggaactattatcgttatgattttggtatttatgatgatgatcctgaaatcataacattggaaagaagagaatttgatgctgctgttaattctggagaactgtggtttgtaaatttttactccccaggctgttcacactgccatgatttagctcccacatggagagactttgctaaagaaaccctgagataagattttttcccccaaaatcaaataaagcttatcattatcacagttacaatggttggaatagggatgcttattccctgagaatctggggtctaggatttttacctcaagtatccacagatctaacacctcagactttcagtgaaaaagttctacaagggaaaaatcattgggtgattgatttctatgctccttggtgtggaccttgccagaattttgctccagaatttgagctcttggctaggatgattaaaggaaaagtgaaagctggaaaagtagactgtcaggcttatgctcagacatgccagaaagctgggatcagggcctatccaactgttaaattttatttctacgaaagagcaaagagaaattttcaagaagagcagataaataccagagatgcaaaagcaatcgctgccttaataagtgaaaaattggaaactctccgaaatcaaggcaagaggaataaggtatggact

SEQ ID NO: 127706 - DNA, 2210 bp, Homo sapiens
  Payload ID: 4995
  Gene Symbol: DNAJC11
  Gene Name: DnaJ (Hsp40) homolog, subfamily C, member 11
  Uniprot ID: Q9NVH1
  ENST ID: ENST00000294401
  CDS Start-End: 125-1648
gacggctccgggccgccaggggccgctgtggcgcagccgggctggcccgcgctgtccctgacgcggatcactggcccctcttgagcacggccttgccggtttggcggggtgaaaggttgcgaagatggcgacggccttgagcgaggaggagctggacaatgaagactattactcgttgctgaacgtgcgcagggaggcctcttctgaagagctgaaagctgcctaccggaggctctgtatgctctaccatccagacaagcacagagacccagagctcaagtcacaggcggaacgactgtttaaccttgttcaccaggcttatgaagtgcttagtgacccccaaaccagggccatctatgatatatatgggaagagaggactggaaatggaaggatgggaggttgtggaaaggaggagaacccctgctgaaattcgagaggagtttgagcggctgcagagagagagagaagagaggagattgcagcagcgaaccaatcccaagggaacgatcagcgttggagtagatgccaccgacctttttgatcgctatgatgaggagtatgaagatgtgtccggcagtagctttccgcagattgaaattaataaaatgcacatatcccagtccattgaggcacccttgacagcgacagacacagccatcctctctggaagcctctcaacccagaatggaaatggaggaggttccattaactttgcgctcagacgagtaacttcggcaaagggatggggagagttggaatttggagctggagacctacaggggcctttgttcggtctcaagctgttccgtaatctcacaccaagatgctttgtgacaacaaactgtgctctgcagttttcatcccgtggaatccgacccggcctgaccactgtcctagctcggaacctagacaagaacaccgtgggctacctgcagtggcgatggggtatccagtcagccatgaacactagcatcgtccgagacactaaaaccagccacttcactgtggccctgcagctgggaatccctcactcctttgcactgatcagctatcagcacaaattccaagatgacgatcagactcgtgtgaaaggatccctcaaagcaggcttctttgggacggtggtggagtacggagctgagaggaagatctccaggcacagcgttttgggtgcagctgtcagcgttggagttccacagggtgtttctctcaaagtcaaggaattggagaagcagagggaaagcgccgccaccgatgtgctgcagaagaagcaagaggcggagtccgctgtccggctgatgcaggaatctgtccgaaggataattgaggcagaagagtccagaatgggcctcatcatcgtcaatgcctggtacgggaagtttgtcaatgacaagagcaggaagagcgagaaggtgaaggtgattgacgtgactgtgcccctgcagtgcctggtgaaggactcgaagctcatcctcacggaggcctccaaggctgggctgcctggcttttatgacccgtgtgtgggggaagagaagaacctgaaagtgctctatcagttccggggcgtcctgcatcaggtgatggtgctggacagtgaggccctccggataccaaagcagtcccacaggatcgatacagatggataaactgccaagaaccagatttttaaaaggccgcaaaaaatcttttcctgggagtctacaaatttggaaatgaaaaaacccagacatcagatgtttttattttatattattattatagaaggtggtaccattatcaattatgtgaagggacatgcagacaccccagcttttgagggtgctgggggtaggactgaggcagccccactgggaaccagactgcagcctggcccatggctgttttcccaaggatcagttcctggagggaagggctctggccctgactccgctgtgtcccgagcacacgtgctgaccgcagcccgccgccctgtagttcttggctgggtctggaggtgtctgtggagcaccctgccctcaccacaggagcgtgagccacttctgcagtccacgctgaacatgggaaacaacctgaaaagcaggcaggcctcccggtcagggagcctctgctgtgctggcttcccatgaccacctcctcttgctgaaatattactgcttgaatctggagcagattgcgggtttataaaactgctttttatctgagaacaaa

SEQ ID NO: 127707 - DNA, 3311 bp, Homo sapiens
  Payload ID: 4995
  Gene Symbol: DNAJC11
  Gene Name: DnaJ (Hsp40) homolog, subfamily C, member 11
  Uniprot ID: Q9NVH1
  ENST ID: ENST00000377577
  CDS Start-End: 125-1804
gacggctccgggccgccaggggccgctgtggcgcagccgggctggcccgcgctgtccctgacgcggatcactggcccctcttgagcacggccttgccggtttggcggggtgaaaggttgcgaagatggcgacggccttgagcgaggaggagctggacaatgaagactattactcgttgctgaacgtgcgcagggaggcctcttctgaagagctgaaagctgcctaccggaggctctgtatgctctaccatccagacaagcacagagacccagagctcaagtcacaggcggaacgactgtttaaccttgttcaccaggcttatgaagtgcttagtgacccccaaaccagggccatctatgatatatatgggaagagaggactggaaatggaaggatgggaggttgtggaaaggaggagaacccctgctgaaattcgagaggagtttgagcggctgcagagagagagagaagagaggagattgcagcagcgaaccaatcccaagggaacgatcagcgttggagtagatgccaccgacctttttgatcgctatgatgaggagtatgaagatgtgtccggcagtagctttccgcagattgaaattaataaaatgcacatatcccagtccattgaggcacccttgacagcgacagacacagccatcctctctggaagcctctcaacccagaatggaaatggaggaggttccattaactttgcgctcagacgagtaacttcggcaaagggatggggagagttggaatttggagctggagacctacaggggcctttgttcggtctcaagctgttccgtaatctcacaccaagatgctttgtgacaacaaactgtgctctgcagttttcatcccgtggaatccgacccggcctgaccactgtcctagctcggaacctagacaagaacaccgtgggctacctgcagtggcgatggggtatccagtcagccatgaacactagcatcgtccgagacactaaaaccagccacttcactgtggccctgcagctgggaatccctcactcctttgcactgatcagctatcagcacaaattccaagatgacgatcagactcgtgtgaaaggatccctcaaagcaggcttctttgggacggtggtggagtacggagctgagaggaagatctccaggcacagcgttttgggtgcagctgtcagcgttggagttccacagggtgtttctctcaaagtcaagctcaacagggccagtcagacatacttcttccctattcacttgacggaccagcttctgcccagcgccatgttctatgccaccgtggggcctctagtggtctactttgccatgcaccgtctgatcatcaaaccatacctcagggctcagaaagagaaggaattggagaagcagagggaaagcgccgccaccgatgtgctgcagaagaagcaagaggcggagtccgctgtccggctgatgcaggaatctgtccgaaggataattgaggcagaagagtccagaatgggcctcatcatcgtcaatgcctggtacgggaagtttgtcaatgacaagagcaggaagagcgagaaggtgaaggtgattgacgtgactgtgcccctgcagtgcctggtgaaggactcgaagctcatcctcacggaggcctccaaggctgggctgcctggcttttatgacccgtgtgtgggggaagagaagaacctgaaagtgctctatcagttccggggcgtcctgcatcaggtgatggtgctggacagtgaggccctccggataccaaagcagtcccacaggatcgatacagatggataaactgccaagaaccagatttttaaaaggccgcaaaaaatcttttcctgggagtctacaaatttggaaatgaaaaaacccagacatcagatgtttttattttatattattattatagaaggtggtaccattatcaattatgtgaagggacatgcagacaccccagcttttgagggtgctgggggtaggactgaggcagccccactgggaaccagactgcagcctggcccatggctgttttcccaaggatcagttcctggagggaagggctctggccctgactccgctgtgtcccgagcacacgtgctgaccgcagcccgccgccctgtagttcttggctgggtctggaggtgtctgtggagcaccctgccctcaccacaggagcgtgagccacttctgcagtccacgctgaacatgggaaacaacctgaaaagcaggcaggcctcccggtcagggagcctctgctgtgctggcttcccatgaccacctcctcttgctgaaatattactgcttgaatctggagcagattgcgggtttataaaactgctttttatctgagaacaaacgggtttggaaattagtcgtcttttttccccactcccagagctgctcaagtcattccaccggccccctcggcttgggacagggtagtgtaactcccgatcccagggcctagccctgacacaggtggcttcccgtatcccggtgggaaaacgccctgccaccagcgggcttgagctggcctgtgtccctccaccgcctgcaccacccacctccagagtgcagtgctgggcaagggcagctcaagaggacaggaccaggcgcttggcaagacatcagacacacccaacccaaaggcgtggaccccaggcccggcccgtggtacccagcaggtggcactgcagctccccgctcctgcaggtccagcgtcctcacaggaacaccagggcctgtgctccggagccttccttcagacccttcctccacgtgcccacttgggatgcagaatgcagcggagctaggaccccctccacggcctggacctcggctgcagtaaagttacgtgaggcctgtctctcggggcctggaagtggcagccatcagttgctcttgctgacccctcggagcaagcgccgcacaggtggtggctgagacagctggcgcggggggccccaagctgcgccggcctccagcccacccacagctgttgctgaagtcaggcctccctccccagcactggtatctgagtaacggctaagaacctccttcctctggttttgaaaagcagttcgggttgtccaattctgtaacattcatctccattttttaaaaaggtttctctgacggccccacggcccgagccgcggtgagcgtcgtgttgcatgagcctgggccccgggcttcccgtgcgcctctgccgcaggtgcttctgggcacccatcctctgcgtttcatttgcagtcgactgtacagaaggcactcaccacaataaacctttcctgaaagcaga

SEQ ID NO: 127708 - DNA, 975 bp, Homo sapiens
  Payload ID: 4995
  Gene Symbol: DNAJC11
  Gene Name: DnaJ (Hsp40) homolog, subfamily C, member 11
  ENST ID: ENST00000426784
  CDS Start-End: 3-975
agatggcgacggccttgagcgaggaggagctggacaatgaagactattactcgttgctgaacgtgcgcagggaggcctcttctgaagagctgaaagctgcctaccggaggctctgtatgctctaccatccagacaagcacagagacccagagctcaagtcacaggcggaacgactgtttaaccttgttcaccaggcttatgaagtgcttagtgacccccaaaccagggccatctatgatatatatgggaagagaggactggaaatggaaggatgggaggttgtggaaaggaggagaacccctgctgaaattcgagaggagtttgagcggctgcagagagagagagaagagaggagattgcagcagcgaaccaatcccaagggaacgatcagcgttggagtagatgccaccgacctttttgatcgctatgatgaggagtatgaagatgtgtccggcagtagctttccgcagattgaaattaataaaatgcacatatcccagtccattgaggcacccttgacagcgacagacacagccatcctctctggaagcctctcaacccagaatggaaatggaggaggttccattaactttgcgctcagacgagtaacttcggcaaagggatggggagagagaatgacagactgcctcatcatcgggttgattgacatatgccagagatgtagtccccagccagcctctgcttcctgtcgtctctgctgctgccatgtcacactcctagaactgtatatccctgtcccttctagaacgacagcagtgtcttcatttcctatatgctttgtgacaacaaactgtgctctgcagttttcatcccgtggaatccgacccggcctgaccactgtcctagctcggaacctagacaagaacaccgtgggctacctgcagtggcgatggggtatccagtcagccatgaacactagcatcgtccgagacactaaaaccagccacttcactg

SEQ ID NO: 127709 - DNA, 1357 bp, Homo sapiens
  Payload ID: 4995
  Gene Symbol: DNAJC11
  Gene Name: DnaJ (Hsp40) homolog, subfamily C, member 11
  ENST ID: ENST00000451196
  CDS Start-End: 1-999
gcctcttctgaagagctgaaagctgcctaccggaggctctgtatgctctaccatccagacaagcacagagacccagagctcaagtcacaggcggaacgactgtttaaccttgttcaccaggcttatgaagtgcttagtgacccccaaaccagggccatctatgatatatatgggaagagaggactggaaatggaaggatgggaggttgtggaaaggaggagaacccctgctgaaattcgagaggagtttgagcggctgcagagagagagagaagagaggagattgcagcagcgaaccaatcccaagggaacgatcagcgttggagtagatgccaccgacctttttgatcgctatgatgaggagtatgaagatgtgtccggcagtagctttccgcagattgaaattaataaaatgcacatatcccagtccattgaggcacccttgacagcgacagacacagccatcctctctggaagcctctcaacccagaatggaaatggaggaggttccattaactttgcgctcagacgagtaacttcggcaaagggatggggagagttggaatttggagctggagacctacaggggcctttgttcggtctcaagctgttccgtaatctcacaccaagatgctttgtgacaacaaactgtgctctgcagttttcatcccgtggaatccgacccggcctgaccactgtcctagctcggaacctagacaagaacaccgtgggctacctgcagtggcactgcagctccccgctcctgcaggtccagcgtcctcacaggaacaccagggcctgtgctccggagccttccttcagacccttcctccacgtgcccacttgggatgcagaatgcagcggagctaggaccccctccacggcctggacctcggctgcagtaaagttacgtgaggcctgtctctcggggcctggaagtggcagccatcagttgctcttgctgacccctcggagcaagcgccgcacaggtggtggctgagacagctggcgcggggggccccaagctgcgccggcctccagcccacccacagctgttgctgaagtcaggcctccctccccagcactggtatctgagtaacggctaagaacctccttcctctggttttgaaaagcagttcgggttgtccaattctgtaacattcatctccattttttaaaaaggtttctctgacggccccacggcccgagccgcggtgagcgtcgtgttgcatgagcctgggccccgggcttcccgtgcgcctctgccgcaggtgcttctgggcacccatcctctgcgtttcatttgcagtcgactgtacagaaggcactcaccacaataaacctttcctgaaagcaga

SEQ ID NO: 127710 - DNA, 1201 bp, Homo sapiens
  Payload ID: 4996
  Gene Symbol: DNAJC12
  Gene Name: DnaJ (Hsp40) homolog, subfamily C, member 12
  Uniprot ID: Q9UKB3
  ENST ID: ENST00000225171
  CDS Start-End: 154-750
catctggtgtattgactgtggccagtcttaaagctagtttttgctatgtggaacatgctgctctaattcagatttaaagagtttcttcctgttaattcgaagctcactgtgcctcttgtttccgagggaagaaggactgattaagtcatctaaatggatgcaatactgaattacaggtcagaagatactgaagattactacacattactgggatgtgatgaactatcttcggttgaacaaatcctggcagaatttaaagtcagagctctggaatgtcacccagacaagcatcctgaaaaccccaaagctgtggagacttttcagaaactgcagaaggcaaaggagattctgaccaatgaagagagtcgagcccgctatgaccactggcgaaggagccagatgtcgatgccattccagcagtgggaagctttgaatgactcagtgaagacgtcaatgcactgggttgtcagaggtaaaaaagacctgatgctggaagaatctgacaagactcataccaccaagatggaaaatgaggaatgtaatgagcaaagagaaagaaagaaagaggagctggcttcaaccgcagagaaaacggagcagaaagaacccaagcccctagagaagtcagtctccccgcaaaattcagattcttcaggttttgcagatgtgaatggttggcaccttcgtttccgctggtccaaggatgctccctcagaactcctgaggaagttcagaaactatgaaatatgaaatatctctgcttcaaaaaatgaggaagagcaagactgtcccctatgctgccaacatgcagtctttgtttatgtcttaaaaatgtcatgtttatgtcatgtctgtgaattgctgagtactaattgattcctccatccttgaatcagttctcataatgctttttaaataagaaaaattcagaagatgaatttcttccaatatttgaataaattaaagctcttagatacagagtagattgtattatatgctttttcctattaatactacttatagaaatccattaaaaagcaatctctgtacagtgtatttaaatatttcattgacatactgtgatctctattagtgatggatgtacaaaaaatgttttcttacccttgacttacaatgaaatgtgaaattacttgtctgaaccccgtggggagaaataaataattttcccaaagttcataaa

SEQ ID NO: 127711 - DNA, 1064 bp, Homo sapiens
  Payload ID: 4996
  Gene Symbol: DNAJC12
  Gene Name: DnaJ (Hsp40) homolog, subfamily C, member 12
  Uniprot ID: Q9UKB3
  ENST ID: ENST00000339758
  CDS Start-End: 86-409
cagatttaaagagtttcttcctgttaattcgaagctcactgtgcctcttgtttccgagggaagaaggactgattaagtcatctaaatggatgcaatactgaattacaggtcagaagatactgaagattactacacattactgggatgtgatgaactatcttcggttgaacaaatcctggcagaatttaaagtcagagctctggaatgtcacccagacaagcatcctgaaaaccccaaagctgtggagacttttcagaaactgcagaaggcaaaggagattctgaccaatgaagagagtcgagcccgctatgaccactggcgaaggagccagatgtcgatgccattccagcagtgggaagctttgaatgactcagtgaagacggtgggtttctcgctgggtgcgacgtgaatttgtgaagctcaggatgcccatggattagactcatgtagtagcttaaagagtcattaggcgataggagggagaaaaccaagaagttagcagagtctggatataattcagtgtccgtaaatcccatgaagagaagctcatcagaataaaggcaatgaatttgtgccagaagagcctgtgactacatttctttcaatctctttggctgtttgtttcagtatacacactccctgttattgcttactattttatgagctctaataaatgtacttctcaagttgctcatgaattgctgagttttaaccattgtaaattcacattctccatctttttagtttatgtcagcttgctctcttttcaaggcttagaattttcattaaaaaggcaggatctgattagtcagagaaagccatgaattattcctattaaacattctggtgaaagaattgttagactttaaaaacattgtgttatctttcttcatgtcattaaaaggcataaatatcaaaatattcactataattactgtcatatatttattttgttcaacattgacctttatatattatagacaaaatgtaattttaaagatttaggcatgatttattacctagattctctccattggaacacttttctatgacatgggacttat

SEQ ID NO: 127712 - DNA, 644 bp, Homo sapiens
  Payload ID: 4996
  Gene Symbol: DNAJC12
  Gene Name: DnaJ (Hsp40) homolog, subfamily C, member 12
  ENST ID: ENST00000480963
  CDS Start-End: 53-226
gctcactgtgcctcttgtttccgagggaagaaggactgattaagtcatctaaatggatgcaatactgaattacaggtcagaagatactgaagattactacacattactgggatgtgatgaactatcttcggttgaacaaatcctggcagaatttaaagtcagagctctggaatgtcacccagacaagcatcctgaaaaccccaaagctggtagacccaggagttaaatcagaatgtctcgcaagacttccagcatcatttgctcctataagcttacaaaatgagatctctcttcccagaactgtggagacttttcagaaactgcagaaggcaaaggagattctgaccaatgaagagagtcgagcccgctatgaccactggcgaaggagccagatgtcgatgccattccagcagtgggaagctttgaatgactcagtgaagacgtcaatgcactgggttgtcagaggtaaaaaagacctgatgctggaagaatctgacaagactcataccaccaagatggaaaatgaggaatgtaatgagcaaagagaaagaaagaaagaggagctggcttcaaccgcagagaaaacggagcagaaagaacccaagcccctagagaagtcagtctccccgcaaaattcagattct

SEQ ID NO: 127713 - DNA, 769 bp, Homo sapiens
  Payload ID: 4996
  Gene Symbol: DNAJC12
  Gene Name: DnaJ (Hsp40) homolog, subfamily C, member 12
  ENST ID: ENST00000483798
  CDS Start-End: 49-735
actgtgcctcttgtttccgagggaagaaggactgattaagtcatctaaatggatgcaatactgaattacaggtcagaagatactgaagattactacacattactgggatgtgatgaactatcttcggttgaacaaatcctggcagaatttaaagtcagagctctggaatgtcacccagacaagcatcctgaaaaccccaaagctgacccaggagttaaatcagaatgtctcgcaagacttccagcatcatttgctcctataagcttacaaaatgagatctctcttcccagaactgtggagacttttcagaaactgcagaaggcaaaggagattctgaccaatgaagagagtcgagcccgctatgaccactggcgaaggagccagatgtcgatgccattccagcagtgggaagctttgaatgactcagtgaagacgtcaatgcactgggttgtcagaggtaaaaaagacctgatgctggaagaatctgacaagactcataccaccaagatggaaaatgaggaatgtaatgagcaaagagaaagaaagaaagaggagctggcttcaaccgcagagaaaacggagcagaaagaacccaagcccctagagaagtcagtctccccgcaaaattcagattcttcaggttttgcagatgtgaatggttggcaccttcgtttccgctggtccaaggatgctccctcagaactcctgaggaagttcagaaactatgaaatatgaaatatctctgcttcaaaaaatgaggaagagcaag

SEQ ID NO: 127714 - DNA, 590 bp, Homo sapiens
  Payload ID: 4996
  Gene Symbol: DNAJC12
  Gene Name: DnaJ (Hsp40) homolog, subfamily C, member 12
  ENST ID: ENST00000480180
  CDS Start-End: 156-278
gacatctggtgtattgactgtggccagtcttaaagctagtttttgctatgtggaacatgctgctctaattcagatttaaagagtttcttcctgttaattcgaagctcactgtgcctcttgtttccgagggaagaaggactgattaagtcatctaaatggatgcaatactgaattacaggtcagaagatactgaagattactacacattactgggatgtgatgaactatcttcgatggagtttcactcttgttgtctaggctggagtgcaatggcgtgatctcggctcactgcaacctctgcctcctgggttcaagcattctccagcctcagcctcctgagtagctgagattacaggcgcccatgaccacacctgggttgaacaaatcctggcagaatttaaagtcagagctctggaatgtcacccagacaagcatcctgaaaaccccaaagctgtggagacttttcagaaactgcagaaggcaaaggagattctgaccaatgaagagagtcgagcccgctatgaccactggcgaaggagccagatgtcgatgccattccagcagtgggaagctttgaatgactcagtgaa

SEQ ID NO: 127715 - DNA, 7730 bp, Homo sapiens
  Payload ID: 4997
  Gene Symbol: DNAJC13
  Gene Name: DnaJ (Hsp40) homolog, subfamily C, member 13
  Uniprot ID: O75165
  ENST ID: ENST00000260818
  CDS Start-End: 249-6980
gcgaagatggcggcctccagagtgaaactctgagaggcagagggaggaggcggagggggcggggaggcagcgccgcggcggcaccaggaacccgcggcagcggagctgcagggccccggcgggggaaaggggaagtggtgagggtgaggaggccggagggcgcctcatcccactctggaagctgagccggcggcgggaggagctagggctggagcctctccagcctcccgcgaaggtttgagcacaaaatgaacataattagggaaaataaggatctggcatgtttctacacaacaaaacattcatggagggggaagtataagcgtgtcttttcagttggaactcatgcgattactacatataatcccaataccttagaagtaacaaatcagtggccttatggagacatttgcagcatcagccctgttggaaaaggacaaggaacggagttcaacctcacatttcgtaaaggcagtggaaaaaagtcagaaactttaaaattttctacagagcacagaacagaacttcttacagaagcattgagatttagaactgatttttcagagggaaaaatcacaggaaggagatacaactgctataagcatcactggagtgactcaagaaaacctgtaattttggaagtaactccaggaggctttgaccaaattaatcctgcaaccaacagagtactctgttcctatgactatagaaatattgaaggatttgtagatctctcagattatcaaggaggattttgtatactttatggaggatttagtagattgcatttatttgcgtcagagcaaagagaagagattattaaaagtgcaatagaccatgctggtaactacataggtatttcattgcggatcaggaaagagcctttagaattcgagcaatatttgaatcttcgctttggaaaatacagcactgatgaatccatcacatctttagcagagtttgtagtccaaaaaatatcacctagacattcggagcctgttaaaagagttctagcacttacagaaacatgtttagtagaacgtgatccggcaacctataatattgcaacattgaagcctttaggagaagtatttgcgttggtctgtgactcagaaaatccacaactttttaccattgaatttataaaagggcaagtacggaaatattcttcaacagagagagattccttattagcaagtttgctggatggagtaagagcctctggtaatagagatgtttgtgtaaaaatgacaccaacccataaaggtcagcgatgggggttactcagcatgcctgttgatgaggaagtagagagccttcacctcaggttcttagctacgcctccaaatggcaactttgcagatgctgtattcaggttcaatgctaatatttcatacagtggagtcctacatgcagtaacacaagatggtctcttctcagaaaacaaagaaaaactgatcaataatgccataacagcattactgtcccaagaaggggatgtcgttgcttcaaatgcggaacttgagagtcagttccaggctgtgaggaggcttgtggcatccaaagctggtttcctggctttcactcagcttccaaagtttcgcgagcgtctaggggtgaaggtagtaaaagcactcaaaagaagcaacaacggaataatccatgcagcagttgatatgctttgtgcccttatgtgtcccatgcatgatgactatgacttaagacaagaacagttgaacaaagcttctcttctctcgtcaaagaagtttctggaaaacttactggagaaatttaattcccatgtggatcatgggactggtgccctagttattagttcgctcttggacttccttacctttgccctctgtgctccatatagtgagacaactgaagggcagcagtttgatatgctcttggagatggtagcatccaatggaagaaccctttttaaactttttcagcatccttccatggcaataataaaaggagctgggttggttatgaaggcaataatagaggaaggtgataaagaaattgctacaaaaatgcaggagcttgccctaagtgaaggtgccttacctcgacacttgcatactgcgatgtttacaataagctcagatcaaaggatgcttacaaatagacagctaagtagacatttagtgggactctggacagctgataatgcaactgcaacaaacttgttgaaacgcattttgccgccaggcttgctggcatacttggaaagctcagatctcgtacctgagaaggatgctgatcggatgcatgttagagacaatgtgaaaatagcaatggatcagtatggaaaatttaataaagttccagagtggcaaagactagctggaaaagctgctaaagaagttgaaaaatttgccaaagaaaaagtggatcttgtattgatgcactggagggataggatgggcattgctcaaaaagagaatataaatcagaagccagtggttcttcgaaagagaagacaaagaataaaaatagaagcaaattgggatctcttctattataggtttggtcaagaccatgccaggtcaaaccttatttggaatttcaaaacacgagaagaactgaaagatactcttgaatctgaaatgagagcatttaatattgacagagaacttggaagtgcaaatgtgatctcctggaaccaccatgagtttgaggttaaatatgagtgcctggcagaggaaattaaaataggagactattacctgagattactattggaggaagatgagaatgaagaaagtggatcaattaagagatcgtatgaatttttcaatgagctttatcatcgcttcttgctcaccccaaaagtaaacatgaagtgtttatgtttacaagcccttgctattgtttatggcagatgtcacgaagaaataggaccttttacagataccagatatatcattggaatgttagagaggtgcacagataaacttgaacgagataggttgattctcttccttaacaagttgatccttaataagaaaaatgttaaggatctcatggattcaaatggaataagaatccttgtggacttgcttacccttgcacatctccatgtaagccgagctacagtaccactgcaaagcaatgtaattgaagctgctccagatatgaaaagagagagtgaaaaggaatggtattttggcaacgcagacaaagaaaggagtggcccgtatggatttcatgagatgcaagaattgtggaccaaaggaatgttaaatgcaaaaaccagatgctgggctcaaggcatggatggatggcgaccacttcagtccataccccagcttaagtggtgtctcttagccagtggacaggctgtcctgaatgaaactgaccttgctacccttatattgaacatgttgatcacaatgtgtggatattttccaagcagggatcaagacaatgccatcattcggcctctacccaaagtgaaaagactgctgtcagatagcacttgccttccccatattattcagctactgctgacctttgaccctatccttgttgagaaggttgctattttgttataccatatcatgcaagataacccacagttaccccgcctttatctgagtggagtatttttctttatcatgatgtacacaggttccaatgtgcttcctgttgctcgatttttgaaatacacacataccaaacaggctttcaagtcagaagagacaaaaggacaagatatttttcagagaagtatacttgggcacattctacctgaagcaatggtttgttacttagaaaattatgaacctgaaaagttttctgagatttttctaggagaatttgatactccagaagcaatctggagcagtgaaatgaggcgcctgatgatagagaagattgctgcccatctcgcggatttcacacctcgtcttcagagtaacacaagagcactttatcagtattgccccattcctataatcaactatccacaactcgaaaatgaactattttgtaatatttattacctcaaacaactgtgtgatacactccggtttccagattggccaattaaagacccggttaagcttctaaaagatacccttgatgcctggaagaaagaagtagaaaagaagccacctatgatgtcaatagatgatgcttatgaagtgcttaatctgcctcaaggacagggaccgcatgatgagagcaagattaggaaagcttacttcagacttgcacaaaagtaccaccctgataagaatccagaagggagggacatgtttgaaaaagtaaataaagcatatgaatttttatgtaccaaatcagcaaaaatagtggatgggccagatccagagaatataattttaattctaaaaacacagagcatcctcttcaaccgtcataaagaagatttacagccttataaatatgcaggataccccatgcttattcggactataacaatggaaacttcagatgacctccttttctcaaaagaatcaccattgttgcctgcggctacagagctagctttccatactgtcaactgttcagccctcaatgctgaagagctcagaagagagaatggactagaggtgttacaagaggcatttagtcgctgtgtggctgtcttgactcgtgctagtaaaccaagtgacatgtcagtacaggtgtgtggatacataagtaaatgctacagtgtggctgctcagtttgaggaatgccgagagaagatcacggaaatgcctagcatcatcaaggatctctgtcgggtactatattttggcaagagtattccccgcgtagctgctcttggggtagaatgtgtcagttcttttgctgtggatttctggctacagacacacctatttcaggctggaattttgtggtatctccttggttttctgtttaattatgactacacactagaagagagtggcattcagaaaagtgaagaaacaaaccagcaggaggtagcaaacagccttgccaaactgagtgtccatgctctgagtcgccttggagggtatttggctgaagaacaagcaactccagaaaatccaaccataaggaaaagcttagctggcatgctgacaccctatgttgctagaaaacttgctgtggctagtgtgactgagattttgaagatgcttaacagcaacacagaaagtccatatttgatatggaacaattctacaagagcagaattacttgaatttcttgaatcccaacaagaaaacatgattaaaaaaggtgattgtgacaaaacttatggatcagaatttgtctacagtgatcatgccaaagaacttattgtaggggagatttttgttagggtgtataatgaagttcctactttccaactggaggttccaaaagcatttgctgcaagtctcttggattatataggctcgcaggcccaatacttgcacacattcatggccatcacacacgcggcaaaagtggagtcagagcaacatggagatcgcttaccgagagtagaaatggctttggaggctctgagaaatgtcataaaatacaatccaggttctgagagtgaatgcattgggcactttaagttgatattttctcttctccgagttcatggagctggtcaagtgcagcagttggctttagaggttgtgaatatagtgacatctaaccaagactgtgtcaacaatattgctgaatcaatggttttgtccagtttattggctcttctacattcattgccatcaagtcgtcagcttgttctggaaactctttatgctttgacatcgagtacaaaaataatcaaagaagcaatggcaaagggtgctttgatctatttactggatatgttctgcaattcaacacatccacaggttcgagcccaaacagcagaactttttgccaaaatgacagcagataaactgataggtccaaaggttcgaattacgttaatgaaatttctaccaagcgttttcatggatgctatgagagacaatcctgaagctgctgtacatatttttgaaggaactcatgaaaatcctgagttaatttggaatgataattccagagataaagtgtccacaacagttagggaaatgatgctagagcactttaaaaatcagcaggacaaccctgaggcaaactggaagttgcctgaagattttgctgtggtgtttggagaagcagagggtgaacttgctgttggaggagtcttcttgaggatctttattgcacaaccagcctgggttctaagaaagcctagagaatttcttattgccctgttagaaaaattaactgagctcctagagaagaacaatcctcatggagaaactctggaaaccttgacaatggcaacagtgtgtctcttcagcgcacaacctcagctggcagatcaggtcccgccattgggccatcttcccaaagttatccaggcaatgaatcataggaacaatgccattcctaagagtgccattcgggttatccatgccttgtctgaaaatgagctgtgtgttcgagccatggcatctttagagaccattggcccactgatgaatggaatgaaaaagcgagcagatactgttggtctagcctgtgaagcaattaatcgaatgtttcagaaggagcagagtgaattagtagcacaagccctgaaagcagatttggttccatacctcttaaaattactcgaaggcattggccttgaaaacctggacagcccagcagccactaaggctcagattgttaaagctctcaaggcaatgactcgaagtttgcagtatggagaacaggtgaatgaaatcctgtgccgttcttcagtctggagtgccttcaaagatcagaaacatgatttgttcatttctgagtcacaaacagcaggatacctcacaggacctggagttgctggctaccttaccgcaggtacatctacatcagtcatgtctaacctgccacctcctgtagaccatgaggcaggcgaccttggctatcagacttgaaatattcacgagagacaataaacgctgaaaggccagtgccaagtccacattcctccagctgatacgttgaagcaaactcttactgcctttctcctggtttcatgacagtgttattcctttttctataaatatatttttaggaaaaaaagtcagtgatcctaattgtatcacattataagaaagcactctgtggatcaacataagtgggtacacaagaattttttttttcttggtgtatgtaagcacatttgttcctttatatctgtttacaaaactgtgaatcaaaaagacaaaactttcttcctagtttttgtaattttttttttgaactagcatgactgtagggttgagctacagtcaacaaaaattgggctaagtcacttttccccaggaaagaatatttccctctcctgcatcaagtctgcgtggccatcctccccccaccatccaagactattaggttttgtccctgcacccttcactggcatcctcaatcattaaccttctgaaagctcacagtacacattagtatgtataactggctttaccaaattgaatgaaaaggagcttgtgcaaaaaaatttaaaaatggatgtcaagatgttatgtaaaagatgagtgtaattgtgaaatgttctatacactatcaaatatataaagctttctatattgaatgtacattatacagatcattcatatgtgtacataaaattttaaaaataaagggaattgactgctttgttaatgaga

SEQ ID NO: 127716 - DNA, 801 bp, Homo sapiens
  Payload ID: 4997
  Gene Symbol: DNAJC13
  Gene Name: DnaJ (Hsp40) homolog, subfamily C, member 13
  ENST ID: ENST00000506813
  CDS Start-End: 1-522
tgcacagataaacttgaacgagataggttgattctcttccttaacaagttgatccttaataagaaaaatgttaaggatctcatggattcaaatggaataagaatccttgtggacttgcttacccttgcacatctccatgtaagccgagctacagtaccactgcaaagcaatgtaattgaagctgctccagatatgaaaagagagagtgaaaaggaatggtattttggcaacgcagacaaagaaaggagtggcccgtatggatttcatgagatgcaagaattgtggaccaaaggaatgttaaatgcaaaaaccagatgctgggctcaaggcatggatggatggcgaccacttcagtccataccccagcttaagtggtgtctcttagccagtggacaggctgtcctgaatgaaactgaccttgctacccttatattgaacatgttgatcacaatgtgtggatattttccaagcagggtactgtttttcaaggaaatcttatggaaggaaatgaagtcatattaagcagccaaatagatttaaaccaaaatacctaatcatgttcccagctgtatgagagcttagtcttcattaacaaaaaagtaagggatcaagacaatgccatcattcggcctctacccaaagtgaaaagactgctgtcagatagcacttgccttccccatattattcagctactgctgacctttgaccctatccttgttgagaaggttgctattttgttataccatatcatgcaagataacccacagttaccccgcctttatctgagtggagtatttttct

SEQ ID NO: 127717 - DNA, 673 bp, Homo sapiens
  Payload ID: 4997
  Gene Symbol: DNAJC13
  Gene Name: DnaJ (Hsp40) homolog, subfamily C, member 13
  ENST ID: ENST00000509279
  CDS Start-End: 1-290
atttggttccatacctcttaaaattactcgaaggcattggccttgaaaacctggacagcccagcagccactaaggctcagattgttaaagctctcaaggcaatgactcgaagtttgcagtatggagaacaggtgaatgaaatcctgtgccgttcttcagtctggagtgccttcaaagatcagaaacatgatttgttcatttctgagtcacaaacagcaggatacctcacaggtgtctctccttcccttctaactggcagcagcccccttcacctcaggagcgggctttagatccgctctgccaggcagcttgctaacttctgtgtagctctctgaagcaggacctggagttgctggctaccttaccgcaggtacatctacatcagtcatgtctaacctgccacctcctgtagaccatgaggcaggcgaccttggctatcagacttgaaatattcacgagagacaataaacgctgaaaggccagtgccaagtccacattcctccagctgatacgttgaagcaaactcttactgcctttctcctggtttcatgacagtgttattcctttttctataaatatatttttaggaaaaaaagtcagtgatcctaattgtatcacattataagaaagcactctgtggatcaacataagtgggtacacaagaatttttttt

SEQ ID NO: 127718 - DNA, 3330 bp, Homo sapiens
  Payload ID: 4998
  Gene Symbol: DNAJC14
  Gene Name: DnaJ (Hsp40) homolog, subfamily C, member 14
  Uniprot ID: Q6Y2X3
  ENST ID: ENST00000317269
  CDS Start-End: 205-2313
tggaagtaggcccaggtcgccggcggccgcggggacggaaggcggaagcagagcgtgagcgggaggcggagccgggagagcggctctcgtagctcaccctggccccaggccgggcggctcgagggggaggagttaccgccgttcttcggcatcagaacacaccatgatggctgtgacctaagaccctcaggaagccccggggtcatggcccagaagcaccccggagaaagagggttgtatggagcccaccacagtggtggtgcctccctcaggactttaggaccctccgtggaccctgaaataccttcattctcaggactcagggactcagcagggactgctcctaatggtacccgctgcctcacagagcactctggtcctaagcacacacagcacccaaacccagcccattggttggacccaagccatggccccccagggggtccaggaccacctagagatgcagaggaccctgatcagagtgagacgtcttcagaagaagaatcaggagtggaccaggaactctcaaaagaaaacgagactgggaaccagaaggatgggaactcttttctttccattccatctgcttgcaactgccagggaacacctggaattccagaagggccttactctgagggaggaaatggttcttctagcaacttttgccaccactgtacctctccagctttgggggaagatgagttggaagaggaatatgatgatgaagaatctctcaagttccccagtgatttttcacgtgtgtccagcggaaagaaacccccatcccggagacagcggcaccgctttccaacgaaggaggatactcgggagggtggacgtagggatcccaggtcccctggtcgacatcggctgggtcggaaacgaagtcaggcagataagcgcaaaggcctgggattgtggggagccgaggaactatgtcaacttggacaggcaggcttttggtggctgattgaactgctggtattggtgggagagtacgtagaaacttgtggccatctcatctatgcctgcaggcaactgaaaagcagtgatttggacctttttcgagtttggatgggagtgtggacagggcggttagggggctgggcccaggtcatgtttcagtttctaagccaggggttttactgtggagtaggactgtttactcgttttcttaagctgctgggtgctttgctgctcctggctctggccctctttttgggctttctacagttgggatggcggtttctggtgggactaggtgaccggttaggctggagggataaggctacctggctcttctcttggctggattctccagccttgcagcgttgcttgactctgctgagagatagcaggccatggcagcggctggtaagaatagttcagtggggctggctggagttgccttgggtcaagcagaatattaataggcaggggaatgcacctgtagctagtgggcgctactgccagcctgaagaggaagtggctcgactcttgaccatggctggggttcctgaggatgagctaaaccctttccatgtactgggggttgaggccacagcatcagatgttgaactgaagaaggcctatagacagctggcagtgatggttcatcctgacaaaaatcatcatccccgggctgaggaggccttcaaggttttgcgagcagcttgggacattgtcagcaatgctgaaaagcgaaaggagtatgagatgaaacgaatggcagagaatgagctgagccggtcagtaaatgagtttctgtccaagctgcaagatgacctcaaggaggcaatgaatactatgatgtgtagccgatgccaaggaaagcataggaggtttgaaatggaccgggaacctaagagtgccagatactgtgctgagtgtaataggctgcatcctgctgaggaaggagacttttgggcagagtcaagcatgttgggcctcaagatcacctactttgcactgatggatggaaaggtgtatgacatcacagagtgggctggatgccagcgtgtaggtatctccccagatacccacagagtcccctatcacatctcatttggttctcggattccaggcaccagagggcggcagagagccaccccagatgcccctcctgctgatcttcaggatttcttgagtcggatctttcaagtacccccagggcagatgcccaatgggaacttctttgcagctcctcagcctgcccctggagccgctgcagcctctaagcccaacagcacagtacccaagggagaagccaaacctaagcggcggaagaaagtgaggaggcccttccaacgttgatgccccttctctttcctcaaatcaatgtcagggagtcaaaagggctgtagcacaggatggagtttgatttatccctcctcccccaacacctaggaactgaatctttttctttttattttttgagatggagtcttgctctgttgcccagctggagtgcagtggtgtgatctcagcttactgcaacctctgtctcccgggttcaagcaattctcccatctcagcctcctgagtagctgggattacaggcacacaccaccacacctggcccagctaattcttttttgtatttttagtagagacggggtttcaccatgttgcccaggctggtctcgaactcctgagctcaggtgatccacccgtcttggcctcccaaagtgctggattacaggcataagccactgtgcccggcctgaatcttgtcttttgacaataccaaagaaatagggggtagctagagtaaagaacctagggcctggacctgggctggacagtgtatccctttaggtgtgggaactgggtatttccctggggtctgtatgcctttgtcttgtcatttgcttttagggcagatgacactttttcccacccttttaaagctacaagtctatcttctttcttgacccatttcaggagggagccctctcctttatcctgatataatatttaaaagagaacaagaaagcatgtagccctaatgataggagattatcgcatagagttcagagactggaaactgaattttccctcgactttcactttgtgggtaaatcacccaattttaggctcttttctgcaaggatggccaaaattaatcatttttaaaaagtagattcatgcccactgcccttgggtgagggggaagaatacgggggttcccagaagcccccatgtgatccaagggtttgtattttttttttaagtttgttcatatttgtatgtacatgactatttaaagccaggggattatctttctataaatgtataactggcaacctgtatcttccctctttgttgccc

SEQ ID NO: 127719 - DNA, 2774 bp, Homo sapiens
  Payload ID: 4998
  Gene Symbol: DNAJC14
  Gene Name: DnaJ (Hsp40) homolog, subfamily C, member 14
  Uniprot ID: Q6Y2X3
  ENST ID: ENST00000317287
  CDS Start-End: 440-2548
agagaattggagtattgtctcctggagaaccgggtggtcgggatcgtggaccagggaaggggcttttgctggtcggggagcgccaactgggggttcatgggtggaaaaactttcggatcaagacggggtataaggctagaggcgtgtgcagaggaggggaccgacggaacggggacccaactgggtctacgtgggggcgggggcgcttgtggacgtccaccaaatagcttggtatgcagatgagatgtcaagcagcaggtagatgagttcagtgttctttggctcacgggcaaagttctgagccgagccaagttacgctcccagttcctaggcaccgctcggtgatcgggcctggggagctgcgacccgaggggcggatccaggcatcagaacacaccatgatggctgtgacctaagaccctcaggaagccccggggtcatggcccagaagcaccccggagaaagagggttgtatggagcccaccacagtggtggtgcctccctcaggactttaggaccctccgtggaccctgaaataccttcattctcaggactcagggactcagcagggactgctcctaatggtacccgctgcctcacagagcactctggtcctaagcacacacagcacccaaacccagcccattggttggacccaagccatggccccccagggggtccaggaccacctagagatgcagaggaccctgatcagagtgagacgtcttcagaagaagaatcaggagtggaccaggaactctcaaaagaaaacgagactgggaaccagaaggatgggaactcttttctttccattccatctgcttgcaactgccagggaacacctggaattccagaagggccttactctgagggaggaaatggttcttctagcaacttttgccaccactgtacctctccagctttgggggaagatgagttggaagaggaatatgatgatgaagaatctctcaagttccccagtgatttttcacgtgtgtccagcggaaagaaacccccatcccggagacagcggcaccgctttccaacgaaggaggatactcgggagggtggacgtagggatcccaggtcccctggtcgacatcggctgggtcggaaacgaagtcaggcagataagcgcaaaggcctgggattgtggggagccgaggaactatgtcaacttggacaggcaggcttttggtggctgattgaactgctggtattggtgggagagtacgtagaaacttgtggccatctcatctatgcctgcaggcaactgaaaagcagtgatttggacctttttcgagtttggatgggagtgtggacagggcggttagggggctgggcccaggtcatgtttcagtttctaagccaggggttttactgtggagtaggactgtttactcgttttcttaagctgctgggtgctttgctgctcctggctctggccctctttttgggctttctacagttgggatggcggtttctggtgggactaggtgaccggttaggctggagggataaggctacctggctcttctcttggctggattctccagccttgcagcgttgcttgactctgctgagagatagcaggccatggcagcggctggtaagaatagttcagtggggctggctggagttgccttgggtcaagcagaatattaataggcaggggaatgcacctgtagctagtgggcgctactgccagcctgaagaggaagtggctcgactcttgaccatggctggggttcctgaggatgagctaaaccctttccatgtactgggggttgaggccacagcatcagatgttgaactgaagaaggcctatagacagctggcagtgatggttcatcctgacaaaaatcatcatccccgggctgaggaggccttcaaggttttgcgagcagcttgggacattgtcagcaatgctgaaaagcgaaaggagtatgagatgaaacgaatggcagagaatgagctgagccggtcagtaaatgagtttctgtccaagctgcaagatgacctcaaggaggcaatgaatactatgatgtgtagccgatgccaaggaaagcataggaggtttgaaatggaccgggaacctaagagtgccagatactgtgctgagtgtaataggctgcatcctgctgaggaaggagacttttgggcagagtcaagcatgttgggcctcaagatcacctactttgcactgatggatggaaaggtgtatgacatcacagagtgggctggatgccagcgtgtaggtatctccccagatacccacagagtcccctatcacatctcatttggttctcggattccaggcaccagagggcggcagagagccaccccagatgcccctcctgctgatcttcaggatttcttgagtcggatctttcaagtacccccagggcagatgcccaatgggaacttctttgcagctcctcagcctgcccctggagccgctgcagcctctaagcccaacagcacagtacccaagggagaagccaaacctaagcggcggaagaaagtgaggaggcccttccaacgttgatgccccttctctttcctcaaatcaatgtcagggagtcaaaagggctgtagcacaggatggagtttgatttatccctcctcccccaacacctaggaactgaatctttttctttttattttttgagatggagtcttgctctgttgcccagctggagtgcagtggtgtgatctcagcttactgcaacctctgtctcccgggttcaagcaattctcccatctcagcctcc

SEQ ID NO: 127720 - DNA, 3416 bp, Homo sapiens
  Payload ID: 4998
  Gene Symbol: DNAJC14
  Gene Name: DnaJ (Hsp40) homolog, subfamily C, member 14
  Uniprot ID: Q6Y2X3
  ENST ID: ENST00000357606
  CDS Start-End: 291-2399
ccctccaattctttcccgtgtgtgtggggggacccaggttgcctactgctctagtccaggaccagagacccccaactatatagcagtggaagtaggcccaggtcgccggcggccgcggggacggaaggcggaagcagagcgtgagcgggaggcggagccgggagagcggctctcgtagctcaccctggccccaggccgggcggctcgagggggaggagttaccgccgttcttcggcatcagaacacaccatgatggctgtgacctaagaccctcaggaagccccggggtcatggcccagaagcaccccggagaaagagggttgtatggagcccaccacagtggtggtgcctccctcaggactttaggaccctccgtggaccctgaaataccttcattctcaggactcagggactcagcagggactgctcctaatggtacccgctgcctcacagagcactctggtcctaagcacacacagcacccaaacccagcccattggttggacccaagccatggccccccagggggtccaggaccacctagagatgcagaggaccctgatcagagtgagacgtcttcagaagaagaatcaggagtggaccaggaactctcaaaagaaaacgagactgggaaccagaaggatgggaactcttttctttccattccatctgcttgcaactgccagggaacacctggaattccagaagggccttactctgagggaggaaatggttcttctagcaacttttgccaccactgtacctctccagctttgggggaagatgagttggaagaggaatatgatgatgaagaatctctcaagttccccagtgatttttcacgtgtgtccagcggaaagaaacccccatcccggagacagcggcaccgctttccaacgaaggaggatactcgggagggtggacgtagggatcccaggtcccctggtcgacatcggctgggtcggaaacgaagtcaggcagataagcgcaaaggcctgggattgtggggagccgaggaactatgtcaacttggacaggcaggcttttggtggctgattgaactgctggtattggtgggagagtacgtagaaacttgtggccatctcatctatgcctgcaggcaactgaaaagcagtgatttggacctttttcgagtttggatgggagtgtggacagggcggttagggggctgggcccaggtcatgtttcagtttctaagccaggggttttactgtggagtaggactgtttactcgttttcttaagctgctgggtgctttgctgctcctggctctggccctctttttgggctttctacagttgggatggcggtttctggtgggactaggtgaccggttaggctggagggataaggctacctggctcttctcttggctggattctccagccttgcagcgttgcttgactctgctgagagatagcaggccatggcagcggctggtaagaatagttcagtggggctggctggagttgccttgggtcaagcagaatattaataggcaggggaatgcacctgtagctagtgggcgctactgccagcctgaagaggaagtggctcgactcttgaccatggctggggttcctgaggatgagctaaaccctttccatgtactgggggttgaggccacagcatcagatgttgaactgaagaaggcctatagacagctggcagtgatggttcatcctgacaaaaatcatcatccccgggctgaggaggccttcaaggttttgcgagcagcttgggacattgtcagcaatgctgaaaagcgaaaggagtatgagatgaaacgaatggcagagaatgagctgagccggtcagtaaatgagtttctgtccaagctgcaagatgacctcaaggaggcaatgaatactatgatgtgtagccgatgccaaggaaagcataggaggtttgaaatggaccgggaacctaagagtgccagatactgtgctgagtgtaataggctgcatcctgctgaggaaggagacttttgggcagagtcaagcatgttgggcctcaagatcacctactttgcactgatggatggaaaggtgtatgacatcacagagtgggctggatgccagcgtgtaggtatctccccagatacccacagagtcccctatcacatctcatttggttctcggattccaggcaccagagggcggcagagagccaccccagatgcccctcctgctgatcttcaggatttcttgagtcggatctttcaagtacccccagggcagatgcccaatgggaacttctttgcagctcctcagcctgcccctggagccgctgcagcctctaagcccaacagcacagtacccaagggagaagccaaacctaagcggcggaagaaagtgaggaggcccttccaacgttgatgccccttctctttcctcaaatcaatgtcagggagtcaaaagggctgtagcacaggatggagtttgatttatccctcctcccccaacacctaggaactgaatctttttctttttattttttgagatggagtcttgctctgttgcccagctggagtgcagtggtgtgatctcagcttactgcaacctctgtctcccgggttcaagcaattctcccatctcagcctcctgagtagctgggattacaggcacacaccaccacacctggcccagctaattcttttttgtatttttagtagagacggggtttcaccatgttgcccaggctggtctcgaactcctgagctcaggtgatccacccgtcttggcctcccaaagtgctggattacaggcataagccactgtgcccggcctgaatcttgtcttttgacaataccaaagaaatagggggtagctagagtaaagaacctagggcctggacctgggctggacagtgtatccctttaggtgtgggaactgggtatttccctggggtctgtatgcctttgtcttgtcatttgcttttagggcagatgacactttttcccacccttttaaagctacaagtctatcttctttcttgacccatttcaggagggagccctctcctttatcctgatataatatttaaaagagaacaagaaagcatgtagccctaatgataggagattatcgcatagagttcagagactggaaactgaattttccctcgactttcactttgtgggtaaatcacccaattttaggctcttttctgcaaggatggccaaaattaatcatttttaaaaagtagattcatgcccactgcccttgggtgagggggaagaatacgggggttcccagaagcccccatgtgatccaagggtttgtattttttttttaagtttgttcatatttgtatgtacatgactatttaaagccaggggattatctttctataaatgtataactggcaacctgtatcttccctctttgttgccc

SEQ ID NO: 127721 - DNA, 756 bp, Homo sapiens
  Payload ID: 4998
  Gene Symbol: DNAJC14
  Gene Name: DnaJ (Hsp40) homolog, subfamily C, member 14
  ENST ID: ENST00000546957
  CDS Start-End: 520-756
gacggaaggcggaagcagagcgtgagcgggaggcggagccgggagagcggctctcgtagctcaccctggccccaggccgggcggctcgagggggaggagttaccgccgttcttcggtacgtccgtcttttttttttttttcgtttttttttgtttttttgagatggagtctcgctctgtcacccagactggagtacagtggcacgatctcggttcactgcaacctccacctcccgggttcaagcgattcttctgcctcagcctcccgagtagctgggactacaggtgcgcgccaccacgcctggcgaatttctgtatttttagtagagacggagtttcaccatgttggccaggctggtctcgaactcctgacctcgtgatccgccggcctcggcctcccaaagtgctgggattacaggcgtgagccacggtgcccggccaccttcgtcccttctacacagccggcatcagaacacaccatgatggctgtgacctaagaccctcaggaagccccggggtcatggcccagaagcaccccggagaaagagggttgtatggagcccaccacagtggtggtgcctccctcaggactttaggaccctccgtggaccctgaaataccttcattctcaggactcagggactcagcagggactgctcctaatggtacccgctgcctcacagagcactctggtcctaagcacacacagcacccaaacccagcccattggttggacccaagccatggccccccaggg

SEQ ID NO: 127722 - DNA, 638 bp, Homo sapiens
  Payload ID: 4998
  Gene Symbol: DNAJC14
  Gene Name: DnaJ (Hsp40) homolog, subfamily C, member 14
  ENST ID: ENST00000547445
  CDS Start-End: 186-638
gtgcgcgcggtggggggaggaggggtgacatcacaaggcaggcccctccaattctttcccgtgtgtgtggggggacccaggttgcctactgctctagtccaggaccagagacccccaactatatagcaggcatcagaacacaccatgatggctgtgacctaagaccctcaggaagccccggggtcatggcccagaagcaccccggagaaagagggttgtatggagcccaccacagtggtggtgcctccctcaggactttaggaccctccgtggaccctgaaataccttcattctcaggactcagggactcagcagggactgctcctaatggtacccgctgcctcacagagcactctggtcctaagcacacacagcacccaaacccagcccattggttggacccaagccatggccccccagggggtccaggaccacctagagatgcagaggaccctgatcagagtgagacgtcttcagaagaagaatcaggagtggaccaggaactctcaaaagaaaacgagactgggaaccagaaggatgggaactcttttctttccattccatctgcttgcaactgccagggaacacctggaattccagaagggccttactctgagggaggaaatggttcttctagc

SEQ ID NO: 127723 - DNA, 7853 bp, Homo sapiens
  Payload ID: 4999
  Gene Symbol: DNAJC15
  Gene Name: DnaJ (Hsp40) homolog, subfamily C, member 15
  Uniprot ID: Q9Y5T4
  ENST ID: ENST00000379221
  CDS Start-End: 425-877
ggtcaggaaagctcaggcaagcccaccctcaggcactacagctagactccgagcttactgggcagtcatctgattcgaccaacatcagttcgcagggcttaagcccagtcccttacggcggcctggggagggaccaggcccaagtatataaagctccctgagggtccgcgttggctttgcgcctgtgagtgtgattcaagaacgtcccagtgcccttggctcctttcggagtgtgaccccgtgcttgcacgggacacgttacccagctcgggtgagaagggtatcttccgggaacctcgcctttaatagcacaacgagcgcagagtccactggatctgcgagaagaaaccgcgctaactagtttgtccctacggccgcctcgtagtcactgccgcggcgccttgagtctccgggccgccttgccatggctgcccgtggtgtcatcgctccagttggcgagagtttgcgctacgctgagtacttgcagccctcggccaaacggccagacgccgacgtcgaccagcagagactggtaagaagtttgatagctgtaggactgggtgttgcagctcttgcatttgcaggtcgctacgcatttcggatctggaaacctctagaacaagttatcacagaaactgcaaagaagatttcaactcctagcttttcatcctactataaaggaggatttgaacagaaaatgagtaggcgagaagctggtcttattttaggtgtaagcccatctgctggcaaggctaagattagaacagctcataggagagtcatgattttgaatcacccagataaaggtggatctccttacgtagcagccaaaataaatgaagcaaaagacttgctagaaacaaccaccaaacattgatgcttaaggaccacactgaaggaaaaaaaaagaggggacttcgaaaaaaaaaaaagccctgcaaaatattctaaaacatggtcttcttaattttctatatggattgaccacagtcttatcttccaccattaagctgtataacaataaaatgttaatagtcttgctttttattatcttttaaagatctccttaaattctataactgatcttttttcttattttgtttgtgacattcatacatttttaagatttttgttatgttctgaattcccccctacacacacacacacacacacacacacacacacgtgcaaaaaatatgatcaagaatgcaattgggatttgtgagcaatgagtagacctcttattgtttatatttgtaccctcattgtcaatttttttttagggaatttgggactctgcctatataaggtgttttaaatgtcttgagaacaagcactggctgatacctcttggagatatgatctgaaatgtaatggaatttattaaatggtgtttagtaaagtaggggttaaggacttgttaaagaaccccactatctctgagaccctatagccaaagcatgaggacttggagagctactaaaatgattcaggtttacaaaatgagccctgtgaggaaaggttgagagaagtctgaggagtttgtatttaattatagtcttccagtactgtatattcattcattactcattctacaaatatttattgaccccttttgatgtgcaaggcactatcgtgcgtcccctgagagttgcaagtatgaagcagtcatggatcatgaaccaaaggaacttatatgtagaggaaggataaatcacaaatagtgaatactgttagatacagatgatatattttaaaagttcaaaggaagaaaagaatgtgttaaacactgcatgagaggaggaataagtggcatagagctaggctttagaaaagaaaaatattccgataccatatgattggtgaggtaagtgttattctgagatgagaattagcagaaatagatatatcaatcggagtgattagagtgcagggtttctggaaagcaaggtttggacagagtggtcatcaaaggccagccctgtgacttacactgcattaaattaatttcttagaacatagtccctgatcattatcactttactattccaaaggtgagagaacagattcagatagagtgccagcattgtttcccagtattcctttacaaatcttgggttcattccaggtaaactgaactactgcattgtttctatcttaaaatactttttagatatcctagatgcatctttcaacttctaacattctgtagtttaggagttctcaaccttggcattattgacatgttaggccaaataattttttttgtgggaggtctcttgtgcgttttagatgattagcaataatccctgacctgttatctactaaagactagtcgtttctcatcagttgtgacaacaaaaatggttccagatattgccaaatgccctttagaggacagtaatcgcccccagttgagaaccatttcagtaaaactttaattactattttttcttttggtttataaaataatgatcctgaattaaattgatggaaccttgaagtcgataaaatatatttcttgctttaaagtccccatacgtgtcctactaattttctcatgctttagtgttttcacttttctcctgttatccttgtacctaagaatgccatcccaatccccagatgtccacctgcccaaagtctaggcatagctgaaggccaagctaaaatgtatccctctttttctggtacatgcagcaaaagtaatatgaattatcagctttctgagagcaggcattgtatctgtcttgtttggtgttacattggcacccaataaatatttgttgagtgaatgaataaattcccatagcactttattcttcacatggtacataactataggggctatagcttggtaccttgtgaagcaactcttggtgtaacataccttatttctcatactaaaatgcaagaacctttagagcaaggatcttgccattcatctttgtaacctctttactctggagcacttgcatttagcaggcatcataaagttttacgtaccaagaaaatgttgctgttttctgaatactatgcatcaaaaaatgttaccactaatttttaaagctctgctaaggaatattggggcaccctcagatgcaccttttaattgatgtcatattttcctaatccatactttattcatgagaatttgagtcaccccagcattagcttggaatttccttatttcccatttgctttgcaggtgccttggagtcagatctggttttgaatactatcttcctgttatgtgatcttgggcagttacttaattttctagtcaataacccgtatctataaaatagagaaaataatcctacacaccggggcctgttgtggggcggggagaggggggagggatcgcatttggagatatactaatgtaaatgacaagttaattggtgcagcacaccaacatggctcatgtctacatatgtaacaaacctgcacgttgtgcacatgtgccctagaacttaaagtataataaaaagaaattttaaaaaatcctgtcaaataaggttatagtagagaataaggatgtgtaaagcatttagtcacgtaaatgcttaaaaaaatgtaatttttacttctttcactgcctcatttaattagttttatctttaataataccttggattcagggtaaagtttcagttatgtcccagtaatcatttattttaccctcgaatctgcaatttggatagaacatggtggggacagctcgtctctattccttgcagcattaacaggctggaggcaccacttctctggccagcaagttgggcctggttgttggctgagagcctcagttcctttctgcacaggttcctctttacataggcttctcaacagggctactagagcatcgtcaccatagcagctgtcttataacagagagtggtcggtctgagagacaaaaaatggaagctgccaaattgttctgggtctggaaactgtcagggcatcacttgtgccatattcagttggcctaagaattacagagcctgcctcgattcaaagggagaggatagagaggactgaaggaatcagtgctcatctttaatatgcagcaggacaggtttgggattttttttcccccttgagtctgtgaaggcattacttaagaacaaagtcaggcatgtataattgaactacagttacttgaaatataagcccagaaagtttcagataataaatacaactatttttctgctgttacccttgtacctaaagatgccatcctaatccccagatctccacaactatacctacatagtagaaggttaaaatgtatccctctttttctggtgcatccagcaaaagtaatatcatgaattatgagctctctgagagcaaggatcatatcagtcttgtttattgttgcagtgaacaagtacagttgcagatattcaggagtaattatctaaatggcagtaggcttataaaactgaattttcaccagccacaccctccccccaactccttatctgtaaaaagcttatttgagtggttacctgtcttcagtaaagattgcgcttgcatatttgctgtcattgcatattctgcttaattaagctctgttgatattgcagtttctgtgcatacttacatcttagatgcaatctgagggcctaggaaggccttttaaaaataaaacaattccgattgcagagaaagtgtaagtcaaggacagttaattcaaggggaacatagaaagctatttagattttagttgatggtgccagtcttcagcgtaaagtcaaaagtggagggaagtttagtaaggaaaaaatgttgggcttggaatacattgtttagtcttcaaagcactttactttttatgaaatatattttagacattcagcaaatattgaatacttactatatcaggcagtaaagatataaattcattcttaaaatgtgcaacatgttcaaactgaaaaaaatacattcttaaacaggaaactttttccttcatactttttaattaacaagacatataagagttgcattaatgggcgtgcttatgattgatcacccagcagcatcattagaaataatatattttattcatgtgcagaaatcttttggttgtcctggggaaccttgaacacagaaaagagcttttattgataaggtaattgaacacacttgacaattagcttaatatggtttaataccatttgtgggagaagatgaatcagccaggctctttacgtcaagaatatgaagtttctcttgagtcaaccaacttaagatgagctacggagactgcagtgaaaagttaaatatccaagtacaccagccaatttcacacagtggaaccatgctgtcctcgggcaccctgcacctcgcccaacagtcatcaactagatggaggctcctggctgcaaggaggatttgatgggaatgagtaaatgtgtcagcatagtccgtcccttctaatggaaaagcaacccaaagagcaaatcctattaatggctggatcagtatcatctacttgtcaaaaacattccatgaattatgagtcaaaattttatttatggtggcattacacacattaagagatgaggacttctgttagcataatttattagctggaaaagttgagaaggttctctggactcatttttataggtggaacctaagtgatctggataattgcccaccagcaaaattgctgggcatggtggacaaagaaaatgttccttctaatgattttttatgagctgagtagctattgttcccagctgagtgctcttttcctctttttattgttgctgagcaaaagaatttataaaaagctctttcttttgtattaaaaaccctgctcaattgaaatgcaagttcattaagtaatcttcatttctcttcctgccataataaccctttccctctctgttcgattcaacagtatctagcagcactgctccaaattttaagtctgaacagactatattacatagatgtagagaaatactcaatcttcagcattaagagggagcttaatttcacacgggtggaatatgatcactcaggctagatgttggccataaatttcaaattagtatctcaacttagcaggggggatcaacagtggcaaacttcaattatgacaggataaaaatcacatagagatattggttcaatatggacatctaaactataatgctaaaagccaataattagaataagttcattttaagaaaagcattaataatattagctaacgtttagtacctgtgccaaacattctacctatgttaccttgattttcatagccagcctaagaggtactattatgtatccccattttacaggttaagaaacaggctcagaggagtttaggatcttttccaagattacatagccagtaagtggtggcactaggaaccaaattcagactctgaatcgcatgctgtttatattatattgcactcattctaaatatgtgggaatcagaatgaaggggcttgtatgacttttggctcattttttgatgcatgtgacctgggattataaatgtgaaattaggtttacgaaaggatccagtgtcattgtgcatcatgggcaaggagtacctaatctctttaattcttccctggaagcttacgatgtccatccaagtgcacatagcaaaagttctgttgtaaagtttagcagagtgactttctttgactcagagtgatgacggaggaagctttgataagattttatctgaaatgttcatggacaagagctttcaaggagaacatccagagcaaggttctgaagacagctcatgaaggtgaagcagcagacctggcacaagaaatgaagagagagctcagtgtattaaagatgaaaacaagaaaaccgaatatattgaaaggagcagagaggcaatgaaaacaagacaactgaaatgaggtaacttgcagcaattgaaagggaatttcagtacttttatagaattcttaaaaattgtttcctgctgtttattttcaattttgaacagggttatttgtccatgccatactttttttgccaaattccaaaattgtgtatagttctatagttgtctggtggagtcaatggaactttagttaccagtctaagaatgtgtctttgagattgtccagttaattctctatttccagtagctgtaataaatggtgaaaaggtttctgactcctggagaaagtttctaactccttatgactaatattcataacagacttgtgagttccttgaacatggatacacctatatgcaagagtgtattccaaagctaactcagtgatctttccatttatctattcttggattagtggtgcctttgctctttccttctgtaaatgtgaatagttaagagttgactgcagaagtgtttacactttggcttccatgcctctggaatgtttgtgctttggtggtgagatgtgagactatatttgtatagtctgcatctctcaggctgccccagaatgttgtacagtgcagtgctgaagaaagcagcaggtacacacagaaatgcagcctttcctggttaaccctgcttggatctgagttacactttgtttcctgacttcttgggacttaggtaatcagtttgccttctactctatctcattttgtactcgcttacatactacattcttgtttgggctttcgtttcttcttgtaagcagagattttttaaaatccaatatgtgaaaatacggatgcactacaattaaataaataaaatgctgttgtgtttgttttgctttaaaattgtaaaggataaacaataagatagttttatctatgtggttttcccgatgcagttaaaataaaacctaatctgctaaaattgaatttacactcaa

SEQ ID NO: 127724 - DNA, 2357 bp, Homo sapiens
  Payload ID: 5000
  Gene Symbol: DNAJC16
  Gene Name: DnaJ (Hsp40) homolog, subfamily C, member 16
  ENST ID: ENST00000375838
  CDS Start-End: 165-1952
aagcgtcacgtgactcccctcgggcttgtcccctcctctttcccctccccaggcccaggcgagcgctggtgtggacgggaagctcccggcccggcgaactaactggagcacggagctgcagccggttgggccggtgtactttcccgctctggaaaggaagagaaatggaagtgagaaagttgagcatttcctggcagttcttgatagttctggttctgatcctgcaaattctgtctgcgttggattttgacccatacagagtcctaggggtcagccgaacagccagtcaggctgatattaaaaaggcttataagaagctcgcccgggaatggcatcctgacaaaaacaaagatcctggagcagaagacaagttcattcaaatcagtaaggcttacgagattctttcaaatgaagaaaagagatcaaattatgatcaatatggagacgctggagagaaccagggctaccagaagcagcaacagcagcgagagtatcgcttccgccatttccatgaaaatttttattttgatgaatccttttttcacttcccttttaattctgaacggcgggactcaattgacgaaaagtatttattgcacttttcacattatgtgaatgaagtggttccagatagcttcaagaaaccctacctcatcaagatcacctccgattggtgctttagctgcattcatatcgagcctgtgtggaaagaagtcattcaagaactggaagaattgggtgtaggaattggcgtggtccatgctgggtatgagagacgcctggcccatcacctaggggcacacagcacgccctctatcctaggaatcattaacgggaaaatctccttcttccacaatgcagttgtccgtgaaaatctgcgacaatttgtagaaagtcttcttccagggaacttggtggagaaagttacaaataaaaattacgtcagattcctctctggctggcagcaagagaataagcctcatgtccttctgtttgaccaaacgcccattgtgccactgttatacaagttgactgcctttgcatacaaagattatttatcatttggatatgtatatgtgggtttgagagggacggaagagatgacaaggcggtacaacatcaatatctacgcccctaccctcttggtctttaaagaacatataaacaggcctgccgatgttatccaggcccgaggtatgaagaagcaaatcattgacgacttcatcacccgaaacaaatatctattggcagccaggctcaccagccagaagttgttccatgaactctgccctgtgaaacggtcgcatcgacagaggaagtactgtgtggttttattgactgctgagactaccaagttgagcaaaccctttgaggctttcctgtcctttgccctggcaaacactcaagacacagtgagatttgtgcatgtctacagcaatcggcagcaggagtttgccgacaccttactaccagacagtgaggcgtttcaagggaaatcagcggtgtctattttagaaaggcgcaacacagcaggaagggtggtgtataaaaccctggaagacccttggattgggagtgagagtgacaaatttatcctcttgggctatctcgaccagctgcgtaaagatccagctcttctgtcctctgaagcagtgcttcctgacctgaccgatgaacttgcccctgtttttctccttcgatggttctactctgcttctgactacatctcagactgctgggatagcatttttcacaacaactggagggaaatgatgcccctgctgtccctgatcttctctgccctcttcatcctcttcggcactgtcatcgttcaggctttcagcgactctaatgatgagcgagagtcaagccctccagaaaaagaggaagcccaagagaagactgggaaaactgagccaagcttcaccaaagaaaacagcaggtttctctaacaaaacaccagactcacctccccggcacctgccccccagatcctgtcatctgataacgcagcattggaacatagagtgtagagaagaactctcatgcacctcctcccatgtaaactgtggctacagggaaaagtcactgtgatttgtgtttactaagaccctgtaggtgtttagatgccttagatttcataatgaaggcagaaggaaagaagcctatcaggcaagtgttaggtgagccagaagcaggacgtggtttatccctgtaaatgtcaatgaacgtaaccagtcttgtgcgcacacacacccagcagcaagaggccagggtctccgagacaaagaacatagactgaatgatagttgtcttcttcattctgtcctagagcaacttctgcacctgaaaagcag

SEQ ID NO: 127725 - DNA, 6069 bp, Homo sapiens
  Payload ID: 5000
  Gene Symbol: DNAJC16
  Gene Name: DnaJ (Hsp40) homolog, subfamily C, member 16
  Uniprot ID: Q9Y2G8
  ENST ID: ENST00000375847
  CDS Start-End: 165-2513
aagcgtcacgtgactcccctcgggcttgtcccctcctctttcccctccccaggcccaggcgagcgctggtgtggacgggaagctcccggcccggcgaactaactggagcacggagctgcagccggttgggccggtgtactttcccgctctggaaaggaagagaaatggaagtgagaaagttgagcatttcctggcagttcttgatagttctggttctgatcctgcaaattctgtctgcgttggattttgacccatacagagtcctaggggtcagccgaacagccagtcaggctgatattaaaaaggcttataagaagctcgcccgggaatggcatcctgacaaaaacaaagatcctggagcagaagacaagttcattcaaatcagtaaggcttacgagattctttcaaatgaagaaaagagatcaaattatgatcaatatggagacgctggagagaaccagggctaccagaagcagcaacagcagcgagagtatcgcttccgccatttccatgaaaatttttattttgatgaatccttttttcacttcccttttaattctgaacggcgggactcaattgacgaaaagtatttattgcacttttcacattatgtgaatgaagtggttccagatagcttcaagaaaccctacctcatcaagatcacctccgattggtgctttagctgcattcatatcgagcctgtgtggaaagaagtcattcaagaactggaagaattgggtgtaggaattggcgtggtccatgctgggtatgagagacgcctggcccatcacctaggggcacacagcacgccctctatcctaggaatcattaacgggaaaatctccttcttccacaatgcagttgtccgtgaaaatctgcgacaatttgtagaaagtcttcttccagggaacttggtggagaaagttacaaataaaaattacgtcagattcctctctggctggcagcaagagaataagcctcatgtccttctgtttgaccaaacgcccattgtgccactgttatacaagttgactgcctttgcatacaaagattatttatcatttggatatgtatatgtgggtttgagagggacggaagagatgacaaggcggtacaacatcaatatctacgcccctaccctcttggtctttaaagaacatataaacaggcctgccgatgttatccaggcccgaggtatgaagaagcaaatcattgacgacttcatcacccgaaacaaatatctattggcagccaggctcaccagccagaagttgttccatgaactctgccctgtgaaacggtcgcatcgacagaggaagtactgtgtggttttattgactgctgagactaccaagttgagcaaaccctttgaggctttcctgtcctttgccctggcaaacactcaagacacagtgagatttgtgcatgtctacagcaatcggcagcaggagtttgccgacaccttactaccagacagtgaggcgtttcaagggaaatcagcggtgtctattttagaaaggcgcaacacagcaggaagggtggtgtataaaaccctggaagacccttggattgggagtgagagtgacaaatttatcctcttgggctatctcgaccagctgcgtaaagatccagctcttctgtcctctgaagcagtgcttcctgacctgaccgatgaacttgcccctgtttttctccttcgatggttctactctgcttctgactacatctcagactgctgggatagcatttttcacaacaactggagggaaatgatgcccctgctgtccctgatcttctctgccctcttcatcctcttcggcactgtcatcgttcaggctttcagcgactctaatgatgagcgagagtcaagccctccagaaaaagaggaagcccaagagaagactgggaaaactgagccaagcttcaccaaagaaaacagcagcaagattcctaaaaaaggctttgtggaggtaactgaactcacagatgtaacatacaccagtaacttggtacgtctgaggccaggccacatgaatgtggtcctcatcctgtcgaattctaccaagaccagcctactacagaaatttgctttggaggtctacacatttactgggagcagctgcctacacttctccttcctgagtctagataaacacagagaatggctagaatacttactagaatttgctcaagatgcagctccaatcccaaaccaatatgataagcatttcatggagcgtgactacactggttatgtactggctctgaatggccacaagaaatacttctgcctcttcaagccccaaaagacagtcgaagaggaggaagccatagggtcgtgcagtgatgttgactcttccctctacctgggtgaatctcgagggaaaccttcctgtggccttggatccaggcccatcaaaggaaagttgagcaagctctctttatggatggaacgcctgctggagggctccttacagaggttttatatcccatcatggcctgaactagactgagaggattttccaaagagatttgaactcttcagactttttaacatgcccctgtgaacaggtattttcaggactcaaactaccacaatgaacagagtatagattttagattgctcttctagaaccatggctagaagaatctttcctttgtcctgttctaacctaggaatgaaaaacaccaccagtttgaatcgcctagatgaaaatcttttcctctgggtgttatttttccccactgaatgccacaccattgaaaatagactgctcatcccctcttcctttcttgtccttgtcccatgctcaccccaccctcctgtcctgtgtcttggagaagcacagggctccaccctgcaagcggcatctggcggaccctcatgagcctgtcgtgcaggccaggtcattggccccttccccaatcccggccctgctgtgctgctgccatggcgcatgctcctaactctgaacaacccacggcagcttctagccccgcatctggaaaaaggcccctttccaagcaatctcacgtttactggttgttctgggagtaagtggctaaatgtatattttgggggtatcccccaacaacagtttgttggccacaggttgaaaaggaaaggaataaacgggagttctgcatgtgagttctcaagaaaaggaaagggaggctgagcagtggctgaagcgatgcagccttgagacacgctgtgagcatcccatccgccgccccagcgctgctggtagccaggggaggggtctgcacagcgagaagtactgtgatgactttgagccgttgacatgtatgtcttcagatgcctttctgcctctgtcgattttagggtatggatattaggagccataacttgtaatcttgttctctgaacgtagagataagctgctataaagccagtagatgttaaactgaagagaaattattcccacctgctatgagtcaggcttaaggaatctcttcaatagtgtctctttagtaaaataccaaacatgtctttgtatcaaggaacttaaaatttctcaacaattgtattttgaacactgttaccctaaaagtgctgtctcttcaagtcatcttttgcaggaagtgagccaagatttgttctagactcccattttgcaaaaggcttactttccacttctgggctgtattttgatgtctcatcttcattgttttcactcttaacttagagctgcttcaccagtattggggtcagactggccatcagcacctgagcgtgctgagctccaggtatagtggaccccagggtgcctcataccagccagttagagagcataccttttatttttcagggcagaatgaccagtggttctgagtttgagtttggacagcttcaaagagtggtccgttcaaatgtcaaagcaaggtgcctttggtggctttgtgaagggtgaaaatcagtgatgggacatttactaagtatttctttttttttttttttttttagttgttgagacagagtttcactcttgttgcccaggctggagtgaaatggtgcgatctcggttcaccgcaacctccacatcccaggttcaagtgattctcctgcctcagcctcctgagtagctaggattacaggcatgtgccaccatgtaattagcccggctaattttgtatttttagtagagacgggatttctccatgttgatcaggctggtcatgaactcctgacctcaggtgatctgcctgcctcagcctcccaaagtgctgctgggattacaggcgtgagccaccactcccggctaagttagtatttctttaatcttaatgctttaaactaagccacttggatcctgaataatttaaatcttgagctacattggtaagtaataaattatttaaggccaggaattcctgtagttttcatggagtctgtagctttattaaaaaataaatcactgccaggcttcattcttccatatgatcctctaaaaatggacacttcctctgaatgctgtatctcatggcacctggtccaactagaaatggtcaaggaattcatttggctccttgatacatcagtcctcaatattactttctaggtattttatggccagattgcttatatgagtggtcttttggtttggtagtaggtttttatttttaatttctgtactaatgaaattcctgactttaatttctgaaaaccaaaaactctccaagtgtatttatttatattttttttaatagagacgaggtcttgctatgttgcccaggctggtcccaaactcctggcctcaagcagtccttccaccttggcctcccaaagtgctgggattatcaatatgagccaccatgccagatttgttcatttttaaacatttttatctcttcaagtcatcttttgatcttttaaaaagcaccttcaaacagctgcaccttccatttgcactaggaaatgaaggtagtgatgggattggcaatgttcctggcagatgtttcagcccaaaagctcttctacagaccggtttagagctggtgccctatgagaatattagggagcttttattttaaattgaactttacccttgtccatgcaaggcattcctcctgaatgcatccatgaatttgtttacttttgcgtcaaacatatgagccattgtcatgctcagcctgtgccaccattgctctgtctgatgtatgtaatcatacaagacctgattttggttctaacacagtggtctttgactatcaacattgatgtttttagagatgggttcttctggttgatacagactatgcattgcgtttagcagatggggtaaaactggcctaaaacaagtctttgcagaatacatgccaatttccaaaaaaaaaaaaaaatttgttgctcaggtgttgcacaatttttatctaacactgaggctatcagctccaactaaacaacatttcagtgggtgaggctgccctaacttccattaggggccatggtctcactgccatcacttattagccatgagaatttggttgtagttttcaggtaggttggtttcttcctcatttgcagcttgttgatacttgttcctttttatttattaacatcccaatcaatttgcagctgccatcattacataaatatttttctgttataaaaagaagtgtgatctgtttttttagtgatttcctttgtttgggaatagagattggaagcacatactcagacctgttttgttaactagaattctttaaaagctgatgccaaacatctttacagaggaactgtagttcacatccacctgtctgacattgtcccctaaaaacaagtgcagtgtggcagctgctgaatctgtctgttcagtttgtcaaggaggataattatgcttgggagagatctgaaaagaaggtgaatattttgcacttttgatactcttaggaacaaataacttatttggcaaattgtttcttttttatgttttgggtgttgtttttgttttttgactttttttgtattgtgaacaggcactgaagctgatgttattttaagattacagaatggaaaaagaaataaactattttaatgtctgataa

SEQ ID NO: 127726 - DNA, 3446 bp, Homo sapiens
  Payload ID: 5000
  Gene Symbol: DNAJC16
  Gene Name: DnaJ (Hsp40) homolog, subfamily C, member 16
  ENST ID: ENST00000375849
  CDS Start-End: 165-2132
aagcgtcacgtgactcccctcgggcttgtcccctcctctttcccctccccaggcccaggcgagcgctggtgtggacgggaagctcccggcccggcgaactaactggagcacggagctgcagccggttgggccggtgtactttcccgctctggaaaggaagagaaatggaagtgagaaagttgagcatttcctggcagttcttgatagttctggttctgatcctgcaaattctgtctgcgttggattttgacccatacagagtcctaggggtcagccgaacagccagtcaggctgatattaaaaaggcttataagaagctcgcccgggaatggcatcctgacaaaaacaaagatcctggagcagaagacaagttcattcaaatcagtaaggcttacgagattctttcaaatgaagaaaagagatcaaattatgatcaatatggagacgctggagagaaccagggctaccagaagcagcaacagcagcgagagtatcgcttccgccatttccatgaaaatttttattttgatgaatccttttttcacttcccttttaattctgaacggcgggactcaattgacgaaaagtatttattgcacttttcacattatgtgaatgaagtggttccagatagcttcaagaaaccctacctcatcaagatcacctccgattggtgctttagctgcattcatatcgagcctgtgtggaaagaagtcattcaagaactggaagaattgggtgtaggaattggcgtggtccatgctgggtatgagagacgcctggcccatcacctaggggcacacagcacgccctctatcctaggaatcattaacgggaaaatctccttcttccacaatgcagttgtccgtgaaaatctgcgacaatttgtagaaagtcttcttccagggaacttggtggagaaagttacaaataaaaattacgtcagattcctctctggctggcagcaagagaataagcctcatgtccttctgtttgaccaaacgcccattgtgccactgttatacaagttgactgcctttgcatacaaagattatttatcatttggatatgtatatgtgggtttgagagggacggaagagatgacaaggcggtacaacatcaatatctacgcccctaccctcttggtctttaaagaacatataaacaggcctgccgatgttatccaggcccgaggtatgaagaagcaaatcattgacgacttcatcacccgaaacaaatatctattggcagccaggctcaccagccagaagttgttccatgaactctgccctgtgaaacggtcgcatcgacagaggaagtactgtgtggttttattgactgctgagactaccaagttgagcaaaccctttgaggctttcctgtcctttgccctggcaaacactcaagacacagtgagatttgtgcatgtctacagcaatcggcagcaggagtttgccgacaccttactaccagacagtgaggcgtttcaagggaaatcagcggtgtctattttagaaaggcgcaacacagcaggaagggtggtgtataaaaccctggaagacccttggattgggagtgagagtgacaaatttatcctcttgggctatctcgaccagctgcgtaaagatccagctcttctgtcctctgaagcagtgcttcctgacctgaccgatgaacttgcccctgtttttctccttcgatggttctactctgcttctgactacatctcagactgctgggatagcatttttcacaacaactggagggaaatgatgcccctgctgtccctgatcttctctgccctcttcatcctcttcggcactgtcatcgttcaggctttcagcgactctaatgatgagcgagagtcaagccctccagaaaaagaggaagcccaagagaagactgggaaaactgagccaagcttcaccaaagaaaacagcagcaagattcctaaaaaaggctttgtggaggtaactgaactcacagatgtaacatacaccagtaacttggtacgtctgaggccaggccacatgaatgtggtcctcatcctgtcgaattctaccaagaccagcctactacagaaatttgctttggaggtctacacatttactggaaagatcatacggtggtgaaacttcgacaagatcacagcccatcacgttcaggccttgacaacccctgatgatctccagagcctattcaagatcaagactgagttgtccacagtggtaatcatttacagtgaaaagcacccagtagagcttttcccagcccacgccaccctttgacttggaattggctttccctccataaacatttgttgactgccaggcacactggcaggcctcccagagaaacagataatgcgtacacagtccctgctcctcagggctgcatggtgtggtgatggagacaaggaaaccaatcgtttcaatgtcatgcaccaagggcttcaaggaaagcaagcccagaatggtatcagcataggtaatagcctggagaggtgggtaaggcttccccaaggtggaaatacccagttcaagggataggccaggcagagggaaaaacacaggcaaaggcaccaagatgggaaaagttcaggtagtaagatgtggccagaagacagagtaagtgagggagactgatgggaagagagtgaccttgtctgaaagggttcccatcctgcaggtgaaaagcccagaaggttgctaagcagagggatgaggaatgtgtttcagaaatccctcatgagaagagaggatggttacagccatttcaagagagagagttatggccaccctcctttaagatcttagaggatgtaaggtacttgattaggtttaagcagtcttcattcatttactctcaaatgtctttgagtgcctactatttgtattaggcactgtcctaggctccaaggacaaggtagggaacaatacataggtcctgcccttggggagattctagtcataaccattctgcccccgtgcatttactcccagcacacattattggagctttatttgggtgtttctaaaactcttgagcttaccttggcaggtaattgtgccatcacatgcacttttatttatttatttatttatttatttatttatttatttatttttgagacagggtctctgtcacccgggctatagtgcagtggtatgatcacggctcactgaaggcttgacctgccaggctcagttgatcctcctgccccagcctccctagtagctgggactacaggtgcacactagcacaccagactaatttttatttttatttttagtaaagatgggatctcactatgttgcccaggctgggctgaaactcctgggctcaaacgatccatccaccctggcctcccaaagtgctgaggatagtgcctgagccaccgcgcctggcccgttgtatgcacttttatttaaatttaaccctaaaaa

SEQ ID NO: 127727 - DNA, 6299 bp, Homo sapiens
  Payload ID: 5000
  Gene Symbol: DNAJC16
  Gene Name: DnaJ (Hsp40) homolog, subfamily C, member 16
  ENST ID: ENST00000475133
  CDS Start-End: 165-1952
aagcgtcacgtgactcccctcgggcttgtcccctcctctttcccctccccaggcccaggcgagcgctggtgtggacgggaagctcccggcccggcgaactaactggagcacggagctgcagccggttgggccggtgtactttcccgctctggaaaggaagagaaatggaagtgagaaagttgagcatttcctggcagttcttgatagttctggttctgatcctgcaaattctgtctgcgttggattttgacccatacagagtcctaggggtcagccgaacagccagtcaggctgatattaaaaaggcttataagaagctcgcccgggaatggcatcctgacaaaaacaaagatcctggagcagaagacaagttcattcaaatcagtaaggcttacgagattctttcaaatgaagaaaagagatcaaattatgatcaatatggagacgctggagagaaccagggctaccagaagcagcaacagcagcgagagtatcgcttccgccatttccatgaaaatttttattttgatgaatccttttttcacttcccttttaattctgaacggcgggactcaattgacgaaaagtatttattgcacttttcacattatgtgaatgaagtggttccagatagcttcaagaaaccctacctcatcaagatcacctccgattggtgctttagctgcattcatatcgagcctgtgtggaaagaagtcattcaagaactggaagaattgggtgtaggaattggcgtggtccatgctgggtatgagagacgcctggcccatcacctaggggcacacagcacgccctctatcctaggaatcattaacgggaaaatctccttcttccacaatgcagttgtccgtgaaaatctgcgacaatttgtagaaagtcttcttccagggaacttggtggagaaagttacaaataaaaattacgtcagattcctctctggctggcagcaagagaataagcctcatgtccttctgtttgaccaaacgcccattgtgccactgttatacaagttgactgcctttgcatacaaagattatttatcatttggatatgtatatgtgggtttgagagggacggaagagatgacaaggcggtacaacatcaatatctacgcccctaccctcttggtctttaaagaacatataaacaggcctgccgatgttatccaggcccgaggtatgaagaagcaaatcattgacgacttcatcacccgaaacaaatatctattggcagccaggctcaccagccagaagttgttccatgaactctgccctgtgaaacggtcgcatcgacagaggaagtactgtgtggttttattgactgctgagactaccaagttgagcaaaccctttgaggctttcctgtcctttgccctggcaaacactcaagacacagtgagatttgtgcatgtctacagcaatcggcagcaggagtttgccgacaccttactaccagacagtgaggcgtttcaagggaaatcagcggtgtctattttagaaaggcgcaacacagcaggaagggtggtgtataaaaccctggaagacccttggattgggagtgagagtgacaaatttatcctcttgggctatctcgaccagctgcgtaaagatccagctcttctgtcctctgaagcagtgcttcctgacctgaccgatgaacttgcccctgtttttctccttcgatggttctactctgcttctgactacatctcagactgctgggatagcatttttcacaacaactggagggaaatgatgcccctgctgtccctgatcttctctgccctcttcatcctcttcggcactgtcatcgttcaggctttcagcgactctaatgatgagcgagagtcaagccctccagaaaaagaggaagcccaagagaagactgggaaaactgagccaagcttcaccaaagaaaacagcaggtttctctaacaaaacaccagactcacctccccggcacctgccccccagatcctgtcatctgataacgcagcattggaacatagagtgtagagaagaactctcatgcacctcctcccatgtaaactgtggctacagggaaaagtcactgtgatttgtgtttactaagaccctgtaggtgtttagatgccttagatttcataatgaaggcagaaggaaagaagcctatcagcaagattcctaaaaaaggctttgtggaggtaactgaactcacagatgtaacatacaccagtaacttggtacgtctgaggccaggccacatgaatgtggtcctcatcctgtcgaattctaccaagaccagcctactacagaaatttgctttggaggtctacacatttactgggagcagctgcctacacttctccttcctgagtctagataaacacagagaatggctagaatacttactagaatttgctcaagatgcagctccaatcccaaaccaatatgataagcatttcatggagcgtgactacactggttatgtactggctctgaatggccacaagaaatacttctgcctcttcaagccccaaaagacagtcgaagaggaggaagccatagggtcgtgcagtgatgttgactcttccctctacctgggtgaatctcgagggaaaccttcctgtggccttggatccaggcccatcaaaggaaagttgagcaagctctctttatggatggaacgcctgctggagggctccttacagaggttttatatcccatcatggcctgaactagactgagaggattttccaaagagatttgaactcttcagactttttaacatgcccctgtgaacaggtattttcaggactcaaactaccacaatgaacagagtatagattttagattgctcttctagaaccatggctagaagaatctttcctttgtcctgttctaacctaggaatgaaaaacaccaccagtttgaatcgcctagatgaaaatcttttcctctgggtgttatttttccccactgaatgccacaccattgaaaatagactgctcatcccctcttcctttcttgtccttgtcccatgctcaccccaccctcctgtcctgtgtcttggagaagcacagggctccaccctgcaagcggcatctggcggaccctcatgagcctgtcgtgcaggccaggtcattggccccttccccaatcccggccctgctgtgctgctgccatggcgcatgctcctaactctgaacaacccacggcagcttctagccccgcatctggaaaaaggcccctttccaagcaatctcacgtttactggttgttctgggagtaagtggctaaatgtatattttgggggtatcccccaacaacagtttgttggccacaggttgaaaaggaaaggaataaacgggagttctgcatgtgagttctcaagaaaaggaaagggaggctgagcagtggctgaagcgatgcagccttgagacacgctgtgagcatcccatccgccgccccagcgctgctggtagccaggggaggggtctgcacagcgagaagtactgtgatgactttgagccgttgacatgtatgtcttcagatgcctttctgcctctgtcgattttagggtatggatattaggagccataacttgtaatcttgttctctgaacgtagagataagctgctataaagccagtagatgttaaactgaagagaaattattcccacctgctatgagtcaggcttaaggaatctcttcaatagtgtctctttagtaaaataccaaacatgtctttgtatcaaggaacttaaaatttctcaacaattgtattttgaacactgttaccctaaaagtgctgtctcttcaagtcatcttttgcaggaagtgagccaagatttgttctagactcccattttgcaaaaggcttactttccacttctgggctgtattttgatgtctcatcttcattgttttcactcttaacttagagctgcttcaccagtattggggtcagactggccatcagcacctgagcgtgctgagctccaggtatagtggaccccagggtgcctcataccagccagttagagagcataccttttatttttcagggcagaatgaccagtggttctgagtttgagtttggacagcttcaaagagtggtccgttcaaatgtcaaagcaaggtgcctttggtggctttgtgaagggtgaaaatcagtgatgggacatttactaagtatttctttttttttttttttttttagttgttgagacagagtttcactcttgttgcccaggctggagtgaaatggtgcgatctcggttcaccgcaacctccacatcccaggttcaagtgattctcctgcctcagcctcctgagtagctaggattacaggcatgtgccaccatgtaattagcccggctaattttgtatttttagtagagacgggatttctccatgttgatcaggctggtcatgaactcctgacctcaggtgatctgcctgcctcagcctcccaaagtgctgctgggattacaggcgtgagccaccactcccggctaagttagtatttctttaatcttaatgctttaaactaagccacttggatcctgaataatttaaatcttgagctacattggtaagtaataaattatttaaggccaggaattcctgtagttttcatggagtctgtagctttattaaaaaataaatcactgccaggcttcattcttccatatgatcctctaaaaatggacacttcctctgaatgctgtatctcatggcacctggtccaactagaaatggtcaaggaattcatttggctccttgatacatcagtcctcaatattactttctaggtattttatggccagattgcttatatgagtggtcttttggtttggtagtaggtttttatttttaatttctgtactaatgaaattcctgactttaatttctgaaaaccaaaaactctccaagtgtatttatttatattttttttaatagagacgaggtcttgctatgttgcccaggctggtcccaaactcctggcctcaagcagtccttccaccttggcctcccaaagtgctgggattatcaatatgagccaccatgccagatttgttcatttttaaacatttttatctcttcaagtcatcttttgatcttttaaaaagcaccttcaaacagctgcaccttccatttgcactaggaaatgaaggtagtgatgggattggcaatgttcctggcagatgtttcagcccaaaagctcttctacagaccggtttagagctggtgccctatgagaatattagggagcttttattttaaattgaactttacccttgtccatgcaaggcattcctcctgaatgcatccatgaatttgtttacttttgcgtcaaacatatgagccattgtcatgctcagcctgtgccaccattgctctgtctgatgtatgtaatcatacaagacctgattttggttctaacacagtggtctttgactatcaacattgatgtttttagagatgggttcttctggttgatacagactatgcattgcgtttagcagatggggtaaaactggcctaaaacaagtctttgcagaatacatgccaatttccaaaaaaaaaaaaaaatttgttgctcaggtgttgcacaatttttatctaacactgaggctatcagctccaactaaacaacatttcagtgggtgaggctgccctaacttccattaggggccatggtctcactgccatcacttattagccatgagaatttggttgtagttttcaggtaggttggtttcttcctcatttgcagcttgttgatacttgttcctttttatttattaacatcccaatcaatttgcagctgccatcattacataaatatttttctgttataaaaagaagtgtgatctgtttttttagtgatttcctttgtttgggaatagagattggaagcacatactcagacctgttttgttaactagaattctttaaaagctgatgccaaacatctttacagaggaactgtagttcacatccacctgtctgacattgtcccctaaaaacaagtgcagtgtggcagctgctgaatctgtctgttcagtttgtcaaggaggataattatgcttgggagagatctgaaaagaaggtgaatattttgcacttttgatactcttaggaacaaataacttatttggcaaattgtttcttttttatgttttgggtgttgtttttgttttttgactttttttgtattgtgaacaggcactgaagctgatgttattttaagattacagaatggaaaaagaaataaactattttaatgtctgataa

SEQ ID NO: 127728 - DNA, 445 bp, Homo sapiens
  Payload ID: 5000
  Gene Symbol: DNAJC16
  Gene Name: DnaJ (Hsp40) homolog, subfamily C, member 16
  ENST ID: ENST00000472665
  CDS Start-End: 1-293
ctgacctgaccgatgaacttgcccctgtttttctccttcgatggttctactctgcttctgactacatctcagactgctgggatagcatttttcacaacaactggagggaaatgatgcccctgctgtccctgatcttctctgccctcttcatcctcttcggcactgtcatcgttcaggctttcagcgactctaatgatgagcgagagtcaagccctccagaaaaagaggaagcccaagagaagactgggaaaactgagccaagcttcaccaaagaaaacagcaggtttctctaacaaaacaccagactcacctccccggcacctgccccccagatcctgtcatctgataacgcagcattggaacatagagtgtagagaagaactctcatgcacctcctcccatcaagattcctaaaaaaggctttgtggaggtaactgaactcaca

SEQ ID NO: 127729 - DNA, 5882 bp, Homo sapiens
  Payload ID: 5000
  Gene Symbol: DNAJC16
  Gene Name: DnaJ (Hsp40) homolog, subfamily C, member 16
  Uniprot ID: Q9Y2G8
  ENST ID: ENST00000616884
  CDS Start-End: 916-2328
aagcgtcacgtgactcccctcgggcttgtcccctcctctttcccctccccaggcccaggcgagcgctggtgtggacgggaagctcccggcccggcgaactaactggagcacggagctgcagccggttgggccggtgtactttcccggcatcctgacaaaaacaaagatcctggagcagaagacaagttcattcaaatcagtaaggcttacgagattctttcaaatgaagaaaagagatcaaattatgatcaatatggagacgctggagagaaccagggctaccagaagcagcaacagcagcgagagtatcgcttccgccatttccatgaaaatttttattttgatgaatccttttttcacttcccttttaattctgaacggcgggactcaattgacgaaaagtatttattgcacttttcacattatgtgaatgaagtggttccagatagcttcaagaaaccctacctcatcaagatcacctccgattggtgctttagctgcattcatatcgagcctgtgtggaaagaagtcattcaagaactggaagaattgggtgtaggaattggcgtggtccatgctgggtatgagagacgcctggcccatcacctaggggcacacagcacgccctctatcctaggaatcattaacgggaaaatctccttcttccacaatgcagttgtccgtgaaaatctgcgacaatttgtagaaagtcttcttccagggaacttggtggagaaagttacaaataaaaattacgtcagattcctctctggctggcagcaagagaataagcctcatgtccttctgtttgaccaaacgcccattgtgccactgttatacaagttgactgcctttgcatacaaagattatttatcatttggatatgtatatgtgggtttgagagggacggaagagatgacaaggcggtacaacatcaatatctacgcccctaccctcttggtctttaaagaacatataaacaggcctgccgatgttatccaggcccgaggtatgaagaagcaaatcattgacgacttcatcacccgaaacaaatatctattggcagccaggctcaccagccagaagttgttccatgaactctgccctgtgaaacggtcgcatcgacagaggaagtactgtgtggttttattgactgctgagactaccaagttgagcaaaccctttgaggctttcctgtcctttgccctggcaaacactcaagacacagtgagatttgtgcatgtctacagcaatcggcagcaggagtttgccgacaccttactaccagacagtgaggcgtttcaagggaaatcagcggtgtctattttagaaaggcgcaacacagcaggaagggtggtgtataaaaccctggaagacccttggattgggagtgagagtgacaaatttatcctcttgggctatctcgaccagctgcgtaaagatccagctcttctgtcctctgaagcagtgcttcctgacctgaccgatgaacttgcccctgtttttctccttcgatggttctactctgcttctgactacatctcagactgctgggatagcatttttcacaacaactggagggaaatgatgcccctgctgtccctgatcttctctgccctcttcatcctcttcggcactgtcatcgttcaggctttcagcgactctaatgatgagcgagagtcaagccctccagaaaaagaggaagcccaagagaagactgggaaaactgagccaagcttcaccaaagaaaacagcagcaagattcctaaaaaaggctttgtggaggtaactgaactcacagatgtaacatacaccagtaacttggtacgtctgaggccaggccacatgaatgtggtcctcatcctgtcgaattctaccaagaccagcctactacagaaatttgctttggaggtctacacatttactgggagcagctgcctacacttctccttcctgagtctagataaacacagagaatggctagaatacttactagaatttgctcaagatgcagctccaatcccaaaccaatatgataagcatttcatggagcgtgactacactggttatgtactggctctgaatggccacaagaaatacttctgcctcttcaagccccaaaagacagtcgaagaggaggaagccatagggtcgtgcagtgatgttgactcttccctctacctgggtgaatctcgagggaaaccttcctgtggccttggatccaggcccatcaaaggaaagttgagcaagctctctttatggatggaacgcctgctggagggctccttacagaggttttatatcccatcatggcctgaactagactgagaggattttccaaagagatttgaactcttcagactttttaacatgcccctgtgaacaggtattttcaggactcaaactaccacaatgaacagagtatagattttagattgctcttctagaaccatggctagaagaatctttcctttgtcctgttctaacctaggaatgaaaaacaccaccagtttgaatcgcctagatgaaaatcttttcctctgggtgttatttttccccactgaatgccacaccattgaaaatagactgctcatcccctcttcctttcttgtccttgtcccatgctcaccccaccctcctgtcctgtgtcttggagaagcacagggctccaccctgcaagcggcatctggcggaccctcatgagcctgtcgtgcaggccaggtcattggccccttccccaatcccggccctgctgtgctgctgccatggcgcatgctcctaactctgaacaacccacggcagcttctagccccgcatctggaaaaaggcccctttccaagcaatctcacgtttactggttgttctgggagtaagtggctaaatgtatattttgggggtatcccccaacaacagtttgttggccacaggttgaaaaggaaaggaataaacgggagttctgcatgtgagttctcaagaaaaggaaagggaggctgagcagtggctgaagcgatgcagccttgagacacgctgtgagcatcccatccgccgccccagcgctgctggtagccaggggaggggtctgcacagcgagaagtactgtgatgactttgagccgttgacatgtatgtcttcagatgcctttctgcctctgtcgattttagggtatggatattaggagccataacttgtaatcttgttctctgaacgtagagataagctgctataaagccagtagatgttaaactgaagagaaattattcccacctgctatgagtcaggcttaaggaatctcttcaatagtgtctctttagtaaaataccaaacatgtctttgtatcaaggaacttaaaatttctcaacaattgtattttgaacactgttaccctaaaagtgctgtctcttcaagtcatcttttgcaggaagtgagccaagatttgttctagactcccattttgcaaaaggcttactttccacttctgggctgtattttgatgtctcatcttcattgttttcactcttaacttagagctgcttcaccagtattggggtcagactggccatcagcacctgagcgtgctgagctccaggtatagtggaccccagggtgcctcataccagccagttagagagcataccttttatttttcagggcagaatgaccagtggttctgagtttgagtttggacagcttcaaagagtggtccgttcaaatgtcaaagcaaggtgcctttggtggctttgtgaagggtgaaaatcagtgatgggacatttactaagtatttctttttttttttttttttttagttgttgagacagagtttcactcttgttgcccaggctggagtgaaatggtgcgatctcggttcaccgcaacctccacatcccaggttcaagtgattctcctgcctcagcctcctgagtagctaggattacaggcatgtgccaccatgtaattagcccggctaattttgtatttttagtagagacgggatttctccatgttgatcaggctggtcatgaactcctgacctcaggtgatctgcctgcctcagcctcccaaagtgctgctgggattacaggcgtgagccaccactcccggctaagttagtatttctttaatcttaatgctttaaactaagccacttggatcctgaataatttaaatcttgagctacattggtaagtaataaattatttaaggccaggaattcctgtagttttcatggagtctgtagctttattaaaaaataaatcactgccaggcttcattcttccatatgatcctctaaaaatggacacttcctctgaatgctgtatctcatggcacctggtccaactagaaatggtcaaggaattcatttggctccttgatacatcagtcctcaatattactttctaggtattttatggccagattgcttatatgagtggtcttttggtttggtagtaggtttttatttttaatttctgtactaatgaaattcctgactttaatttctgaaaaccaaaaactctccaagtgtatttatttatattttttttaatagagacgaggtcttgctatgttgcccaggctggtcccaaactcctggcctcaagcagtccttccaccttggcctcccaaagtgctgggattatcaatatgagccaccatgccagatttgttcatttttaaacatttttatctcttcaagtcatcttttgatcttttaaaaagcaccttcaaacagctgcaccttccatttgcactaggaaatgaaggtagtgatgggattggcaatgttcctggcagatgtttcagcccaaaagctcttctacagaccggtttagagctggtgccctatgagaatattagggagcttttattttaaattgaactttacccttgtccatgcaaggcattcctcctgaatgcatccatgaatttgtttacttttgcgtcaaacatatgagccattgtcatgctcagcctgtgccaccattgctctgtctgatgtatgtaatcatacaagacctgattttggttctaacacagtggtctttgactatcaacattgatgtttttagagatgggttcttctggttgatacagactatgcattgcgtttagcagatggggtaaaactggcctaaaacaagtctttgcagaatacatgccaatttccaaaaaaaaaaaaaaatttgttgctcaggtgttgcacaatttttatctaacactgaggctatcagctccaactaaacaacatttcagtgggtgaggctgccctaacttccattaggggccatggtctcactgccatcacttattagccatgagaatttggttgtagttttcaggtaggttggtttcttcctcatttgcagcttgttgatacttgttcctttttatttattaacatcccaatcaatttgcagctgccatcattacataaatatttttctgttataaaaagaagtgtgatctgtttttttagtgatttcctttgtttgggaatagagattggaagcacatactcagacctgttttgttaactagaattctttaaaagctgatgccaaacatctttacagaggaactgtagttcacatccacctgtctgacattgtcccctaaaaacaagtgcagtgtggcagctgctgaatctgtctgttcagtttgtcaaggaggataattatgcttgggagagatctgaaaagaaggtgaatattttgcacttttgatactcttaggaacaaataacttatttggcaaattgtttcttttttatgttttgggtgttgtttttgttttttgactttttttgtattgtgaacaggcactgaagctgatgttattttaagattacagaatggaaaaagaaataaactattttaatgtctgat

SEQ ID NO: 127730 - DNA, 3731 bp, Homo sapiens
  Payload ID: 5001
  Gene Symbol: DNAJC17
  Gene Name: DnaJ (Hsp40) homolog, subfamily C, member 17
  Uniprot ID: Q9NVM6
  ENST ID: ENST00000220496
  CDS Start-End: 32-946
agttgtagtacgaatccgtcaggccggaaccatggcagtgaccaaggagctcttacagatggacctgtacgcgctgctaggcattgaggagaaggcagcggacaaagaggtaaagaaggcgtataggcagaaggccctctcctgccacccagacaaaaatccagataatcccagagcagctgaactcttccaccagctttctcaggccttggaggtgctgaccgatgctgcagccagggctgcatatgacaaggtcaggaaagccaagaagcaagcagcagagaggacccagaaacttgatgagaaaaggaagaaagtgaagcttgacctggaggcccgggagcggcaggcccaggcccaggagagtgaggaggaagaggagagccggagcaccaggacactagagcaagagatcgaacgcctgagagaagagggttcccggcagctggaggaacagcagaggctcatccgggagcagatacgccaggagcgtgaccagaggttgagaggaaaggcagaaaatactgaaggccaaggaacccccaaactaaagctaaaatggaagtgcaagaaggaggatgagtcaaaaggtggctactccaaagacgtcctcctacggcttttgcagaagtatggtgaggttctcaacctggtgctttccagtaagaagccaggcactgctgtggtggagtttgcaaccgtcaaggcagcggagctggctgtccagaatgaagttggcctggtggataaccctctgaagatttcctggttggagggacagccccaggatgccgtgggccgcagccactcaggactgtcaaagggctcagtgctgtcagagagggactacgagagcctcgtcatgatgcgcatgcgccaggcggccgagcggcaacagctgatcgcacggatgcagcaggaagaccaggaggggccgcctacgtagccccagctccagccatccacccctcagcccttttcttcaacgtcaccaataaattttttttttttttaagattttacctctatcccatacataggtataaggtgctgggctctgccgcagagcgctccacccaggcctggcgcccctcccaggaagtgggcagacccccagggaaacgctccgcagggtgagagtcccagagtccgtgcacaagcagagcacaggcgcagccactcatcacagccctttattggcttgggctagctatgcaggagccacgcgccagggccgctggagtgcccagctccggcccggggcagctgcccgaggaacatggcctacacaaggccctcggcccaggcccgaagcaggagggcagctgggagcaccagggcaccgggcactgccctctcccactgcttgacgcagggtttcagagaaggccattcactgccctttggggctgggcccatggcggtgatgatttgggaagagaggagcaaggcagacggtgaggcaggagcttggaggtcagggcccacagcagcccctccacaggggtgccccgtctgcaaatcagcatgagaaggtcactccttgtgcagacaccacaccagcgtctggcccacccccgtcatgctcagcacacggaagcccctgcgttccagcttgtccaggactatgcggggagggtcatcgacgtagtattcataactgcaaagagacaggatggggggggtgaggaggggcacacagcaagctcctggtacaaagctagtgtctgcagcaggcagcctggccactcttgtagtgactcacacttgctggctgcttgctgggcgctggggtaagtgcacgccccctgcctcctccccttctaggtacttcacgagctatctcatttattcttcccaacaagctagtgaaggtgccactgttgtggccattgatagatgagaaaacagaggggttaatcaggttccccagcgtcccagatggtagaccatgttagtctgaccacagccctgctgccgccctccctgggcttgctccccacccaggcttccaggtaggaggaggctgaggctgcagtgagccatgattgcaccaccgcactccagcctgggcgacagagactccatttcaaaaaaaaataagcctccaggcccctcactgccctggctgtcctgcagttctgtagcaacaaggctgagccccagtagctcctggctctgtgcgccactccctagcatggagagtgctggtagtccttctgtcaggtttaattgatgctgaaagaccatgaagcagacaaagggctcaagccccaagctgggcatggagaggcaagtgcctcatggcaaagggagggggctggcttctgtccccgagccttgacccaggggctgggatcagccctcctctttccccgatttgaactggcactcactctgacaactcttttcagagagcctgtgtagcttgggttctccctgcctccaggggtgagaggaggaatggaagcagtagtcacagtttagacatggaggcattaggaagaatgccaagggaaatggctaggtccccaggcagcagccaccctggaggtaggacgcaggctccctgctccctgcttctagggcttagctttgcgactcatgcagatcctcacgacaaaaacctttctctctgtgcctgtctgtccttgatggggtccagcttaggagagggcagggcaaggaacagtctgctagtggagtcctagacccagggaacggactctgtttctgcggttccagtaaggatgtggaaagctttcagagcaagcctcgtgggggagaggggggatgttggagaggctacagatgggaccaactcctccggagaacagagccccaggatgcaggcagggggctctgatgctgggccctgtccctgggcttggaggttgtataaagggagcagaggcaggtctaggggctggcagggagaggatactgagggaggctgctacttacaagttgtttcccaaggctcttctctttgaagcccccagatgctgcatcagctctggatccgactgttcatcgcccaccatagtggggcccacctcctgcaaggtaagccacagtggctgcttggctggctgccaggaggaggtggaaggtcttgcctgtccttcctcccctgcctgctagccctgagtaaggttcaggtaaaggctacagagagtagcaaggattcttaggggctgagcacaagctgtgaaggggtggagcccatcaatgatcaggaggagcaatgtaggcgccctccctagtgccttaaagctcagctttagccaggcaaagtatcacgagcctatagttccagctactgaggctgaggtgggaggatcgcttgaggtgggaggagtttgaggctgcagtgagccatgattgcaccactgcactccagcctgggtgacagagtgagactccatttcaaaaaaacaaaacaaaataaacatgtaaatgaaagaagccagactcagatcacattaccacagaaaggtaattagtggttatctagggctgagggacttgggggaaatcaagagtgtctgccagtgggtacagggtttccttttggggtattagaaatgttctaaaactgattatggtgatggttgcacaactctgagtacactaaagaaacaacaacactgaattgtacactttaaatcaaagaatttatggtatgcacattacatatcaataaagccatatcttttaagaaataagaa

SEQ ID NO: 127731 - DNA, 903 bp, Homo sapiens
  Payload ID: 5001
  Gene Symbol: DNAJC17
  Gene Name: DnaJ (Hsp40) homolog, subfamily C, member 17
  ENST ID: ENST00000560645
  CDS Start-End: 28-459
gtagtacgaatccgtcaggccggaaccatggcagtgaccaaggagctcttacagatggacctgtacgcgctgctaggcattgaggagaaggcagcggacaaagaggtaaagaaggcgtataggcagaaggccctctcctgccacccagacaaaaatccagataatcccagagcagctgaactcttccaccagctttctcaggccttggaggtgctgaccgatgctgcagccagggctgcatatgacaaggtcaggaaagccaagaagcaagcagcagagaggacccagaaacttgatgagaaaaggaagaaagtgaagcttggtaggtgccatcatagtgctcggtggcctgtggtttcctgtggtcattttcattcatctccctcacctgaagcttcacttccagcaactcatctcaaagccttttggctcaggctctgggcaaaacgctgttcttagagacctggaggcccgggagcggcaggcccaggcccaggagagtgaggaggaagaggagagccggagcaccaggacactagagcaagagatcgaacgcctgagagaagagggttcccggcagctggaggaacagcagaggctcatccgggagcagatacgccaggagcgtgaccagaggttgagaggaaaggcagaaaatactgaaggccaaggaacccccaaactaaagctaaaatggaagtgcaagaaggaggatgagtcaaaaggtggctactccaaagacgtcctcctacggcttttgcagaagtatggtgaggttctcaacctggtgctttccagtaagaagccaggcactgctgtggtggagtttgcaaccgtcaaggcagcggagctggctgtccagaatgaagttggcctggtggataaccctctgaagatttcctg

SEQ ID NO: 127732 - DNA, 880 bp, Homo sapiens
  Payload ID: 5001
  Gene Symbol: DNAJC17
  Gene Name: DnaJ (Hsp40) homolog, subfamily C, member 17
  ENST ID: ENST00000561018
  CDS Start-End: 28-423
gtagtacgaatccgtcaggccggaaccatggcagtgaccaaggagctcttacagatggacctgtacgcgctgctaggcattgaggagaaggcagcggacaaagaggtaaagaaggcgtataggcagaaggccctctcctgccacccagacaaaaatccagataatcccagagcagctgaactcttccaccagctttctcaggccttggaggtgctgaccgatgctgcagccagggctgcatatgacaaggtcaggaaagccaagaagcaagcagcagagaggacccagaaacttgatgagaaaaggaagaaagtgaagcttgacctggaggcccgggagcggcaggcccaggcccaggagagtgaggaggaagaggagagccggagcaccaggacactagagcaagaggttgctgagccctagcttgcaggtggaagctcccaaggactttttacaaggtgagccagcctggaattggacctgcacagaattgtcacccccaccccctgctctgcagatcgaacgcctgagagaagagggttcccggcagctggaggaacagcagaggctcatccgggagcagatacgccaggagcgtgaccagaggttgagaggaaaggcagaaaatactgaaggccaaggaacccccaaactaaagctaaaatggaagtgcaagaaggaggatgagtcaaaaggtggctactccaaagacgtcctcctacggcttttgcagaaggtcggccctgttgacgtccactctttcctatcatctcagtccacgtctcagtccacaccctagtatggtgaggttctcaacctggtgctttccagtaagaagccaggcactgctgtggtggagtttgcaaccgtcaaggcagcg

SEQ ID NO: 127733 - DNA, 1341 bp, Homo sapiens
  Payload ID: 5001
  Gene Symbol: DNAJC17
  Gene Name: DnaJ (Hsp40) homolog, subfamily C, member 17
  ENST ID: ENST00000559238
  CDS Start-End: 28-336
gtagtacgaatccgtcaggccggaaccatggcagtgaccaaggagctcttacagatggacctgtacgcgctgctaggcattgaggagaaggcagcggacaaagagataggttgccccagtttatatgcccaccaagaatgtgtagagtacctgtcttcgagtggctgtcgagaaagcggggtactgtgctcctgcctgttgcagcagcccctggacatctgcagtggtgaggttgagcacttagcaggaggtgggcccagctcctgtgctgggcgacagtggctcactccctccatggccttggcctcctccattgccagtctccctggtggctaggaagtgggcgccagcagcttctcttttaggtaaagaaggcgtataggcagaaggccctctcctgccacccagacaaaaatccagataatcccagagcaggtgagactcttctcagggcgtggggagaaagaaacccactcacccgggcattgtgtttcccgatgtaagctctgcatctgaactcttccaccagctttctcaggccttggaggtgctgaccgatgctgcagccagggctgcatatgacaaggtcaggaaagccaagaagcaagcagcagagaggacccagaaacttgatgagaaaaggaagaaagtgaagcttgacctggaggcccgggagcggcaggcccaggcccaggagagtgaggaggaagaggagagccggagcaccaggacactagagcaagagatcgaacgcctgagagaagagggttcccggcagctggaggaacagcagaggctcatccgggagcagatacgccaggagcgtgaccagaggttgagaggaaaggcagaaaatactgaaggccaaggaacccccaaactaaagctaaaatggaagtgcaagaaggaggatgagtcaaaaggtggctactccaaagacgtcctcctacggcttttgcagaagtatggtgaggttctcaacctggtgctttccagtaagaagccaggcactgctgtggtggagtttgcaaccgtcaaggcagcggagctggctgtccagaatgaagttggcctggtggataaccctctgaagatttcctggttggagggacagccccaggatgccgtgggccgcagccactcaggactgtcaaagggctcagtgctgtcagagagggactacgagagcctcgtcatgatgcgcatgcgccaggcggccgagcggcaacagctgatcgcacggatgcagcaggaagaccaggaggggccgcctacgtagccccagctccagccatccacccctcagcccttttcttcaacgtcaccaataaattttttttt

SEQ ID NO: 127734 - DNA, 792 bp, Homo sapiens
  Payload ID: 5001
  Gene Symbol: DNAJC17
  Gene Name: DnaJ (Hsp40) homolog, subfamily C, member 17
  ENST ID: ENST00000559310
  CDS Start-End: 12-407
aggccggaaccatggcagtgaccaaggagctcttacagatggacctgtacgcgctgctaggcattgaggagaaggcagcggacaaagaggtaaagaaggcgtataggcagaaggccctctcctgccacccagacaaaaatccagataatcccagagcagctgaactcttccaccagctttctcaggccttggaggtgctgaccgatgctgcagccagggctgcatatgacaaggtcaggaaagccaagaagcaagcagcagagaggacccagaaacttgatgagaaaaggaagaaagtgaagcttgacctggaggcccgggagcggcaggcccaggcccaggagagtgaggaggaagaggagagccggagcaccaggacactagagcaagaggttgctgagccctagcttgcaggtggaagctcccaaggactttttacaaggtgagccagcctggaattggacctgcacagaattgtcacccccaccccctgctctgcagatcgaacgcctgagagaagagggttcccggcagctggaggaacagcagaggctcatccgggagcagatacgccaggagcgtgaccagaggttgagaggaaaggcagaaaatactgaaggccaaggaacccccaaactaaagctaaaatggaagtgcaagaaggaggatgagtcaaaaggtggctactccaaagacgtcctcctacggcttttgcagaagtatggtgaggttctcaacctggtgctttccagtaagaagccaggcactgctgtggtggagtttgcaaccgtc

SEQ ID NO: 127735 - DNA, 704 bp, Homo sapiens
  Payload ID: 5001
  Gene Symbol: DNAJC17
  Gene Name: DnaJ (Hsp40) homolog, subfamily C, member 17
  ENST ID: ENST00000560065
  CDS Start-End: 7-384
ggaaccatggcagtgaccaaggagctcttacagatggacctgtacgcgctgctaggcattgaggagaaggcagcggacaaagaggtaaagaaggcgtataggcagaaggccctctcctgccacccagacaaaaatccagataatcccagagcagctgaactcttccaccagctttctcaggccttggaggtgctgaccgatgctgcagccagggctgcatatgacaaggtcaggaaagccaagaagcaagcagcagagaggacccagaaacttgatgagaaaaggaagaaagtgaagcttgatcgaacgcctgagagaagagggttcccggcagctggaggaacagcagaggctcatccgggagcagatacgccaggagcgtgaccagaggttgagaggaaaggcagaaaatactgaaggccaaggaacccccaaactaaagctaaaatggaagtgcaagaaggaggatgagtcaaaaggtggctactccaaagacgtcctcctacggcttttgcagaagtatggtgaggttctcaacctggtgctttccagtaagaagccaggcactgctgtggtggagtttgcaaccgtcaaggcagcggtgagtgctgcatgaggcttgggggcccctcgtggccctgtcattctagggcagggacccaattctgtgggccctctgagttaggtggtctgcactcctaggg

SEQ ID NO: 127736 - DNA, 428 bp, Homo sapiens
  Payload ID: 5001
  Gene Symbol: DNAJC17
  Gene Name: DnaJ (Hsp40) homolog, subfamily C, member 17
  ENST ID: ENST00000627802
  CDS Start-End: 33-428
gagttgtagtacgaatccgtcaggccggaaccatggcagtgaccaaggagctcttacagatggacctgtacgcgctgctaggcattgaggagaaggcagcggacaaagaggtaaagaaggcgtataggcagaaggccctctcctgccacccagacaaaaatccagataatcccagagcagctgaactcttccaccagctttctcaggccttggaggtgctgaccgatgctgcagccagggctgcatatgacaaggtcaggaaagccaagaagcaagcagcagagaggacccagaaacttgatgagaaaaggaagaaagtgaagcttgacctggaggcccgggagcggcaggcccaggcccaggagagtgaggaggaagaggagagccggagcaccaggacactagagcaagaggttgctgagccctag

SEQ ID NO: 127737 - DNA, 5103 bp, Homo sapiens
  Payload ID: 5002
  Gene Symbol: DNAJC18
  Gene Name: DnaJ (Hsp40) homolog, subfamily C, member 18
  Uniprot ID: Q9H819
  ENST ID: ENST00000302060
  CDS Start-End: 82-1158
cgtgccccgcgctccgcgcccccttctctttcagcctcgggcacgggggaggctcggcggacctgctgattgggaaccgatatggcggcgactctgggcagcggggagcgctggacggaagcttacattgacgcagttagaagaaacaaatacccagaagacacacctcctgagagtcatgacccctgtggctgctgtaactgcatgaaggcacaaaaggaaaagaagtctgagaatgagtggactcagacccggcagggtgaggggaactccacgtatagtgaggaacagctgcttggggtacaaaggatcaagaaatgcagaaattactatgaaattctgggagtttctcgagatgctagtgacgaagagcttaagaaagcttacagaaaactcgccctgaaatttcaccctgacaagaactgtgctcctggagcaacagatgctttcaaagcaataggaaatgcatttgcagtcctgagcaatcctgataagagacttcgctatgatgaatacggagatgaacaggtgactttcactgcccctcgagccagaccttataattattacagggattttgaagctgacatcactccagaagagctgttcaacgtcttctttggaggacattttcctacaggaaatattcatatgttttcaaatgtgacagatgacacttactattaccgtcgacggcaccgacatgagaggacacagactcagaaggaggaggaagaagagaaacctcagactacatattctgcatttattcagctacttccagttcttgtgattgtgattatatctgtcattactcagctgctggctactaatcccccatatagtctgttctataaatcgaccttgggctacaccatttctagagaaactcagaacctgcaggtgccttactttgtggataaaaactttgacaaggcctacagaggagcttctctgcatgacttggagaaaacaatagagaaggattacattgattatatccagactagttgttggaaggagaaacaacaaaagtcagagctgacaaatttggcaggattatacagagatgaacgattgaaacagaaagcagagtcgctgaaacttgaaaactgtgagaaactttccaaactcattggcctacgcagaggtggctgagaggataatggtcctacgcagggctggggttttgctacttgttcctatttatgttcctgattccattttataatacaaaactaggtaatgatgaacactttactatttgctaacttcgttggttgggcagagtggcaggagcatgggcacgagagccagatgtgtcttcacaggatccttcctggggagtggctccagggaccaggagtagttcatctaagttaaattaatggcaaggcattggattccgtctccctgctccatgcctaccctgcctatgtgaatggagttcagggcatcccagagcagatccatgctttcttccttcttcccttcttcagtgaagtcttaagaaccaggcattcctaggcttagccaaagcttaatattagttatttacactgtctaccaagaattatacctctcccttcattagagtcatcatctccgccaagatttagcctttggaacatgttcctgcccagctttccattttctaggggaatatggagaaatttaaactattgtagtcaatagttttctattattccaatctctgctcagttagtagcattagcaaactgcctaatttgagattcctttatttccttaaccctctctcctttagagagtccagaaattaaaactactgagcagcatctggaggcgggggccagggcgaaggtataatgcaagaccgagcctcatctcctccacgaagcctccctactccatcatagaacccagagaatgtcccttcggtcatttcccctcagtatcatcattggtgtcatcgcacttaggctgagttcctacatcccacagaggcagatggtcagacccaggaggaggcattgccagctctccaggctgtttgctcaagcctagagatagaggagacagatcctctctccttggatatgggggtctagctttggccccagcagccactttgtttaacccagtatcctatagtttgtgatttgagatgatttttcattcattcaacatttattgagtgcctactataaaagcaggggctctcacacatattttcttacttaaacctcctcacaactctgaagtagatgtattatccctggttctatgaatgagaacattggcccagagaggatgacccaggtcttgtagtggcagagcaagacggtaggctgagtgtcaagtagaaagtgggagagcatcctcatgtctcaggtgattctagccagactggcaaagcagaacctttcccgaggatgcctccgtcctccccaaccccatgacccctcatcttttctgtggcaatcttgcatctgttcaggacaacatccctgctgctctttaggaagcaggaccctgtctaacataaattctgtacacaaaataagaggtccctcacaggcaggcagccctccactggtgactaggaagaattcagtcactgcctgggctgtgtggttctgggccttcctgtggagctgagctgcctgaattatcatgactctgaacttggaaggatcattaagtgactgtagcctacactccatgcttccttcatattggaagaaaagtttctggtagagagtcggccgggtgcactggctcaagcctgtaatcccagcactttgggaggctgtggcaggtggatcacctgaggtcaggagttcaagaccagcctggccaacacagtgaaaccccatctctactaataatacaaaaattagccaggtgtggtggcacatgcctgtagtcccagctactcgggaggctgaggcatgagaatcgctgcaacttgcaaggtggaggttacagtgagctgaaatcacgccactgcactccactccatctcaaaaaaaaaaagagtctacattaaacagattccaaagtaaagtttcttcatcccaatgcatggccatgatttacacagacgtgcctagcatggctcatcaacatctgaacggttgttccctaccatgcctctgcaggcattccacagagtcaggagatgggttcacaggtaaagattgggggctttagtggcttgtaggggacaactgctcagttgcagggagagggagcatttctagaaatagccagattttgctgcccaactagatctgtcctcctggttttagggggcccttcttgatcccctctgagtgactgagggaggttacattgtaaaatatgtccatgagccaaacaggcttatggaaagttcttctacacacaaaaaaatcaaagctctcctctccccatccccaaccactgctagaaaattggccataatgaaactgacttgacaggttaaaagaccctgtcctagatgcccaggaatcaggtagtcacacattttatggacttcatggcagcgataagtaatctgtgatgatactaaatagaagcaataataactaactccattaaatgtcacgctgattgtctgtttttatagcaccgatggtactgttttatttattgccaatagaccacaacattcacatctgtttttcctcaagggaaccgtatttgcttttggttgaaggatttatctatttgatactatccagaatattgtgaagctataatttcctgggttatattttagatgggttgtctgcatggtggtaaaataagctttttcctctcgcctacgtcctttggaagatctcctgatcatacataactaggtagggcttattcttgctgccggagcttggcacccagctctagactgtttctttgagcattactgcagattggagacgtgtgtgagaggagcagcgctcagaaatagggcttgaggctcaagcagaaactgaagctctcattcaaatgaagatgctctctctaccgcacgatcggcagtgagaaaaggaggatgaaaatccttctcatcacaaagagcttgaaggaacccacgtccccagattagcaaccctagagttcatctgctcaggccgggaaatgtgtaagcttccttgatcagctccaggcctcacagcacgggagcagtgaccagtaaggaaacgtcactgctgtgctttctgttggaaattgttcgaaaatacagtgaactggccaggcccagtagctcatgcctgtaatcccagcactttgaaaggctgaggcaggcagatcatttgaggtcaggagttccagaccagcctggccaacatggtgaaaccctgtctgtactaaaaatacaaaaattaggcgggcatggtagcacgtgtctgtaatcccagctcctcaggaggctgaggcagaagaatctcttgagcctgggaggcagaggttgcagtaagctgagatcacatcattgcactccagcctgggtgacagagcaagactctgtctcaaaaaaaaaaaaagaaagaaaaaagaaaatacagtgaactccagatgccactggaacatgggttccagcagcctggccaagctatgtgtcattctttttcctcatgatacccaggatgggctttgtgaggaggcactgtgccgttccagtggctttctgttacagctggccacaccatacaagcaagtacatcatctgcatgcactgctcctcacaggagcttgcacttcattcatatttattctgccctcatttaaggtataagcttagtgtcctaatatatttatttttggaaagggccaagttacaaaacatcttttttttgaggctgcactgttgatatgtcatgcagtggccaccaagaaagtatatactcgtgttagatactgattacatcatttacatcacgctcagtatttggaattaaagatgtgaatgttctgtgaccagagtagggatgacacaaatggaatcagctcctggtggactaagaatcttgaaaaaatctggccacctcatccactacatctggattgagtgtactgcaacaaagaaaaacattaaacaattttatattaaaagaa

SEQ ID NO: 127738 - DNA, 571 bp, Homo sapiens
  Payload ID: 5002
  Gene Symbol: DNAJC18
  Gene Name: DnaJ (Hsp40) homolog, subfamily C, member 18
  ENST ID: ENST00000505568
  CDS Start-End: 57-191
ctctttcagcctcgggcacgggggaggctcggcggacctgctgattgggaaccgatatggcggcgactctgggcagcggggagcgctggacggaaggatcaagaaatgcagaaattactatgaaattctgggagtttctcgagatgctagtgacgaagagcttaagaaagcttacagaaaactcgccctgaaatttcaccctgacaagaactgtgctcctggagcaacagatgctttcaaagcaataggaaatgcatttgcagtcctgagcaatcctgataagagacttcgctatgatgaatacggagatgaacaggtgactttcactgcccctcgagccagaccttataattattacagggattttgaagctgacatcactccagaagagctgttcaacgtcttctttggaggacattttcctacaggaaatattcatatgttttcaaatgtgacagatgacacttactattaccgtcgacggcaccgacatgagaggacacagactcagaaggaggaggaagaagagaaacctcagactacatattctgcatttattcagctacttcca

SEQ ID NO: 127739 - DNA, 1046 bp, Homo sapiens
  Payload ID: 5002
  Gene Symbol: DNAJC18
  Gene Name: DnaJ (Hsp40) homolog, subfamily C, member 18
  ENST ID: ENST00000515581
  CDS Start-End: 503-1046
gttgttattctgcctgccatgggcactgagtacagctgctcatcatactggactaatcaggtcaaggacatggggcttcattctaagtaactcagctgtcatcttcattataaaaccacacattttcctctgactctgggcaatgacctgcgtatataagctgttagtcataagggctggatggggcagcatctcaatcatatagggcacaggacagacctcagtatcaccagcaagaatccattacagttcaacatgtagtacctccagaccttttccctgtgcccctggactccaaggtctatcccaccctcagctgtccatcttctagagcaggcggtctagcctccccaaaccagaagaacttcctttttatattcaaccacctgatggatgtccctgatcagttccctcagctgcagagcacaagaaggaccttcaggatccagctttctcctcgggcacgggggaggctcggcggacctgctgattgggaaccgatatggcggcgactctgggcagcggggagcgctggacggaagcttacattgacgcagttagaagaaacaaatacccagaagacacacctcctgagagtcatgacccctgtggctgctgtaactgcatgaaggcacaaaaggaaaagaagtctgagaatgagtggactcagacccggcagggtgaggggaactccacgtatagtgaggaacagctgcttggggtacaaaggatcaagaaatgcagaaattactatgaaattctgggagtttctcgagatgctagtgacgaagagcttaagaaagcttacagaaaactcgccctgaaatttcaccctgacaagaactgtgctcctggagcaacagatgctttcaaagcaataggaaatgcatttgcagtcctgagcaatcctgataagagacttcgctatgatgaatacggagatgaacaggtgactttcactgcccctcgagccagaccttataattattacagggattttgaagctgacatcactccagaagagctgttcaacgtcttctttggag

SEQ ID NO: 127740 - DNA, 432 bp, Homo sapiens
  Payload ID: 5002
  Gene Symbol: DNAJC18
  Gene Name: DnaJ (Hsp40) homolog, subfamily C, member 18
  ENST ID: ENST00000514052
  CDS Start-End: 1-365
agaggacacagactcagaaggaggaggaagaagagaaacctcagactacatattctgcatttattcagctacttccagttcttgtgattgtgattatatctgtcattactcagctgctggctactaatcccccatatagtctgttctataaatcgaccttgggctacaccatttctagagaaactcagaacctgcaggtgccttactttgtggataaaaactttgacaaggcctacagaggagcttctctgcatgacttggagaaaacaatagagaaggattacattgattatatccagactagttgttggaaggagaaacaacaaagaggtacccttttaactgaagttttggctcatgtttaaaaagcaaattctgactcatttctaaagccttattactgagtatcattaaatacctaatggagtctga

SEQ ID NO: 127741 - DNA, 832 bp, Homo sapiens
  Payload ID: 5002
  Gene Symbol: DNAJC18
  Gene Name: DnaJ (Hsp40) homolog, subfamily C, member 18
  ENST ID: ENST00000515277
  CDS Start-End: 314-832
gtttgtgctgttgttattctgcctgccatgggcactgagtacagctgctcatcatactggactaatcaggtcaaggacatggggcttcattctaagtaactcagctgtcatcttcattataaaaccacacattttcctctgactctgggcaatgacctgcgtatataagctgttagtcataagggctggatggggcagcatctcaatcatatagggcacaggacagacctcagtatcaccagcaagaatccattacagttcaacatcctcgggcacgggggaggctcggcggacctgctgattgggaaccgatatggcggcgactctgggcagcggggagcgctggacggaagcttacattgacgcagttagaagaaacaaatacccagaagacacacctcctgagagtcatgacccctgtggctgctgtaactgcatgaaggcacaaaaggaaaagaagtctgagaatgagtggactcagacccggcagggtgaggggaactccacgtatagtgaggaacagctgcttggggtacaaaggatcaagaaatgcagaaattactatgaaattctgggagtttctcgagatgctagtgacgaagagcttaagaaagcttacagaaaactcgccctgaaatttcaccctgacaagaactgtgctcctggagcaacagatgctttcaaagcaataggaaatgcatttgcagtcctgagcaatcctgataagagacttcgctatgatgaatacggagatgaacaggtgactttcactgcccctcgagccagaccttataattattacagggattttgaagctgacatcactccagaa

SEQ ID NO: 127742 - DNA, 652 bp, Homo sapiens
  Payload ID: 5002
  Gene Symbol: DNAJC18
  Gene Name: DnaJ (Hsp40) homolog, subfamily C, member 18
  ENST ID: ENST00000508445
  CDS Start-End: 1-534
gctgacatcactccagaagagctgttcaacgtcttctttggaggacattttcctacaggaaatattcatatgttttcaaatgtgacagatgacacttactattaccgtcgacggcaccgacatgagaggacacagactcagaaggaggaggaagaagagaaacctcagactacatattctgcatttattcagctacttccagttcttgtgattgtgattatatctgtcattactcagctgctggctactaatcccccatatagtctgttctataaatcgaccttgggctacaccatttctagagaaactcagaacctgcaggtgccttactttgtggataaaaactttgacaaggcctacagaggagcttctctgcatgacttggagaaaacaatagagaaggattacattgattatatccagactagttgttggaaggagaaacaacaaaggttctggcacagtccttgcttcagaacaagtgctcaacaaatgtcttttgaagagaggattctcaggagtagaaaacaatgaaaatgctgaggattgtgaataacaacagcaggagtcagagctgacaaatttggcaggattatacagagatgaacgattgaaacagaaagcagagtcgctgaaacttgaaaactgtgag

SEQ ID NO: 127743 - DNA, 579 bp, Homo sapiens
  Payload ID: 5002
  Gene Symbol: DNAJC18
  Gene Name: DnaJ (Hsp40) homolog, subfamily C, member 18
  ENST ID: ENST00000512473
  CDS Start-End: 504-579
gttattctgcctgccatgggcactgagtacagctgctcatcatactggactaatcaggtcaaggacatggggcttcattctaagtaactcagctgtcatcttcattataaaaccacacattttcctctgactctgggcaatgacctgcgtatataagctgttagtcataagggctggatggggcagcatctcaatcatatagggcacaggacagacctcagtatcaccagcaagaatccattacagttcaacatgtaagtagtacctccagaccttttccctgtgcccctggactccaaggtctatcccaccctcagctgtccatcttctagagcaggcggtctagcctccccaaaccagaagaacttcctttttatattcaaccacctgatggatgtccctgatcagttccctcagctgcagagcacaagaaggaccttcaggatccagctttctcctcgggcacgggggaggctcggcggacctgctgattgggaaccgatatggcggcgactctgggcagcggggagcgctggacggaagcttacattgacgcagttagaagaaacaaatacccag

SEQ ID NO: 127744 - DNA, 537 bp, Homo sapiens
  Payload ID: 5002
  Gene Symbol: DNAJC18
  Gene Name: DnaJ (Hsp40) homolog, subfamily C, member 18
  ENST ID: ENST00000506870
  CDS Start-End: 15-278
gattgggaaccgatatggcggcgactctgggcagcggggagcgctggacggaagcttacattgacgcagttagaagaaacaaatacccagaagacacacctcctgagagtcatgacccctgtggctgctgtaactgcatgaaggcacaaaaggaaaagaagtctgagaatgagtggactcagacccggcagggtgaggggaactccacgtatagtgaggaacagctgcttggggtacaaagcaataggaaatgcatttgcagtcctgagcaatcctgataagagacttcgctatgatgaatacggagatgaacaggtgactttcactgcccctcgagccagaccttataattattacagggattttgaagctgacatcactccagaagagctgttcaacgtcttctttggaggacattttcctacaggaaatattcatatgttttcaaatgtgacagatgacacttactattaccgtcgacggcaccgacatgagaggacacagactcagaaggaggaggaagaagagaaacctcag

SEQ ID NO: 127745 - DNA, 451 bp, Homo sapiens
  Payload ID: 5002
  Gene Symbol: DNAJC18
  Gene Name: DnaJ (Hsp40) homolog, subfamily C, member 18
  ENST ID: ENST00000515559
  CDS Start-End: 1-92
gagatgaacgattgaaacagaaagcagagtcgctgaaacttgaaaactgtgagaaactttccaaactcattggcctacgcagaggtggctgagaggataatggtcctacgcagggctggggttttgctacttgttcctatttatgttcctgattccattttataatacaaaactagaatgtggcaaaactggcagcttccatttttgtacttggagggaagccagctaccatgtaaattcaactacctgagaccactacactaaccaaaggagaagccatgcagaagagaacccagcaaccaagctgacagcaagaactgaggacccaaacacataattcaagttgagccatttgtgttaccccagatgatgggcagagcagaaatgtgctgccccaccaagtcctgctcagtctgcagaattgtgagcaaataataaaatgattgcagcc

SEQ ID NO: 127746 - DNA, 1453 bp, Homo sapiens
  Payload ID: 5003
  Gene Symbol: DNAJC19
  Gene Name: DnaJ (Hsp40) homolog, subfamily C, member 19
  Uniprot ID: Q96DA6
  ENST ID: ENST00000382564
  CDS Start-End: 172-522
cgacagttttccggcctagtttgcggctgctcctgccgtgttgcgtagggcgcctgtgcttgaggttgggggttgcgtcgctctctggtaaaggcgtgcaggtgttggccgcggcctctgagctgggatgagccgtgctcccggtggaagcaagggagcccagccggagccatggccagtacagtggtagcagttggactgaccattgctgctgcaggatttgcaggccgttacgttttgcaagccatgaagcatatggagcctcaagtaaaacaagtttttcaaagcctaccaaaatctgccttcagtggtggctattatagaggtgggtttgaacccaaaatgacaaaacgggaagcagcattaatactaggtgtaagccctactgccaataaagggaaaataagagatgctcatcgacgaattatgcttttaaatcatcctgacaaaggaggatctccttatatagcagccaaaatcaatgaagctaaagatttactagaaggtcaagctaaaaaatgaagtaaatgtatgatgaattttaagttcgtattagtttatgtatatgagtactaagtttttataataaaatgcctcagagctacaattttaaaaaatgatttagcacaagctaaatctcaaagccttggtataattttcttgtttaaatttggggattttaaatcagattatagtttagaatatttgcgtattaattatgggcaagcacacaccttctgaatagaaatattgttcattactcatttagcagataatttgggacctatgtctacttttcaaggcaaagtgaagatgacagtccttgctctcagggagcccccactttaatgggagactgataaactggtaattagactgtgataaatagtatgatggaaattagcttaagctgtttaagtagggactcttcttattcggtggaaaggctgttccaggtacaggcaactggcctggcaacttggatacttggaaccttgtatttaaaagtgaatttaaccacaactgagacctaagaaattgacctaggggtgtgtgtgtgtgtgtattctatgtacatataaaccatttttatttcatgcattaaaaatagtatgataaagatttcagagtacaggtctggtacaatcacagttcattgcagcctcaacctcctgggtttaagcagtcctcccgcctcagcctcccaaagtactgggattacaggcatgagtatttacattgtattcagctagccccttaaaggtaatgaccatttataaattattccttcagttggctatttcttgacataatcaaacttctgcaattgttatgattaagcttaaaccctgttagcaaaactgaaaactgaaatgttctcaatatcaacatatttaatttggactctttagaatttatacactaataaatttaaatgatgtttaaaggcaaa

SEQ ID NO: 127747 - DNA, 1239 bp, Homo sapiens
  Payload ID: 5003
  Gene Symbol: DNAJC19
  Gene Name: DnaJ (Hsp40) homolog, subfamily C, member 19
  ENST ID: ENST00000469657
  CDS Start-End: 102-245
ggttgcgtcgctctctggtaaaggcgtgcaggtgttggccgcggcctctgagctgggatgagccgtgctcccggtggaagcaagggagcccagccggagccatggccagtacagtggtagcagttggactgaccattgctgctgcaggatttgcaggccgttacgttttgcaagccatgaagcatatggagcctcaagtaaaacaagtttttcaaagcctaccaaaatctccctactgccaataaagggaaaataagagatgctcatcgacgaattatgcttttaaatcatcctgacaaaggaggatctccttatatagcagccaaaatcaatgaagctaaagatttactagaaggtcaagctaaaaaatgaagtaaatgtatgatgaattttaagttcgtattagtttatgtatatgagtactaagtttttataataaaatgcctcagagctacaattttaaaaaatgatttagcacaagctaaatctcaaagccttggtataattttcttgtttaaatttggggattttaaatcagattatagtttagaatatttgcgtattaattatgggcaagcacacaccttctgaatagaaatattgttcattactcatttagcagataatttgggacctatgtctacttttcaaggcaaagtgaagatgacagtccttgctctcagggagcccccactttaatgggagactgataaactggtaattagactgtgataaatagtatgatggaaattagcttaagctgtttaagtagggactcttcttattcggtggaaaggctgttccaggtacaggcaactggcctggcaacttggatacttggaaccttgtatttaaaagtgaatttaaccacaactgagacctaagaaattgacctaggggtgtgtgtgtgtgtgtattctatgtacatataaaccatttttatttcatgcattaaaaatagtatgataaagatttcagagtacaggtctggtacaatcacagttcattgcagcctcaacctcctgggtttaagcagtcctcccgcctcagcctcccaaagtactgggattacaggcatgagtatttacattgtattcagctagccccttaaaggtaatgaccatttataaattattccttcagttggctatttcttgacataatcaaacttctgcaattgttatgattaagcttaaaccctgttagcaaaactgaaaactgaaatgttctcaatatcaa

SEQ ID NO: 127748 - DNA, 610 bp, Homo sapiens
  Payload ID: 5003
  Gene Symbol: DNAJC19
  Gene Name: DnaJ (Hsp40) homolog, subfamily C, member 19
  Uniprot ID: Q96DA6
  ENST ID: ENST00000479269
  CDS Start-End: 260-535
aagttgtgctccttagtgcgactgcgggcgggaggtttcggttattggggagtcacactcaccaggacacaaccctgttggctcgctctcttgggggtttgtgtttttacatcgtctttctgcacggttctccagcttcttgtccgcacgggctctgcaggtgttgcttgcctggaactcctgtaaggccagtacagtggtagcagttggactgaccattgctgctgcaggatttgcaggccgttacgttttgcaagccatgaagcatatggagcctcaagtaaaacaagtttttcaaagcctaccaaaatctgccttcagtggtggctattatagaggtgggtttgaacccaaaatgacaaaacgggaagcagcattaatactaggtgtaagccctactgccaataaagggaaaataagagatgctcatcgacgaattatgcttttaaatcatcctgacaaaggaggatctccttatatagcagccaaaatcaatgaagctaaagatttactagaaggtcaagctaaaaaatgaagtaaatgtatgatgaattttaagttcgtattagtttatgtatatgagtactaagtttttataataaaatgcctc

SEQ ID NO: 127749 - DNA, 828 bp, Homo sapiens
  Payload ID: 5003
  Gene Symbol: DNAJC19
  Gene Name: DnaJ (Hsp40) homolog, subfamily C, member 19
  ENST ID: ENST00000486355
  CDS Start-End: 168-347
agttttccggcctagtttgcggctgctcctgccgtgttgcgtagggcgcctgtgcttgaggttgggggttgcgtcgctctctggtaaaggcgtgcaggtgttggccgcggcctctgagctgggatgagccgtgctcccggtggaagcaagggagcccagccggagccatggccagtacagtggtagcagttggactgaccattgctgctgcaggatttgcaggccgttacgttttgcaagccatgaagcatatggagcctcaagtaaaacaagtttttcaaagcctaccaaaatctgccttcagtggtggctattatagagccctactgccaataaagggaaaataagagatgctcatcgacgaattatgcttttaaatcatcctgacaaaggaggatctccttatatagcagccaaaatcaatgaagctaaagatttactagaaggtcaagctaaaaaatgaagtaaatgtatgatgaattttaagttcgtattagtttatgtatatgagtactaagtttttataataaaatgcctcagagctacaattttaaaaaatgatttagcacaagctaaatctcaaagccttggtataattttcttgtttaaatttggggattttaaatcagattatagtttagaatatttgcgtattaattatgggcaagcacacaccttctgaatagaaatattgttcattactcatttagcagataatttgggacctatgtctacttttcaaggcaaagtgaagatgacagtccttgctctcagggagcccccactttaatgggagactgataaactggtaattagactgtgataaat

SEQ ID NO: 127750 - DNA, 769 bp, Homo sapiens
  Payload ID: 5003
  Gene Symbol: DNAJC19
  Gene Name: DnaJ (Hsp40) homolog, subfamily C, member 19
  Uniprot ID: Q96DA6
  ENST ID: ENST00000491873
  CDS Start-End: 132-407
ggttgggggttgcgtcgctctctggtaaaggcgtgcaggtgttggccgcggcctctgagctgggatgagccgtgctcccggtggaagcaagggagcccagccggagccatggccgttacgttttgcaagccatgaagcatatggagcctcaagtaaaacaagtttttcaaagcctaccaaaatctgccttcagtggtggctattatagaggtgggtttgaacccaaaatgacaaaacgggaagcagcattaatactaggtgtaagccctactgccaataaagggaaaataagagatgctcatcgacgaattatgcttttaaatcatcctgacaaaggaggatctccttatatagcagccaaaatcaatgaagctaaagatttactagaaggtcaagctaaaaaatgaagtaaatgtatgatgaattttaagttcgtattagtttatgtatatgagtactaagtttttataataaaatgcctcagagctacaattttaaaaaatgatttagcacaagctaaatctcaaagccttggtataattttcttgtttaaatttggggattttaaatcagattatagtttagaatatttgcgtattaattatgggcaagcacacaccttctgaatagaaatattgttcattactcatttagcagataatttgggacctatgtctacttttcaaggcaaagtgaagatgacagtccttgctctcagggagcccccactttaatgggagactgataaactggtaattagactgtgata

SEQ ID NO: 127751 - DNA, 1846 bp, Homo sapiens
  Payload ID: 5004
  Gene Symbol: DNAJC2
  Gene Name: DnaJ (Hsp40) homolog, subfamily C, member 2
  Uniprot ID: Q99543
  ENST ID: ENST00000249270
  CDS Start-End: 45-1751
gggacgtgagccgctgcgcccaccgggctagacccggcgccatcatgctgcttctgccaagcgccgcggacggccggggcaccgccatcacccacgctctgacctctgcctctacactctgtcaagttgaacctgtgggaagatggtttgaagcttttgttaagaggagaaacagaaatgcttctgcctcttttcaggaactggaggataagaaagagttatccgaggaatcagaagatgaagaattgcagttggaagagtttcccatgctgaaaacacttgatcccaaagactggaagaaccaagatcattatgcagttcttggacttggccatgtgagatacaaggctacacagagacagatcaaagcagctcataaagcaatggttttaaaacatcacccagacaaacggaaagcagctggtgaaccaataaaagaaggagataatgactacttcacttgcataactaaagcttatgaaatgttatctgatccagtgaaaagacgagcatttaacagtgtagatcctacttttgataactcagttccttctaaaagtgaagcaaaggataatttcttcgaagtgtttaccccagtgtttgaaaggaattccagatggtcaaataaaaaaaatgttcctaaacttggtgatatgaattcatcatttgaagatgtagatatattttattctttctggtataattttgattcttggagagaattttcttatttagatgaagaagaaaaagaaaaagcagaatgtcgtgatgagaggagatggattgaaaagcagaacagagcaacaagagcacaaagaaaaaaagaagaaatgaacagaataagaacattagttgacaatgcatacagctgtgatccaaggataaaaaagttcaaggaagaagaaaaagccaagaaagaagcagaaaagaaagcaaaagcagaagctaaacggaaggagcaagaagctaaagaaaaacaaagacaagctgaattagaagctgctcggttagctaaggagaaagaagaggaggaagtcagacagcaagcattgctggcaaagaaggaaaaagatatccagaaaaaagccattaagaaggaaaggcaaaaacttcgaaactcatgcaagatagaagaaataaatgagcaaatcagaaaagagaaagaggaagctgaggctcgtatgcgacaagcatctaagaacacagagaaatcaactggtggaggtggaaatggaagtaaaaattggtcagaagatgatctacaattactaattaaagctgtgaatctgttccctgctggaacaaattcaagatgggaagttattgctaattacatgaacatacattcttcctctggagtcaaaagaactgccaaagatgttattggcaaagcaaagagtctccaaaaacttgaccctcatcaaaaagatgacataaataaaaaggcatttgataagttcaaaaaagaacatggagtggtacctcaagcagacaacgcaacgccttcagaacgatttgaaggtccatatacagacttcaccccttggacaacagaagaacagaagcttttggaacaagctttgaaaacatacccagtaaatacacctgaaagatgggaaaaaatagcagaagcggtgcctggcaggacaaagaaggactgcatgaaacgatacaaggaacttgtcgagatggtaaaagcaaagaaagctgctcaagaacaagtgctgaatgcaagtagagccaagaaatgacaatctttgttgtgtgtgcatttttataataaaactgaaaatactgtaaacattttcattcttaaaattatactcatggtaataatttgaaagta

SEQ ID NO: 127752 - DNA, 942 bp, Homo sapiens
  Payload ID: 5004
  Gene Symbol: DNAJC2
  Gene Name: DnaJ (Hsp40) homolog, subfamily C, member 2
  ENST ID: ENST00000379257
  CDS Start-End: 177-680
acaccacgaaagatccatcccggaagtgcttactggtcgtctccatgcgccggttcctgggcgtcttagagccaaggcgcgaggctcggagtgagaggtagagctggaggggaccctaagcgccctccgcccgggacgtgagccgctgcgcccaccgggctagacccggcgccatcatgctgcttctgccaagcgccgcggacggccggggcaccgccatcacccacgctctgacctctgcctctacactctgtcaagttgaacctgtgggaagatggtttgaagcttttgttaagaggagaaacagaaatgcttctgcctcttttcaggaactggaggataagaaagagttatccgaggaatcagaagatgaagaattgcagttggaagagtttcccatgctgaaaacacttgatcccaaagactggaagaaccaagatcattatgcagttcttggacttggccatgtgagatacaaggctacacagagacagatcaaagcagctcataaagcaatggttttaaaacatcacccagacaaacggaaagcagctggtgaaccaataaaagaaggagataatgactacttcacttgcataactaaaggatccccaggtgattcttatcagaagctcatcctacagttaattcatcttatgaaatgttatctgatccagtgaaaagacgagcatttaacagtgtagatcctacttttgataactcagttccttctaaaagtgaagcaaaggataatttcttcgaagtgtttaccccagtgtttgaaaggaattccagatggtcaaataaaaaaaatgttcctaaacttggtgatatgaattcatcatttgaagatgtagatatattttattctttctggtataattttgattcttggagagaattttcttatttagatgaagaagaaaaagaaaaagcagaatg

SEQ ID NO: 127753 - DNA, 2167 bp, Homo sapiens
  Payload ID: 5004
  Gene Symbol: DNAJC2
  Gene Name: DnaJ (Hsp40) homolog, subfamily C, member 2
  Uniprot ID: Q99543
  ENST ID: ENST00000379263
  CDS Start-End: 252-2117
agccggatctcagtcagtatagaactaggttaccgcacacgttggcgggggtgggagggtgtgagactggcctccacaccacgaaagatccatcccggaagtgcttactggtcgtctccatgcgccggttcctgggcgtcttagagccaaggcgcgaggctcggagtgagaggtagagctggaggggaccctaagcgccctccgcccgggacgtgagccgctgcgcccaccgggctagacccggcgccatcatgctgcttctgccaagcgccgcggacggccggggcaccgccatcacccacgctctgacctctgcctctacactctgtcaagttgaacctgtgggaagatggtttgaagcttttgttaagaggagaaacagaaatgcttctgcctcttttcaggaactggaggataagaaagagttatccgaggaatcagaagatgaagaattgcagttggaagagtttcccatgctgaaaacacttgatcccaaagactggaagaaccaagatcattatgcagttcttggacttggccatgtgagatacaaggctacacagagacagatcaaagcagctcataaagcaatggttttaaaacatcacccagacaaacggaaagcagctggtgaaccaataaaagaaggagataatgactacttcacttgcataactaaagcttatgaaatgttatctgatccagtgaaaagacgagcatttaacagtgtagatcctacttttgataactcagttccttctaaaagtgaagcaaaggataatttcttcgaagtgtttaccccagtgtttgaaaggaattccagatggtcaaataaaaaaaatgttcctaaacttggtgatatgaattcatcatttgaagatgtagatatattttattctttctggtataattttgattcttggagagaattttcttatttagatgaagaagaaaaagaaaaagcagaatgtcgtgatgagaggagatggattgaaaagcagaacagagcaacaagagcacaaagaaaaaaagaagaaatgaacagaataagaacattagttgacaatgcatacagctgtgatccaaggataaaaaagttcaaggaagaagaaaaagccaagaaagaagcagaaaagaaagcaaaagcagaagctaaacggaaggagcaagaagctaaagaaaaacaaagacaagctgaattagaagctgctcggttagctaaggagaaagaagaggaggaagtcagacagcaagcattgctggcaaagaaggaaaaagatatccagaaaaaagccattaagaaggaaaggcaaaaacttcgaaactcatgcaagacctggaatcatttttctgataatgaggcagagcgggttaaaatgatggaagaagtggaaaaactttgtgatcggcttgaactggcaagcttacagtgcttgaatgaaacactcacatcatgcacaaaagaagtaggaaaggctgctttggaaaaacagatagaagaaataaatgagcaaatcagaaaagagaaagaggaagctgaggctcgtatgcgacaagcatctaagaacacagagaaatcaactggtggaggtggaaatggaagtaaaaattggtcagaagatgatctacaattactaattaaagctgtgaatctgttccctgctggaacaaattcaagatgggaagttattgctaattacatgaacatacattcttcctctggagtcaaaagaactgccaaagatgttattggcaaagcaaagagtctccaaaaacttgaccctcatcaaaaagatgacataaataaaaaggcatttgataagttcaaaaaagaacatggagtggtacctcaagcagacaacgcaacgccttcagaacgatttgaaggtccatatacagacttcaccccttggacaacagaagaacagaagcttttggaacaagctttgaaaacatacccagtaaatacacctgaaagatgggaaaaaatagcagaagcggtgcctggcaggacaaagaaggactgcatgaaacgatacaaggaacttgtcgagatggtaaaagcaaagaaagctgctcaagaacaagtgctgaatgcaagtagagccaagaaatgacaatctttgttgtgtgtgcatttttataataaaactgaaaatactgtaaa

SEQ ID NO: 127754 - DNA, 854 bp, Homo sapiens
  Payload ID: 5004
  Gene Symbol: DNAJC2
  Gene Name: DnaJ (Hsp40) homolog, subfamily C, member 2
  ENST ID: ENST00000454277
  CDS Start-End: 290-854
cggaagtgcttactggtcgtctccatgcgccggttcctgggcgtcttagagccaaggcgcgaggctcggagtgagaggtagagctggaggggaccctaagcgccctccgcccgggacgtgagccgctgcgcccaccgggctagacccggcgccatcatgctgcttctgccaagcgccgcggacggccggggcaccgccatcacccacgctctgacctctggaactggaggataagaaagagttatccgaggaatcagaagatgaagaattgcagttggaagagtttcccatgctgaaaacacttgatcccaaagactggaagaaccaagatcattatgcagttcttggacttggccatgtgagatacaaggctacacagagacagatcaaagcagctcataaagcaatggttttaaaacatcacccagacaaacggaaagcagctggtgaaccaataaaagaaggagataatgactacttcacttgcataactaaagcttatgaaatgttatctgatccagtgaaaagacgagcatttaacagtgtagatcctacttttgataactcagttccttctaaaagtgaagcaaaggataatttcttcgaagtgtttaccccagtgtttgaaaggaattccagatggtcaaataaaaaaaatgttcctaaacttggtgatatgaattcatcatttgaagatgtagatatattttattctttctggtataattttgattcttggagagaattttcttatttagatgaagaagaaaaagaaaaagcagaatgtcgtgatgagaggagatggattgaaaagcagaacagagcaacaagagcacaaagaaaaaaagaagaaa

SEQ ID NO: 127755 - DNA, 3033 bp, Homo sapiens
  Payload ID: 5004
  Gene Symbol: DNAJC2
  Gene Name: DnaJ (Hsp40) homolog, subfamily C, member 2
  ENST ID: ENST00000412522
  CDS Start-End: 209-565
ggcgggggtgggagggtgtgagactggcctccacaccacgaaagatccatcccggaagtgcttactggtcgtctccatgcgccggttcctgggcgtcttagagccaaggcgcgaggctcggagtgagaggtagagctggaggggaccctaagcgccctccgcccgggacgtgagccgctgcgcccaccgggctagacccggcgccatcatgctgcttctgccaagcgccgcggacggccggggcaccgccatcacccacgctctgacctctgcctctacactctgtcaagttgaacctgtgggaagatggtttgaagcttttgttaagaggagaaacagaaatgcttctgcctcttttcaggaactggaggataagaaagagttatccgaggaatcagaagatgaagaattgcagttggaagagtttcccatgctgaaaacacttgatcccaaagactggaagaaccaagatcattatgcagttcttggacttggccatgtgagatacaaggctacacagagacagatcaaagcagctcgtaagtacttagttattttgaaataatcaaatatcttgtataggaacaggctggctatgctttttaaaagatatacagtatcatagtctgcagccataactacatttaacagcatgtgttatattgtcataacaagcaaaaaaccacggtctcccctgccttcagaatcagaagaaagcaatccattttacatatagactttcccattagggataagaaattaggatgggtgtgtgtgtgtggatacaaaatactcctccaatggcaagcttttaaaaaataatacttcacctctctttagaagtatagcagctgcacttagtggatactgcctttttattgttttttggtttttggttttttttttacgttattttgtaatcttaggtcacacctttgtagatatcaccctgtcttctgtccaagaaaagttgtctgatgttttattgttgttttcattgacaaggttataatttggcatgggagagggtaatgttgggaccccagtcttcatatgccttataaaacaccatcccttaatgctcctaaatgtcctatgctttgcaatcctgtggacataatttcttatacacgtgatcagttcaactgattaataaagtttagtgaaagaggtaagaggtgaaggtgatcagttttctatcttaggagaatgttctgccctccactctagagaatggatattgaggtcagagagggtaagattgtggccacatggaaaaggagcagggagtcagggcctgtcaagaagaggaagtattatatgtggaggaagatgactgaataagaatgcctgtggtaaaaattattagtcaatacttagcatagtagatgaactcaaaatcgtccccattactgcttacatttaggaaaatcacaggaaatattttttaacaaagtgaaggaatttatcagattattttaaactggatttgtttaaaggctggcatgagtctagacaaagcatatggtaatgcatgtgaatagttattccagtataaataaatgccagaaaagtccatttgccacgtacaagtgtttgcaaagttttactatacgaaagaatagcattggccgggcgtggtggctcacgcctataatcccaacactttgggaggccgagacgggttgatcacctgaggtgaggaatatgagaccagcctggccaacgtggagaaacaccgtctctactaaaaatacaaaaaaattagctgggtgtggtggtgggcacctgtattcccagctacttgggaggctgaggcaggagaattgcttgaacccaggaggcagaggttgcagtgagccgaggtcgcaccattgcgctccagcctgggcaacaagagcgacactctgtttccgaaaaaatagaatagcatacaaataccaaatatgtcttagtacagataaatttgttaattagaattgataatagaactgtgagaatagtttgtgttttaaggtgaaagaattctttctcagaagattaaaaatgtgcaataaattgtaaaagaagcattcatatgcttctgttaaatccactgtctttttttgagacagaatttcgtacttgttgcgcaggctggagtgcaatggcaccatcttggctcaccacaacctccgcctcccaggttcaagcgattctcctgcctcagcctcttgagtagctgggattagaggcatgtgccaccacgcccggctaattttgtatttttcatagagacgggatttcaccatgttggtcaggctggtctcgaactcccgacctcaggtgatccacccacatcggcctcccagaatgctgggattacaggcgtgagccaccgcacccagcctaaatccactctttttattggccttgtagaaattgatttttagccaggcacagtgggtcacacctgtaatcccaacactttggaagaccaaggcaggcagattacttgaggctggagttcaatactagcccggccaatgtggtgaaaccccatctctactaaaaatacaaaaattagccaggtgcggtggcgcatgcctgtaagcccaactacttgggaggctgaggcatgagaatcgcttgaacctgggaggcggaagttgcagtgagcgaagattgtaccactgcagtccaacctgagcaacagagtgagagagtgagactctgtctcattaaaaaaaaaaaaaagaaagaaagaaagaaaagaaattcagcttttgaatatgtattctctagccaaaaattttgcagcaccagtgtagagattgttaacaataagggtaattctaacttactctctaccacccttgtggaatattccgtcagtctttatttagaaagaaactgtcattctctcacctctgtcactgtaaaacacagttgctactcattgctttctgaaaatctatctaaaagttaaaatgcaaagttactgtttgcaaatctataattattagcacaaacctaataaaaatgtaaatctgg

SEQ ID NO: 127756 - DNA, 729 bp, Homo sapiens
  Payload ID: 5004
  Gene Symbol: DNAJC2
  Gene Name: DnaJ (Hsp40) homolog, subfamily C, member 2
  ENST ID: ENST00000426036
  CDS Start-End: 1-729
gcaccgccatcacccacgctctgacctctgcctctacactctgtcaagttgaacctgtgggaagatggtttgaagcttttgttaagaggagaaacagaaatgcttctgcctcttttcaggaactggaggataagaaagagttatccgaggaatcagaagatgaagaattgcagttggaagagtttcccatgctgaaaacacttgatcccaaagactggaagaaccaagatcattatgcagttcttggacttggccatgtgagatacaaggctacacagagacagatcaaagcagctcataaagcaatggttttaaaacatcacccagacaaacggaaagcagctggtgaaccaataaaagaaggagataatgactacttcacttgcataactaaagcttatgaaatgttatctgatccagtgaaaagacgagcatttaacagtgtagatcctacttttgataactcagttccttctaaaagtgaagcaaaggataatttcttcgaagtgtttaccccagtgtttgaaaggaattccaggtataattttgattcttggagagaattttcttatttagatgaagaagaaaaagaaaaagcagaatgtcgtgatgagaggagatggattgaaaagcagaacagagcaacaagagcacaaagaaaaaaagaagaaatgaacagaataagaacattagttgacaatgcatacagctgtgatccaaggataaaaa

SEQ ID NO: 127757 - DNA, 2309 bp, Homo sapiens
  Payload ID: 5005
  Gene Symbol: DNAJC21
  Gene Name: DnaJ (Hsp40) homolog, subfamily C, member 21
  Uniprot ID: Q5F1R6
  ENST ID: ENST00000342382
  CDS Start-End: 228-1823
gcgctcccgcttgccgcagcctgcgtcgtctgccgccaccgcgcgccttcactgacctacaccaccgccgccgccgccgccgccgccgggctcgctggctggcccggtgcgggcggcggactcccgccggagaggactgccagcgccgccgccgccgccgcttcggcccgggcccgggccccgaccccgtcccgggccccagcgccggccgcccgcccggtcgggcgatgaagtgtcactatgaggcgctgggggtgcggcgcgacgccagcgaggaggagctcaagaaggcctatcggaagctggccctgaaatggcacccggataaaaatctggataatgccgcagaagcagctgaacaatttaaattaatccaagcagcatatgatgtgttgagtgaccctcaggaaagagcatggtatgataatcatagagaggccctacttaaaggtgggtttgatggcgaatatcaagatgacagcttagatttgctacgctatttcaccgttacctgttattctggttatggagatgatgaaaagggattttacacggtgtatcgtaatgtttttgaaatgattgccaaggaagaactagaatctgtgttagaggaagaggttgatgatttcccaacttttggagactcccagagtgactatgatacggtagtccatcctttctacgcttattggcagagtttctgcactcaaaagaattttgcatggaaggaagaatatgatacacgacaggcttcaaaccgctgggaaaaacgagccatggaaaaagaaaacaaaaagattcgggacaaagcaaggaaagagaagaatgagcttgtccgtcagctggtagctttcattcgtaaaagagataaaagagtgcaggcgcatcgaaaacttgtggaagaacagaatgcagagaaggcgaggaaagccgaagagatgaggcggcagcagaagctaaagcaggccaaactggtggagcagtacagagaacagagctggatgactatggccaatttggagaaagagctccaggagatggaggcacggtacgagaaggagtttggagatggatcggatgaaaatgaaatggaagaacatgaactcaaagatgaggaggatggtaaagacagtgatgaggccgaggacgctgagctctatgatgacctttactgcccagcatgtgacaaatcgttcaagacagaaaaggccatgaagaatcacgagaagtcaaagaagcatcgggaaatggtggccttgctaaaacaacagctggaggaggaagaagaaaatttttcaagacctcaaattgatgaaaatccattagatgacaattctgaggaagaaatggaagatgcaccaaaacaaaagctttctaaaaaacagaagaaaaagaaacagaaaccagcacagaattatgatgacaatttcaatgtaaatggacctggagaaggagtaaaggttgatccagaagatactaacttaaatcaagacagtgccaaagaattggaagatagtccccaggaaaatgtcagtgtcacagagatcattaaaccatgtgatgatccaaaaagtgaagctaaaagtgttcctaaacccaaaggaaagaaaaccaaagatatgaaaaaacctgtcagagtacctgctgaaccacaaacaatgagtgttcttatcagctgtacaacctgccatagtgaatttccatctcggaataaactttttgaccatctaaaggccacaggtcatgcaagagcaccttcatcatcgtctttaaacagcgcaacaagtagtcaaagcaagaaagagaaacgtaaaaacagatagagattctgcctgtgcttttgtttgactgtctctagattttgaaaccaaaaaactgaactgaaatcatctaaagagttaaaatttcagtgatctgcaattaattacattgtggaagattattttttatcttgtaaaaacacttttttggtttaatatatatttttaaaacatttcactagtgattgaattctacttttgccatctgaattgacttgaatgtcttaaaacaggtaaatactgtaaagtgtgtattcttgatgtttattggctcatgtggacagaaatgtacagggagaattacattattttaacacacagaagtgcaactttctgctttattttctgaatttcacattacttttacttaatgcttttgtgttttgttaatacttcataatatgtgaaaaactcggatcttttaaaaagcatcatagatcatttttccatatgacactggttccgattttaaaaattatttttaaataa

SEQ ID NO: 127758 - DNA, 6208 bp, Homo sapiens
  Payload ID: 5005
  Gene Symbol: DNAJC21
  Gene Name: DnaJ (Hsp40) homolog, subfamily C, member 21
  Uniprot ID: Q5F1R6
  ENST ID: ENST00000382021
  CDS Start-End: 228-1958
gcgctcccgcttgccgcagcctgcgtcgtctgccgccaccgcgcgccttcactgacctacaccaccgccgccgccgccgccgccgccgggctcgctggctggcccggtgcgggcggcggactcccgccggagaggactgccagcgccgccgccgccgccgcttcggcccgggcccgggccccgaccccgtcccgggccccagcgccggccgcccgcccggtcgggcgatgaagtgtcactatgaggcgctgggggtgcggcgcgacgccagcgaggaggagctcaagaaggcctatcggaagctggccctgaaatggcacccggataaaaatctggataatgccgcagaagcagctgaacaatttaaattaatccaagcagcatatgatgtgttgagtgaccctcaggaaagagcatggtatgataatcatagagaggccctacttaaaggtgggtttgatggcgaatatcaagatgacagcttagatttgctacgctatttcaccgttacctgttattctggttatggagatgatgaaaagggattttacacggtgtatcgtaatgtttttgaaatgattgccaaggaagaactagaatctgtgttagaggaagaggttgatgatttcccaacttttggagactcccagagtgactatgatacggtagtccatcctttctacgcttattggcagagtttctgcactcaaaagaattttgcatggaaggaagaatatgatacacgacaggcttcaaaccgctgggaaaaacgagccatggaaaaagaaaacaaaaagattcgggacaaagcaaggaaagagaagaatgagcttgtccgtcagctggtagctttcattcgtaaaagagataaaagagtgcaggcgcatcgaaaacttgtggaagaacagaatgcagagaaggcgaggaaagccgaagagatgaggcggcagcagaagctaaagcaggccaaactggtggagcagtacagagaacagagctggatgactatggccaatttggagaaagagctccaggagatggaggcacggtacgagaaggagtttggagatggatcggatgaaaatgaaatggaagaacatgaactcaaagatgaggaggatggtaaagacagtgatgaggccgaggacgctgagctctatgatgacctttactgcccagcatgtgacaaatcgttcaagacagaaaaggccatgaagaatcacgagaagtcaaagaagcatcgggaaatggtggccttgctaaaacaacagctggaggaggaagaagaaaatttttcaagacctcaaattgatgaaaatccattagatgacaattctgaggaagaaatggaagatgcaccaaaacaaaagctttctaaaaaacagaagaaaaagaaacagaaaccagcacaggatgtacctggcaaagattcatatctgcctgcagctcactttcagatggcttggggaaaaaagtgtgtgttgggagagagaagagatggagagagcgagcacaaatgtgccaaaatgttgcttgaaaacagacagaattatgatgacaatttcaatgtaaatggacctggagaaggagtaaaggttgatccagaagatactaacttaaatcaagacagtgccaaagaattggaagatagtccccaggaaaatgtcagtgtcacagagatcattaaaccatgtgatgatccaaaaagtgaagctaaaagtgttcctaaacccaaaggaaagaaaaccaaagatatgaaaaaacctgtcagagtacctgctgaaccacaaacaatgagtgttcttatcagctgtacaacctgccatagtgaatttccatctcggaataaactttttgaccatctaaaggccacaggtcatgcaagagcaccttcatcatcgtctttaaacagcgcaacaagtagtcaaagcaagaaagagaaacgtaaaaacagatagagattctgcctgtgcttttgtttgactgtctctagattttgaaaccaaaaaactgaactgaaatcatctaaagagttaaaatttcagtgatctgcaattaattacattgtggaagattattttttatcttgtaaaaacacttttttggtttaatatatatttttaaaacatttcactagtgattgaattctacttttgccatctgaattgacttgaatgtcttaaaacaggtaaatactgtaaagtgtgtattcttgatgtttattggctcatgtggacagaaatgtacagggagaattacattattttaacacacagaagtgcaactttctgctttattttctgaatttcacattacttttacttaatgcttttgtgttttgttaatacttcataatatgtgaaaaactcggatcttttaaaaagcatcatagatcatttttccatatgacactggttccgattttaaaaattatttttaaataaccgattattgattactgtattttttttctcaagaacagtgataggtagaaactaattgaacatttggtagtctttcaagaatagtgtctcttcaaggttttacttgatttaatttgatattttactggtttaccagtaaggtgtattgttcagttttttgctccgatttgaattgtggaggtggaagcaaattagtttacatggcatgtcctccctaggcacagtgacagctgtaaagtatgacggaacaaggtagcagatggtacagaatttatactatttaagaagagatgtggtgttcttcattgagtttttttcttcactattttcagaagtttttgttcttttttttttttccatcactcagtggagaaaagctttgttaatgaaagattttgtgatagagctgatgcttatacatctattctataacagtgatgaatattaacacaaaggaaatatggagaactgttataactgagtgttagaacagtcgtgtacattgatcagtattgagtccatttttaggatggattagtcagttcttttcattggtcttgaaagtaattttggctggtcgcggtggctcacgcctgtaatcccagcactttgggaggccgaggcgggcggatcacgaggtcaggagatcgagaccatcccggctaaaacggtgaaaccccgtctctactaaaaatacaaaaaattagccgggcgtagtggcgggcgcctgtagtcccagctacttgggaggctgaggcaggagaatggcgtgaacccgggaggcggagcttgcagtgagccgagatcccgccactgcactccagcctgggcgacagagcgagactccgtctcaaaaaaaaaaaaaaaaaaaaaaagaaagtaattttaaactcactggcttgaaatgtgtgctttctgtacaatgaagttattgctttccatatatccttgaatcttcagattaacgaaatgaacaaattttcggttacagatcagctctcaaacactaaagtccttaatggcaaggtcttttctgatagcttcatggatagtattgatgatcagatttcttctgtgttattgtcttaaaaataagcatttgaaccttaatttaaattcttttcttttccatttagagatatgtttttttctttaccttcatacctttctatttcttgctaatttctatcactaattccttataattgtccctgctccccttcttgatctcttcagggggaatactaggcagttttgtatcttctgatctcgtaccctgagacttcatctgaatgtgctctgccgccttcttatctgaactagatgaattggccataattatgaataggaatattaatgaaccagaggacatactagtcacatgttattatacactaaaaaataggaagtcatcttgaaaggcagttaatgtactgcaaatgtccctatgacttctttgctttctcttataccaaacatgcaggtatttaatttgtttaatgagggttgagtggagttatgtgtcgcttttattcggattgacgaaaatcaaccataattttcaagggatcttcatgggttgtgactggaagctgaccttagtcttgcgtctcatcctttatgatgttgagaaatcatctaatttctcagaactttttcttatctctaacacagttattaccataataatattgtctccatttatcatacaggatcattatgaaagtaaaatgaagtagtatatatgaaaatgctttttaaacacaaaagctttatacaaaatattgttgaatttaaataaggtaaatcttttttagtttatatatttgcagactatacatgttggattaaatgggcaattaagttttataggaatttgcttcctaagtctacttttgaagaggaaaacaggaacgtaccatatattttgctaagggtaaaatatttttggtgaattgcagacatttaatttcacttgtctgaggtaaaacaataaactaaaatacatgggcatgcatcttacactgatcttattagaggtcagtgctaagtacccatcttgattgaagttagctcagatgtggagattcatagaatgagggtccaggagaagaaagttaggggaaatctcattttctttctgtaattcattcagtggtgccaaagctgggggttccctacaatggctatttagactttccctgcttcaaaataagagcagtatccttagctctagccaagcatttttctaattcctgcctttggtcacaaagaaggaaaagcagagctgtgaatgagttagtggaggtcaagtcacatcagagttcatgacctagtgattgctggtgaagtaatattggaattttggtaccatgagaagacttataaaggatttcatcagaagttttcattttttctaaatcctcccctacaaaattttcagattggaaattactcttgtatttgtagaagattgtctctaaaattgtggtttaactcacgcaggaagtaaaattcctatagcaagacatagtttcattttagaggacccccaaaatcccgtgaattctctggtgatgattctagcctaaccttcaacataaaataatgaagagaacttttaaacttttttatgaattcctaaacattaccatttatgtggcagaagttctgttccctataatctgcaatgctgaagtatctctattcaattcccttccttatctgttaaatttaatgtctttatactaaaaatataggctcttgggattggagaggaaaaattagaggtgattttcagatttcttgttctatggaagaggaagctgagctcagggagatatgagctccacagccacagctggttaggggcggctgccagtagaacagggcagatgcctggactcccaactcagtaggccttctgttacacctcaaaatgtgttacatgggaagaaaaagattaagaaaaagcaagataattttgaagaaggacgagaggaagaggcatgaacttgtcctaacaatgtcaaagaatattttaaaggtataccagttaaagtagtgtgtggctggtgccagtagaggtcagtcaagggatccctgacgagaataaagagcccagaaacaggtccatgtttatatgggaacttgatttttgacagatacggcaagctctatggggaaaacaatatgtactaccttatacccttccccaaaaacaaagggattaaagacctaaatatgaagacaaaacttttaaatgagaatctataaggttattttcatgattttgcaaatgggaaggatttctttaaagcaagacacaaaagcatacacaggaaaaaatgatgcataaaaacatggcttctgtagaacaatagagactgtaaaagaacaagctacagacaaggaaatgtttgcaatgcatggaactgtcaaaggattcgtatctggaatacattaaagaagcaaaagaacctcatacaaaagtcattgagtaaatgacagccatgcattagaacagcaattctcaaaacttttggtctcaagatccctttacactcttcaaaagtgagaaccccaaagagttttcatgtatgtgggttaaatctattgatattttctgttagaatttaaaaattatgttaaaaaaataagaagaatgactatttttcaaaacaaaaaatgagaagagtggtattgttttacatttttacaaatctctttaacatttagcttaataaaagatagctggcctctca

SEQ ID NO: 127759 - DNA, 2059 bp, Homo sapiens
  Payload ID: 5006
  Gene Symbol: DNAJC22
  Gene Name: DnaJ (Hsp40) homolog, subfamily C, member 22
  Uniprot ID: Q8N4W6
  ENST ID: ENST00000395069
  CDS Start-End: 622-1647
gggggacctcggagatccacgagattgccagagaaggaaattgaggcccaagaagctgcatgacttagccaagttcacggagtagaacccgggattggagcccgggacattgaaatgaaggcgtcttgcattgcagctccgttgcagcgcagaggcgcaggaaggcagactaccacgagcctcgggctgcggcctcgccctcctggtcgagcctcctgccctccaaccctctgctcccgtttctccctctggttcatagcccgcgggacagagcagccctggattgggaggctcctcaggtctcaggctcaggtgcagaagcagagcccctaactggaaggctcggaggtgggccggtgaggcaagcaagccctgtggggggttgaggacagcttgggttggatgtccctcactgcagcctgtccgtggatgtctctgccttaagggaattggaggtggaaccatccagtcttgaaggtcaacggagcgtgaagagaggagcgtgcagcttgagggtctaaggataactctggggccatgacagccatgagtctcacagaggaccccgagacttctgtgctgcgagtaaccggacttgttctgagacctttgccctagaggatggccaaggggctcctggtgacctatgccctctgggctgtggggggccctgctgggctccaccacctgtacctgggaagggacagccacgccctgctctggatgctgaccctggggggaggtgggctgggctggctctgggagttctggaagctcccaagctttgtagctcaggccaacagagcccagggacagaggcagagccccagaggggtgacaccccctctgagtcccattcgctttgctgcccaggtgatagttggcatctattttggccttgtggcactgattagcctttcttccatggtcaacttctatattgtggccctcccactggcagttggcttaggggtcttgctggtggctgctgttggcaaccagacctcagactttaagaacactctggggtcagcatttctcacttcacctatcttctatggccgccccatagccatactgcccattagcgtggccgccagcattacagctcagaggcatcgccgctacaaagctttggtggcatcagagccgctcagtgtgcggctctatcgtctgggcttggcttaccttgctttcacaggcccactggcatacagtgccctctgcaacacagctgccaccctcagctatgtggcagaaacctttggctccttcttgaattggttcagcttcttcccccttcttggccgcctcatggagtttgtcctccttctgccttaccggatctggaggctactgatgggggagactggcttcaacagcagctgctttcaggagtgggcgaagctctatgagtttgttcacagttttcaggatgagaagcgtcagctggcttaccaggttttgggcctctcagaaggggcaacaaatgaagaaatacatcggagttaccaggagctagtgaaggtctggcacccagaccacaacctggaccagacagaggaggcacagaggcacttcctggagatccaggctgcgtatgaagtcctgagtcaacccaggaagccctggggatcccggaggtgaaaagaaacttccccctgaggactgactcttcctagcagagctgggcaacttgtcccaaatctagctttgcccacgaatggcatcccaacagagttaaagaaactgcttgcaggggctgggcgtggtggctcatgcctgtaatcccagcactttgggaggccgaggcgggcagatcacgaggtcaggagttcgagaccagcagcctggccaatatagtgaaacttcgtctctactaaaaatacaaaaaattagccaggagtggtggcaggcacctgtagtcccagctacttgggaggctgaggcaggagaatcacctgaacctgagaggcggaggttgcagtgagccgagatcacgccactgcactccagcctgggcaacaagagtgaaactccgtctcaaaaaaaaaaaaaa

SEQ ID NO: 127760 - DNA, 4412 bp, Homo sapiens
  Payload ID: 5006
  Gene Symbol: DNAJC22
  Gene Name: DnaJ (Hsp40) homolog, subfamily C, member 22
  Uniprot ID: Q8N4W6
  ENST ID: ENST00000549441
  CDS Start-End: 1205-2230
agcatttcctctccaggccgagatgagggctgagggcgtttggagggaagcgctctgcctactgccgggaggtgacacccgcgaggccgaccgtcccccgaagcccccgcaagtccagactgggggacctcggagatccacgagattgccagagaaggaaattgaggcccaagaagctgcatgacttagccaagttcacggagtagaacccgggattggagcccgggacattgaaatgaaggcgtcttgcattgcagctccgttgcagcgcagaggcgcaggaaggcagactaccacgagcctcgggctgcggcctcgccctcctggtcgagcctcctgccctccaaccctctgctcccgtttctccctctggttcatagcccgcgggacagagcagccctggattgggaggctcctcaggtctcaggctcaggtgcagaagcagagcccctaactggaaggctcggaggtgggccggtgaggcaagcaagccctgtggggggttgaggacagcttgggttggatgtccctcactgcagcctgtccgtggatgtctctgccttaagggaattggaggtggaaccatccagtcttgaaggtcaacggagcgtgaagagaggagcgtgcagcttgagcactacagataggagcgtcccttgctcctgccaggcagcccctccataggggcagtcctgtgctgctgtgcctcggtacccgcacaaggtgtctggggaccgcccggacccccccttccatcggcggcagcgccacctggcggccatggtgcggtggtgtgggaggagctgggcccgggctgggcactgagcccaccggagctgcaggcgtctgcagagccttgcaccgagtttccccgcgagggcgggcgggaggagtcccaggcgggaatgtgatccccagggggccggggagggccctggggaggagcctggcctggggaagccggacttccgtgacacaacagacacaaaagacaaagtccatttggatggaagtgggagcagggcgagacgggccattttcactctgtggtcaaaggaaatgactggtctgactcggtctgggagcggggcacccagggtctaaggataactctggggccatgacagccatgagtctcacagaggaccccgagacttctgtgctgcgagtaaccggacttgttctgagacctttgccctagaggatggccaaggggctcctggtgacctatgccctctgggctgtggggggccctgctgggctccaccacctgtacctgggaagggacagccacgccctgctctggatgctgaccctggggggaggtgggctgggctggctctgggagttctggaagctcccaagctttgtagctcaggccaacagagcccagggacagaggcagagccccagaggggtgacaccccctctgagtcccattcgctttgctgcccaggtgatagttggcatctattttggccttgtggcactgattagcctttcttccatggtcaacttctatattgtggccctcccactggcagttggcttaggggtcttgctggtggctgctgttggcaaccagacctcagactttaagaacactctggggtcagcatttctcacttcacctatcttctatggccgccccatagccatactgcccattagcgtggccgccagcattacagctcagaggcatcgccgctacaaagctttggtggcatcagagccgctcagtgtgcggctctatcgtctgggcttggcttaccttgctttcacaggcccactggcatacagtgccctctgcaacacagctgccaccctcagctatgtggcagaaacctttggctccttcttgaattggttcagcttcttcccccttcttggccgcctcatggagtttgtcctccttctgccttaccggatctggaggctactgatgggggagactggcttcaacagcagctgctttcaggagtgggcgaagctctatgagtttgttcacagttttcaggatgagaagcgtcagctggcttaccaggttttgggcctctcagaaggggcaacaaatgaagaaatacatcggagttaccaggagctagtgaaggtctggcacccagaccacaacctggaccagacagaggaggcacagaggcacttcctggagatccaggctgcgtatgaagtcctgagtcaacccaggaagccctggggatcccggaggtgaaaagaaacttccccctgaggactgactcttcctagcagagctgggcaacttgtcccaaatctagctttgcccacgaatggcatcccaacagagttaaagaaactgcttgcaggggctgggcgtggtggctcatgcctgtaatcccagcactttgggaggccgaggcgggcagatcacgaggtcaggagttcgagaccagcagcctggccaatatagtgaaacttcgtctctactaaaaatacaaaaaattagccaggagtggtggcaggcacctgtagtcccagctacttgggaggctgaggcaggagaatcacctgaacctgagaggcggaggttgcagtgagccgagatcacgccactgcactccagcctgggcaacaagagtgaaactccgtctcaaaaaaaaaaaaaagaaagaaaaactgcttgcaggggacatgagaaaacaatggggtgagaaaaggttgtggtagaaggatgtgtttatattctgaatttctgaattcttggctattgcattcttgacaatttttcttaaaaccagagagtgaaaggcatattataaaacaatcaaatatcttttagagtatggacaactattatatatcaataaaaaattaattagaaaaaatatatcttttagagaacacaccaccttatcccacccatgatatattgatgtgtgatggagaaagattatttaactatttttttaaatgtgtaaagcagcagggcatagtggcttacgcctgtaatcccaacactttgggaagctgaggtgggaggatcaccttaggtcaggagttcaagaccagcctggccaaccaacatggtgaaaccccatctctactaaaaatacaaaacttagccagccatggtggcacatgcctgtagccccagctagtcgggaggctgaggcaggaaaatcacttgagcctgggaggtggaggttgcagtcaactgagattgagccactgcactgtactccagcctgggcggcagagctagattctgtctcaaaaattaaataaataaataagtaagtaaataaataaataaataaatgtataaagcactatgttaggagattgaaggaaaaatatgaaggttctagtattcacaagctgtcctgtgataagagagatttgatcttttctgtagatggggtgagactaggattaaatttcaaaatttgagaaaaatattttcattccatttatgggagaactttctagcagctacactttctccaaaagggaacaagctactgtggagtggggggtagttcttcctcctctgcttagaggagaatttttggagagctctcagactttacataggtgattggactggctgacttctcaggtcttcccagtatttgaggtctgattctgggctacataccctactcctagaagcatacaatctgatgggagataatgacacaggtacacagatatcaaagcccttgttcagtgttttgaactaaatgtcataagagctgtaaatagtgtattggcacattggaggagggacagataacattgttttatggggactcagaaagattcattattttatatgtcatatgtccctttggggactttgggaaaccctagggaaccagcggctagagcatctcaagggggccttattcaattctaggtaactagccaggtgtgaaagaaagggcccagggtgtctcactttgcagaggaagattggagaccaggaacatgattttaaattatgtgcctttactgcagctttcttgctctctttgtgtgtgtgcattctttccatttttttcttctttctggatgttaaatctgagtaatatatatcatttttaaagtggaattatgaccaggcatggtgcctcttgcctataatcctagcactttggcaagccaaggcaggaagattgcttgagcccaggagttcaacaccagcctgggcaacatggcaaaactccatctctacaaaaagtacaaaaatgagccaggtgttgtggggtgcgcctgtagtcccagctaaggaggctgagattgggaggatcacttgaacccaaaaggtggaggctgcagtgagctgagatcgtaccactacactccagcctgagtgacacagtgacagcctgtctcaaaaatataaaaataaataaataaataaagtggaatta

SEQ ID NO: 127761 - DNA, 626 bp, Homo sapiens
  Payload ID: 5007
  Gene Symbol: DNAJC24
  Gene Name: DnaJ (Hsp40) homolog, subfamily C, member 24
  ENST ID: ENST00000395949
  CDS Start-End: 1-89
aagatgatctaagaaatgtaggaccagtagatgctcaagtatatcttgaagaaatgtcttggaatgaagttacttctcagagacagtaaaatggaatgaccaatggatcagagattctttaagtcaaagggcacaagcatttcaacttcccaggaaaatgacacacttaaaatttccacgatcaggagcctaagtgatcactctttttatctgagttgcagatgtggtggaaaatacagtgtttccaaggatgaagcggaagaagttagcctgatttcttgtgatacatgttcactaattatagaactccttcattataactaaaattgttcacaacttgaaatgctttaactgtggtattgagacatgatgagaagccgttgagctttgtccattcaaggaaatggattatttgtcagcccgattatttgcaaagaaaatatacaattatcaagcagagaccacctcagattaatagagaatgaatataattatttatttgtatttataatttatatttacaagttgtcacaaaaatagatttgattatatttggtgaattcccatctgagaactttattatgtcatttttttccatgacacaaaataagaattttcttaatatg

SEQ ID NO: 127762 - DNA, 2004 bp, Homo sapiens
  Payload ID: 5007
  Gene Symbol: DNAJC24
  Gene Name: DnaJ (Hsp40) homolog, subfamily C, member 24
  ENST ID: ENST00000465995
  CDS Start-End: 107-556
ggaagaagaagccggtccggagttctggccgacagcaggcgaggagtgggtagcagcgcctatgtgaagttagctaatctgagaaggcccacttctggttccatggatgatggcggttgagcagatgccaaaaaaggattggtacagcatcctgggagcagacccatctgcaaatatatcagacctaaaacaaaaatatcaaaaactcatattaatgtatcatccagataaacaaagtacagatgtaccagcaggaacagtggaggaatgtgtacagaagttcatcgaaattgatcaagcatggaaaattctaggaaatgaagagacaaaaagagagtatgacctgcagcggtgtgaagatgatctaagaaatgtaggaccagtagatgctcaagtatatcttgaagaaatgtcttggaatgaaggtgatcactctttttatctgagttgcagatgtggtggaaaatacagtgtttccaaggatgaagcggaagaagttagcctgatttcttgtgatacatgttcactaattatagaactccttcattataactaaaattgttcacaacttgaaatgctttaactgtggtattgagacatgatgagaagccgttgagctttgtccattcaaggaaatggattatttgtcagcccgattatttgcaaagaaaatatacaattatcaagcagagaccacctcagattaatagagaatgaatataattatttatttgtatttataatttatatttacaagttgtcacaaaaatagatttgattatatttggtgaattcccatctgagaactttattatgtcatttttttccatgacacaaaataagaattttcttaatatgagcatgtctcctcttttcagtgggtaacagtatcatcatattcctttatagttactaagtttctggtctaaccgataacgtttctagttgctaaagttatggggctgttgtacacctagaatctttgtgaataatgtgaggccagttcttccataaggaaggctggttatggatattcataaggttatttcaaagttaataaagacaaagtggcaactgtagaaagtgttgcctccaatcttggtccgtatttccaaagcttgtaaacactgccatcttcaaatttaaatgtaatttaggaaatggaagcttttaattttaatttcttttttctaagacagagtctcactctgtcgcgccagctggagtgcagtgccatgatctcaggtcgctgtaacctccgtctcctgggttcaagtgattctccagcctcagcctcccgaatagctgggattacacgtgcccaccaccatgcccagctaatttttgtatttttagtagagatggggttccaccatgttggccaggctggtctcaaactcctgacctcaggtgatccacctgcctcgacctcccaaagtgctaggattacaggtttgagccaccgtgcctggcctaagttttgttaatagagatgggatttcatcatgttggctaggctggtcttgaactcctggcctcaaatgatccgcccacctcaacctcccaaagtgctgggattgcaggcgtgagccaccatgcctggccagaagcttttttaaaaataatgacttggaagttggtgcattatttccccttttattttggagtgttgatataatattggggccaggcatggtggctcacatctgtaatcccagcactttgggagactaaggcaggcggatcacctttggtcaggagttcaagaccaccctggccaacatggtgaaaccccatatctactaaaaataatttttttaaaaattagccagtcacgttggtgtctgcctgtggtcccagctactcgggaggctgaggcacaagaatcacttgaacccaggaggcagagtgagccgaggttgtgccactgcactgcagcctgggctacagagagcaagactctgtctcaaaaaaaataaaataaaataaataaaaaaagatata

SEQ ID NO: 127763 - DNA, 417 bp, Homo sapiens
  Payload ID: 5007
  Gene Symbol: DNAJC24
  Gene Name: DnaJ (Hsp40) homolog, subfamily C, member 24
  ENST ID: ENST00000525511
  CDS Start-End: 99-233
aagccggtccggagttctggccgacagcaggcgaggagtgggtagcagcgcctatgtgaagttagctaatctgagaaggcccacttctggttccatggatgatggcggttgagcagatgccaaaaaaggattggtacagcatcctgggagcagacccatctgcaaatatatcagacctaaaacaaaaatatcaaaaactcatattaatggatctattcctctatgtgatataaatgtcactgtgcttctgagttttatttgaccctcttcacttacaaggaaatcaaggattcttcatctgaggctcaggggactttggagtatcatccagataaacaaagtacagatgtaccagcaggaacagtggaggaatgtgtacagaagttcatcgaaattgatcaagcatggaaaattcta

SEQ ID NO: 127764 - DNA, 512 bp, Homo sapiens
  Payload ID: 5007
  Gene Symbol: DNAJC24
  Gene Name: DnaJ (Hsp40) homolog, subfamily C, member 24
  ENST ID: ENST00000527731
  CDS Start-End: 1-128
catctgcaaatatatcagacctaaaacaaaaatatcaaaaactcatattaatggttattggattttttccccctctttttggtgtacatacttggaaggacgcatctgtcacaggaaaatttttgtgaagcactcatcttctgacttgcccatgaattccttgttttaagcagtcaaggcaaacagtgtgcttctcaaattttagcacgcgtaacagttgcttggagagcttggtgaaacagagattctggagtcctccctctgaagatttgagtatcatccagataaacaaagtacagatgtaccagcaggaacagtggaggaatgtgtacagaagttcatcgaaattgatcaagcatggaaaattctaggaaatgaagagacaaaaagagagtatgacctgcagcggtgtgaagatgatctaagaaatgtaggaccagtagatgctcaagtatatcttgaagaaatgtcttggaatgaaggttggattttttttttctcttgacaacatt

SEQ ID NO: 127765 - DNA, 594 bp, Homo sapiens
  Payload ID: 5007
  Gene Symbol: DNAJC24
  Gene Name: DnaJ (Hsp40) homolog, subfamily C, member 24
  ENST ID: ENST00000526529
  CDS Start-End: 86-217
ctggccgacagcaggcgaggagtgggtagcagcgcctatgtgaagttagctaatctgagaaggcccacttctggttccatggatgatggcggttgagcagatgccaaaaaaggattggtacagcatcctgggagcagacccatctgcaaatatatcagacctaaaacaaaaatatcaaaaactcatattaatggcactagctggttgcttctattaaaatgttcagttgaagtgttaagagcaggtatccttgccttgttcctgattttaagaggaaaaccttcaatgttttaccagtggatggattacttgagtcttggagttggagaccagcctgggcaatatggaaacctcatctctacagaaaatacaaaaattagccaggttattggattttttccccctctttttggtgtacatacttggaaggacgcatctgtcacaggaaaatttttgtgaagcactcatcttctgacttgcccatgaattccttgttttaagcagtcaaggcaaacagtgtgcttctcaaattttagcacgcgtaacagttgcttggagagcttggtgaaacagagattctggagtcctccctct

SEQ ID NO: 127766 - DNA, 2192 bp, Homo sapiens
  Payload ID: 5007
  Gene Symbol: DNAJC24
  Gene Name: DnaJ (Hsp40) homolog, subfamily C, member 24
  ENST ID: ENST00000526042
  CDS Start-End: 90-347
cggagttctggccgacagcaggcgaggagtgggtagcagcgcctatgtgaagttagctaatctgagaaggcccacttctggttccatggatgatggcggttgagcagatgccaaaaaaggattggtacagcatcctgggagcagacccatctgcaaatatatcagacctaaaacaaaaatatcaaaaactcatattaatgtatcatccagataaacaaagtacagatgtaccagcaggaacagtggaggaatgtgtacagaagttcatcgaaattgatcaagcatggaaaattctaggaaatgaagagacaaaaagagagtatgacctgcagcggtgtggctcataaacctctctgatgagtcctgccagtgttttcttagatcccactgttgagacaatggagccacagaattctttcacctcttgttgtcagacaaatccaatagaacacaaggtcagaagggcctatacttctaaaggttgaaagattctttttcaaaagatgatctaagaaatgtaggaccagtagatgctcaagtatatcttgaagaaatgtcttggaatgaaggttggattttttttttctcttgacaacatttaaaaaaaaaaggaattttctataagaaaaaaaaactcattggatatttggaaatcttaaaaagaaataatagtgtggctttctatatatatgtggtaagtgtttctgtctggagtatttctgcttaattctaaactttatttattgactgatgtccccctatatgactcatttccagttatttttatattctaattagatgttaggaacataaagtttcataagagtttttttgttgtgtttttttactttagtttttgcattactgtctatgtagtattgtagtatggtaaataatgtcaaacaagatagttttttttttccgttccttttaatgttgacaagatgaattcctattagaatttttattttccctttatataaaatcataaactgtcaggacagggcttttaagaggcttgatttttttttttttttttttaacgctcacatactgattgtcttataagaagaaaagaatatctgccatttcccttgatgcaacatgaagtcatgtcttttttgcttttctgttattaaaattttagaacttaaattcaatgtcgtttccctattcttctgatggttccttgaattgttctggttagacatcattacattgggaaacacactttactaaacagaagccatgagtaccatacttacttgtttctctgggcaaatgaagaaaatcttactatttcctagaatctttatatatgcttaaccttttaaccttattgttcagcatgagtacaaattccctccaggtttataaaaatctactaatgagtgtggataggtagaagacaaaaacagagccatctgaaaccaaatttactttttaaatggcaaattcttaacttagtgcccctaagacgtgggtcacaagcctaacttagaaagggaatcatgtctttgcctctggggccattctgtccccaacccctcaagtgaaatcctagagtagaaattcagtgaataattggaaaagttgaggttttgtgtaactggggctcttggtggtgacagtctcatcagagtaaacacgaagaaatactgtgaaaacaatacactagtgatacagattttcactgctggtgtgtggaagggacactctagaatatgtcatttatcaggaagacttgcccagttaaaaaaaatatatgcacatatgtatatatacacacatatactttttattttttgccaaatacacaaacttcaaggagactaaatatgttttgaaaatatagtttgtctccttatctattggtatgtatatgtatgtttgtatgtgtttaatgtcttaataaattagttcttgctatagtcgatatgggtaatatattttgtttatgactgtgaaaatagtgaaaactggtttttataaatttttttttaccttttaaatatataacaatataatgttaagatcttaattttaaatgagaatacgggctggaagcctggaatcccagcactttgggaggctgagtttggagaatcgcagaggtcaggagtttgagaccagcctgggcaacataggaagactgtgagaacagattgtgagaataggaaaaaaaaaaaaaa

SEQ ID NO: 127767 - DNA, 4992 bp, Homo sapiens
  Payload ID: 5008
  Gene Symbol: DNAJC27
  Gene Name: DnaJ (Hsp40) homolog, subfamily C, member 27
  Uniprot ID: Q9NZQ0
  ENST ID: ENST00000264711
  CDS Start-End: 191-1012
gtctccctcccccggctccccacgctcccaaccgcccgcgcctgctgccaggcagcggcggggatggcgagcagcggaggcgaggcggtgacgagagcagcggctccgccattggacgaggaggcctgagggacgggccagcggtgcacaagaagagaccgaggcgggtggccccgagagagccagggccatggaggccaacatgccgaagcggaaggagcccggcaggtctctccgcatcaaagtcatctccatgggcaacgccgaagtggggaaaagctgtattataaagcgatactgtgagaaaagattcgtgtctaaatacctggcaacaattggaattgactatggagtcacaaaggtacacgtcagagacagagaaatcaaagttaacatctttgatatggctggacatcccttcttctatgaggttcgaaatgagttttacaaggacacacagggtgtgatactggtctatgatgttgggcagaaagactcctttgacgcccttgatgcgtggctggcagaaatgaagcaagagcttggacctcatggaaacatggaaaatattatatttgtagtttgtgccaacaagattgattgtaccaaacatcgctgtgtagatgaaagtgaaggacgtctttgggctgaaagcaaagggttcctgtactttgaaacttcagcacaaactggagaaggcattaatgagatgttccagaccttttatatatccatagttgatttatgtgaaaatggcgggaaacgccctaccaccaatagcagtgctagtttcaccaaagaacaagcagatgccattcgcagaattcgaaatagtaaagacagttgggacatgctgggagtcaaacctggggcctcaagggatgaagtcaataaagcgtatcggaaacttgctgtgcttcttcaccctgacaaatgtgtagcacctggcagtgaagatgccttcaaagcagttgtgaatgctcggacagccctcctgaaaaacatcaagtagaaagtacagaaaaaagccacatgtgggactcaaatgcaaacagactttccctagaggtgaaataaccaacgtggagttttccttcccagaatctcactgctcttttcattcatgtgttgtcatttgtatatcagtaattcaggtacccatttcatagacattttactgagaaatgacctgcatttgtatgaagtgaactgagcgtcacaccctgtacttcatttcatatttctagataattctgaatttttttctcattcgtcagctctgtaattatagtatcacttagacatttcacttggggaaatccacaaggttcctggaggagggaagagaggacaagaggaccctttcactttttcttttttacggaattcatcatcagagaagaaaataacaaaaatggaagcaaacaacatcagaacccctgtaagtttggtgtgaccttacagacaagttgctgcttttacaatgagttccttaggtggtattttaacccatcgatctataatgatgactcttggcagccctttgggagtttgtaaaatgaggtgatacagttctgaattgagcattcctttatgatattcactctgttcctcttctgcagccaccagtgggagagacaagccagtcctaagagaaaaggtggtggcagccacaaattctaggtacactggctgctgcctatcctgtccctggatctgaggcctttcccttgccatagaaatggttgctggtagcagtagagagcactgtgcacctgggaatgaggaatcaggccccaagacagaagtacttggaggagccagctgcagtagtatccgcctgtagtcccagctactcaggaggctgagacaggaggattgcttaagcccaggagctcaagtcccacctgggcaacatagtaagatcttgtctcttaaagaaaaaaaaaaaaggtacttagaggtcgcacttaaagattatgcacatcagcagaggaaaggccagccaagcttggggcaagcttgatgcagtaggagagactccttatgaggcttagcccttgtcttactgccagcctttgccacaggcaggtgagaaaggcagggccactcctcagcaaagttggcctcttctacacttcctcaccagtgttgtttcttccttttttcccctcttccccttcccgtcttgtgttttttctgaaccccacatctgccatcatttctctcctctagagtccctggcttctggccactgcctcctccctcttctaagccttggcctgaatctggttgatcagaggcaagtgtggatcctttgggtggcagtcaggggagatctcagggcctctgttgggaggaatctctgtaattcctgcttgggctccaaatttctgaagagtaatatttttaaactatagcttacaaaatacattctctgaccacagtctcctccttgatatacaagggatggatgaagttcatgtattaggactggcactccttacggtgcttatagaactagtctcaccacttgactcattacgtcgtcattcttgttacatcactcatacttttagctgcaaccacactaattcacatttttatatactttcaattagctgtactaattggggcttgaaagtatataaaatcttcctgtcctgtgaattttaaaaagctatcccatatcgattgccaaagagcatctaccttacctcctaagaagaaaagccactttcttccaatccaagcccactgcagccttgtggattttccacacagcagcttttcactgtatgcctgtacttgggctgcactgagcttgtcttcaggaaaccagagcgttgctttatcatcgcacttttcatcttggtaatatcaaaacaactttttaaatgaactgattgatatatgttatttcttgcgaggttttcctctggcctttaactggcttctgaggctacagaactccaacccagagttcttcgggacctaaattttgcttaaggaaggcctttatcatgctgaaagcactcagacatgtctgtcctcacagcagaatgtagaagtcatatgaatgagggatcgtgcacggtagcgtcagcccgaattgacacgacaactctgaatgtgtggccctctatgaaagctggtgccagttttcatcactgttattaaatactagattgggaacctcattcagccgtattgcacagatgagcaattacagcagagaaaattcattagtgctcccactcatatccttatgtgtgagttggtgaaatttagcctgagcttgattcttaggtcttgagactcagtttccaacaccttcattattaatgttaagaatggccatataccacttcatttacgtaaaaggaataaaataagcaagttaagcttcagggtcctagaatttttctgatttctataatccttcagcagaatattaagaaataaagcatgatctgcaatggaaaggtttttttggcactaacttcatgcagaatttcacagacatctatgcattaatttaaattcttggtgcaaatgtgtgctttgtagttcaaccttattaaaaattcttcagccagttaggatttcaaaatacattagtgagagtaacagctagcagaataattacaatggctaaaacgtttttatagagaatcttgtttttcaaaaaagaataaaaagtttgaatagctattattaaagaaaagccatgtcttcaacatctgagtcaccaagaagtaacactttttaaacttgttagaaatccctggaggcatttcaaattcatcttctaacctacctaagcactttaaaatacagcctccttctgttcctctgttccccttcatgcctccttttgaattgatatctcagctgtcaatatttctttgacttcagcattgttattttatttctctatatcaatgtgtccttagttttcttagcctgttaatttaaaaatccagacttgggggtcattgtgttgctacccaagagaaaatgctacagttttatagattgcacatcattctttaaggcatacttttacctcaggaaacttactctagtatgttctcatatattgaattctcaactaagtaactatttctttatacctataaactagtacctaattcactgttagttaaatgagctatagataaggcagctaaatttctgaaagatagccagagtaagtaagcagccactgcaagctctgaatcagttttttaaaaaaaagaaaaaaaaaaaaaaggagctgtgccccattgaacaatgacaacatcacaaggggaagggagggattttgccaaaagttagaaaggtggagctgtaagccatgtgcttgttgcctttgacagtgacagtgcgcgtcttacaactaattccactaggcatgggaatgtcacctcctttgccactgtaccccatcaagcttactctgaatcaaaggttttgtaaaacttttgaaaatgaacttagctgcaaaatatagctaaccactttccattgcaagctttgcaaagtgaagagaggttcgtacttctcataattggtatttagcacaattgtaagatacagttttactgtttgtacatcgtttttttccattaaacttttctagagaagacaaaagcttacactggtgacatggataagtgagatggtgtctaacgagcagtgcaatattaggcggtgcaatagaggccctgttggcaagatgagttttgctggagagctggacagtgttggttagcttcctgcattgattgcccctgggcgttcttcccccttaactgtgaaagcagagtctataaatgaactctttgctcttacaaggtaatttacatattttctttctgttgaaataactgaaaatgttaaatctaccagtttatgtcttgtaaacagagtgtcatatgtatttaagttgtgtatttttataaagtaaagccaagtatcaaacaccgg

SEQ ID NO: 127768 - DNA, 1378 bp, Homo sapiens
  Payload ID: 5008
  Gene Symbol: DNAJC27
  Gene Name: DnaJ (Hsp40) homolog, subfamily C, member 27
  Uniprot ID: Q9NZQ0
  ENST ID: ENST00000380809
  CDS Start-End: 159-431
cgcccgcgcctgctgccaggcagcggcggggatggcgagcagcggaggcgaggcggtgacgagagcagcggctccgccattggacgaggaggcctgagggacgggccagcggtgcacaagaagagaccgaggcgggtggccccgagagagccagggccatggaggccaacatgccgaagcggaaggagcccggcaggtctctccgcatcaaagtcatctccatgggcaacgccgaagtggggaaaagctgtattataaagcgatactgtgagaaaagattcgtgtctaaatacctggcaacaattggaattgactatggagtcacaaaggtacacgtcagagacagagaaatcaaagttaacatctttgatatggctggacatcccttcttctatgagatgaggaaactgagacgcagagaggttaagtgacttgcccaagatcacaaaactagttcgaaatgagttttacaaggacacacagggtgtgatactggtctatgatgttgggcagaaagactcctttgacgcccttgatgcgtggctggcagaaatgaagcaagagcttggacctcatggaaacatggaaaatattatatttgtagtttgtgccaacaagattgattgtaccaaacatcgctgtgtagatgaaagtgaaggacgtctttgggctgaaagcaaagggttcctgtactttgaaacttcagcacaaactggagaaggcattaatgagatgttccagatacatcttggatagaactaatggataaattagtctgtttaaaaaaaaaaagctaacaagaagagaataattacagtattctataaaccttttatatatccatagttgatttatgtgaaaatggcgggaaacgccctaccaccaatagcagtgctagtttcaccaaagaacaagcagatgccattcgcagaattcgaaatagtaaagacagttgggacatgctgggagtcaaacctggggcctcaagggatgaagtcaataaagcgtatcggaaacttgctgtgcttcttcaccctgacaaatgtgtagcacctggcagtgaagatgccttcaaagcagttgtgaatgctcggacagccctcctgaaaaacatcaagtagaaagtacagaaaaaagccacatgtgggactcaaatgcaaacagactttccctagaggtgaaataaccaacgtggagttttccttcccagaatctcactgctcttttcattcatgtgttgtcatttgtatatcagtaattcaggtacccatttcatagacattttactgagaaatgacctgcatttgtatgaagtgaactgagcgtcacaccctgtacttcatttcatatttctagataattctgaatttttttctca

SEQ ID NO: 127769 - DNA, 4831 bp, Homo sapiens
  Payload ID: 5008
  Gene Symbol: DNAJC27
  Gene Name: DnaJ (Hsp40) homolog, subfamily C, member 27
  Uniprot ID: Q9NZQ0
  ENST ID: ENST00000534855
  CDS Start-End: 191-724
gtctccctcccccggctccccacgctcccaaccgcccgcgcctgctgccaggcagcggcggggatggcgagcagcggaggcgaggcggtgacgagagcagcggctccgccattggacgaggaggcctgagggacgggccagcggtgcacaagaagagaccgaggcgggtggccccgagagagccagggccatggaggccaacatgccgaagcggaaggagcccggcaggtctctccgcatcaaagtcatctccatgggcaacgccgaagtggggaaaagctgtattataaagcgatactgtgagaaaagattcgtgtctaaatacctggcaacaattggaattgactatggagtcacaaaggtacacgtcagagacagagaaatcaaagttaacatctttgatatggctggacatcccttcttctatgaggttcgaaatgagttttacaaggacacacagggtgtgatactggtctatgatgttgggcagaaagactcctttgacgcccttgatgcgtggctggcagaaatgaagcaagagcttggacctcatggaaacatggaaaatattatatttgtagtttgtgccaacaagattgattgtaccaaacatcgctgtgtagatgaaagtgaaggacgtctttgggctgaaagcaaagggttcctgtactttgaaacttcagcacaaactggagaaggcattaatgagatgttccagggatgaagtcaataaagcgtatcggaaacttgctgtgcttcttcaccctgacaaatgtgtagcacctggcagtgaagatgccttcaaagcagttgtgaatgctcggacagccctcctgaaaaacatcaagtagaaagtacagaaaaaagccacatgtgggactcaaatgcaaacagactttccctagaggtgaaataaccaacgtggagttttccttcccagaatctcactgctcttttcattcatgtgttgtcatttgtatatcagtaattcaggtacccatttcatagacattttactgagaaatgacctgcatttgtatgaagtgaactgagcgtcacaccctgtacttcatttcatatttctagataattctgaatttttttctcattcgtcagctctgtaattatagtatcacttagacatttcacttggggaaatccacaaggttcctggaggagggaagagaggacaagaggaccctttcactttttcttttttacggaattcatcatcagagaagaaaataacaaaaatggaagcaaacaacatcagaacccctgtaagtttggtgtgaccttacagacaagttgctgcttttacaatgagttccttaggtggtattttaacccatcgatctataatgatgactcttggcagccctttgggagtttgtaaaatgaggtgatacagttctgaattgagcattcctttatgatattcactctgttcctcttctgcagccaccagtgggagagacaagccagtcctaagagaaaaggtggtggcagccacaaattctaggtacactggctgctgcctatcctgtccctggatctgaggcctttcccttgccatagaaatggttgctggtagcagtagagagcactgtgcacctgggaatgaggaatcaggccccaagacagaagtacttggaggagccagctgcagtagtatccgcctgtagtcccagctactcaggaggctgagacaggaggattgcttaagcccaggagctcaagtcccacctgggcaacatagtaagatcttgtctcttaaagaaaaaaaaaaaaggtacttagaggtcgcacttaaagattatgcacatcagcagaggaaaggccagccaagcttggggcaagcttgatgcagtaggagagactccttatgaggcttagcccttgtcttactgccagcctttgccacaggcaggtgagaaaggcagggccactcctcagcaaagttggcctcttctacacttcctcaccagtgttgtttcttccttttttcccctcttccccttcccgtcttgtgttttttctgaaccccacatctgccatcatttctctcctctagagtccctggcttctggccactgcctcctccctcttctaagccttggcctgaatctggttgatcagaggcaagtgtggatcctttgggtggcagtcaggggagatctcagggcctctgttgggaggaatctctgtaattcctgcttgggctccaaatttctgaagagtaatatttttaaactatagcttacaaaatacattctctgaccacagtctcctccttgatatacaagggatggatgaagttcatgtattaggactggcactccttacggtgcttatagaactagtctcaccacttgactcattacgtcgtcattcttgttacatcactcatacttttagctgcaaccacactaattcacatttttatatactttcaattagctgtactaattggggcttgaaagtatataaaatcttcctgtcctgtgaattttaaaaagctatcccatatcgattgccaaagagcatctaccttacctcctaagaagaaaagccactttcttccaatccaagcccactgcagccttgtggattttccacacagcagcttttcactgtatgcctgtacttgggctgcactgagcttgtcttcaggaaaccagagcgttgctttatcatcgcacttttcatcttggtaatatcaaaacaactttttaaatgaactgattgatatatgttatttcttgcgaggttttcctctggcctttaactggcttctgaggctacagaactccaacccagagttcttcgggacctaaattttgcttaaggaaggcctttatcatgctgaaagcactcagacatgtctgtcctcacagcagaatgtagaagtcatatgaatgagggatcgtgcacggtagcgtcagcccgaattgacacgacaactctgaatgtgtggccctctatgaaagctggtgccagttttcatcactgttattaaatactagattgggaacctcattcagccgtattgcacagatgagcaattacagcagagaaaattcattagtgctcccactcatatccttatgtgtgagttggtgaaatttagcctgagcttgattcttaggtcttgagactcagtttccaacaccttcattattaatgttaagaatggccatataccacttcatttacgtaaaaggaataaaataagcaagttaagcttcagggtcctagaatttttctgatttctataatccttcagcagaatattaagaaataaagcatgatctgcaatggaaaggtttttttggcactaacttcatgcagaatttcacagacatctatgcattaatttaaattcttggtgcaaatgtgtgctttgtagttcaaccttattaaaaattcttcagccagttaggatttcaaaatacattagtgagagtaacagctagcagaataattacaatggctaaaacgtttttatagagaatcttgtttttcaaaaaagaataaaaagtttgaatagctattattaaagaaaagccatgtcttcaacatctgagtcaccaagaagtaacactttttaaacttgttagaaatccctggaggcatttcaaattcatcttctaacctacctaagcactttaaaatacagcctccttctgttcctctgttccccttcatgcctccttttgaattgatatctcagctgtcaatatttctttgacttcagcattgttattttatttctctatatcaatgtgtccttagttttcttagcctgttaatttaaaaatccagacttgggggtcattgtgttgctacccaagagaaaatgctacagttttatagattgcacatcattctttaaggcatacttttacctcaggaaacttactctagtatgttctcatatattgaattctcaactaagtaactatttctttatacctataaactagtacctaattcactgttagttaaatgagctatagataaggcagctaaatttctgaaagatagccagagtaagtaagcagccactgcaagctctgaatcagttttttaaaaaaaagaaaaaaaaaaaaaaggagctgtgccccattgaacaatgacaacatcacaaggggaagggagggattttgccaaaagttagaaaggtggagctgtaagccatgtgcttgttgcctttgacagtgacagtgcgcgtcttacaactaattccactaggcatgggaatgtcacctcctttgccactgtaccccatcaagcttactctgaatcaaaggttttgtaaaacttttgaaaatgaacttagctgcaaaatatagctaaccactttccattgcaagctttgcaaagtgaagagaggttcgtacttctcataattggtatttagcacaattgtaagatacagttttactgtttgtacatcgtttttttccattaaacttttctagagaagacaaaagcttacactggtgacatggataagtgagatggtgtctaacgagcagtgcaatattaggcggtgcaatagaggccctgttggcaagatgagttttgctggagagctggacagtgttggttagcttcctgcattgattgcccctgggcgttcttcccccttaactgtgaaagcagagtctataaatgaactctttgctcttacaaggtaatttacatattttctttctgttgaaataactgaaaatgttaaatctaccagtttatgtcttgtaaacagagtgtcatatgtatttaagttgtgtatttttataaagtaaagccaagtatcaaacaccgg

SEQ ID NO: 127770 - DNA, 1625 bp, Homo sapiens
  Payload ID: 5009
  Gene Symbol: DNAJC28
  Gene Name: DnaJ (Hsp40) homolog, subfamily C, member 28
  Uniprot ID: Q9NX36
  ENST ID: ENST00000314399
  CDS Start-End: 440-1606
gcagaggcgcggcaggggggcgggagccgcggaacccctaccccaggtctgcgcaggtgaggagggggcggggcaggaccgacctcccttgccatgataaccaccttcgcagccggctcccagaccgttggcaccgattgcctagaaaatagggggtctcaggagctccgttttagcgtttatatatcccaattccaattaagccacttccagtattttttggccattgtcagtgtacaagtcttcctcctcttcgagaccatgttattgcaatagcagcaaacgtgttgggaggcctcacaattcatcatggtttttctggcctctggcagatagctccttcctagcgagctgtggagcttaaagtcttttggacacttgattctattcaatccagtatcagaccaggtcattgctaggaagaactctgggtacaataatgaatacaatgtatgtgatgatggctcagatcttaagatctcacctgataaaggctacagtgattcctaatcgagtgaaaatgcttccatattttggtatcattagaaatagaatgatgtcaacccataaatccaaaaagaagatcagagaatattatagactgctgaacgtggaggaaggatgctctgcagatgaagtcagggaatcttttcataagcttgccaagcaatatcatcctgacagtggctctaatactgctgattctgcaacatttataaggattgaaaaagcttatagaaaggtgctctcccatgtgatagaacaaacaaatgccagtcagagtaaaggtgaagaagaagaagatgtagaaaaattcaaatataaaacaccccaacaccgacattatttaagttttgaaggtattggttttgggactccaactcaacgagagaagcattataggcaatttagggcagaccgtgctgctgaacaagtgatggaatatcaaaagcagaaactacaaagccagtattttcctgatagtgtaattgttaaaaatataagacagagcaaacagcaaaagataacgcaagctatagaacgtttagtggaggacctcattcaagaatccatggcaaaaggagactttgacaatctcagtgggaaaggaaaacctctgaaaaagttttctgactgttcttacattgatcccatgactcacaacctgaaccgaatactgatcgataatggataccaaccagaatggatccttaagcaaaaggaaataagcgatactattgagcaactcagagaggcaattttagtgtctaggaaaaaacttgggaatccaatgacaccaactgaaaagaaacagtggaaccatgtttgtgagcagtttcaagaaaacatcagaaaattaaacaagcgaattaatgattttaatttaattgttcccatcctgaccaggcaaaaagtccattttgatgctcagaaagaaattgtcagagcccagaaaatatacgagacccttataaaaacaaaagaagtcacagatagaaacccaaataaccttgatcaaggagaaggagagaaaacacctgaaatcaagaaaggttttttaaactggatgaatctgtggaaatttattaaaatacgatcattttgatgtttactatcataaatca

SEQ ID NO: 127771 - DNA, 1354 bp, Homo sapiens
  Payload ID: 5009
  Gene Symbol: DNAJC28
  Gene Name: DnaJ (Hsp40) homolog, subfamily C, member 28
  Uniprot ID: Q9NX36
  ENST ID: ENST00000381947
  CDS Start-End: 151-1317
agctggtggtccccggtcgggacgaaggctcccgaggtgccctgcctgggtcctccggggtaaagttcgtttggcggaagattgtccgttttcctggtaaggtcacctgtcccaatcaggtcattgctaggaagaactctgggtacaataatgaatacaatgtatgtgatgatggctcagatcttaagatctcacctgataaaggctacagtgattcctaatcgagtgaaaatgcttccatattttggtatcattagaaatagaatgatgtcaacccataaatccaaaaagaagatcagagaatattatagactgctgaacgtggaggaaggatgctctgcagatgaagtcagggaatcttttcataagcttgccaagcaatatcatcctgacagtggctctaatactgctgattctgcaacatttataaggattgaaaaagcttatagaaaggtgctctcccatgtgatagaacaaacaaatgccagtcagagtaaaggtgaagaagaagaagatgtagaaaaattcaaatataaaacaccccaacaccgacattatttaagttttgaaggtattggttttgggactccaactcaacgagagaagcattataggcaatttagggcagaccgtgctgctgaacaagtgatggaatatcaaaagcagaaactacaaagccagtattttcctgatagtgtaattgttaaaaatataagacagagcaaacagcaaaagataacgcaagctatagaacgtttagtggaggacctcattcaagaatccatggcaaaaggagactttgacaatctcagtgggaaaggaaaacctctgaaaaagttttctgactgttcttacattgatcccatgactcacaacctgaaccgaatactgatcgataatggataccaaccagaatggatccttaagcaaaaggaaataagcgatactattgagcaactcagagaggcaattttagtgtctaggaaaaaacttgggaatccaatgacaccaactgaaaagaaacagtggaaccatgtttgtgagcagtttcaagaaaacatcagaaaattaaacaagcgaattaatgattttaatttaattgttcccatcctgaccaggcaaaaagtccattttgatgctcagaaagaaattgtcagagcccagaaaatatacgagacccttataaaaacaaaagaagtcacagatagaaacccaaataaccttgatcaaggagaaggagagaaaacacctgaaatcaagaaaggttttttaaactggatgaatctgtggaaatttattaaaatacgatcattttgatgtttactatcataaatcattcttagttccactgaca

SEQ ID NO: 127772 - DNA, 1480 bp, Homo sapiens
  Payload ID: 5009
  Gene Symbol: DNAJC28
  Gene Name: DnaJ (Hsp40) homolog, subfamily C, member 28
  Uniprot ID: Q9NX36
  ENST ID: ENST00000402202
  CDS Start-End: 306-1472
tcccgaggtgccctgcctgggtcctccggggtaaagttcgtttggcggaagattgtccgttttcctggtaaggtcacctgtcccaatcaggtacgattctgccttccgtacccccgagcccctcagtgtaaagtggcaaatggtctagcccggcggaggcaccagctggaggcggtgggagggacacccgcagtgaagggcggaccgcgcacgcatgcgcagaggcgcggcaggggggcgggagccgcggaacccctaccccaggtctgcgcaggtcattgctaggaagaactctgggtacaataatgaatacaatgtatgtgatgatggctcagatcttaagatctcacctgataaaggctacagtgattcctaatcgagtgaaaatgcttccatattttggtatcattagaaatagaatgatgtcaacccataaatccaaaaagaagatcagagaatattatagactgctgaacgtggaggaaggatgctctgcagatgaagtcagggaatcttttcataagcttgccaagcaatatcatcctgacagtggctctaatactgctgattctgcaacatttataaggattgaaaaagcttatagaaaggtgctctcccatgtgatagaacaaacaaatgccagtcagagtaaaggtgaagaagaagaagatgtagaaaaattcaaatataaaacaccccaacaccgacattatttaagttttgaaggtattggttttgggactccaactcaacgagagaagcattataggcaatttagggcagaccgtgctgctgaacaagtgatggaatatcaaaagcagaaactacaaagccagtattttcctgatagtgtaattgttaaaaatataagacagagcaaacagcaaaagataacgcaagctatagaacgtttagtggaggacctcattcaagaatccatggcaaaaggagactttgacaatctcagtgggaaaggaaaacctctgaaaaagttttctgactgttcttacattgatcccatgactcacaacctgaaccgaatactgatcgataatggataccaaccagaatggatccttaagcaaaaggaaataagcgatactattgagcaactcagagaggcaattttagtgtctaggaaaaaacttgggaatccaatgacaccaactgaaaagaaacagtggaaccatgtttgtgagcagtttcaagaaaacatcagaaaattaaacaagcgaattaatgattttaatttaattgttcccatcctgaccaggcaaaaagtccattttgatgctcagaaagaaattgtcagagcccagaaaatatacgagacccttataaaaacaaaagaagtcacagatagaaacccaaataaccttgatcaaggagaaggagagaaaacacctgaaatcaagaaaggttttttaaactggatgaatctgtggaaatttattaaaatacgatcattttgatgtttact

SEQ ID NO: 127773 - DNA, 1480 bp, Homo sapiens; identical to SEQ ID NO: 127772
  Payload ID: 5009
  Gene Symbol: DNAJC28
  Gene Name: DnaJ (Hsp40) homolog, subfamily C, member 28
  Uniprot ID: Q9NX36
  ENST ID: ENST00000573306
  CDS Start-End: 306-1472

SEQ ID NO: 127774 - DNA, 1625 bp, Homo sapiens; identical to SEQ ID NO: 127770
  Payload ID: 5009
  Gene Symbol: DNAJC28
  Gene Name: DnaJ (Hsp40) homolog, subfamily C, member 28
  Uniprot ID: Q9NX36
  ENST ID: ENST00000571432
  CDS Start-End: 440-1606

SEQ ID NO: 127775 - DNA, 1354 bp, Homo sapiens; identical to SEQ ID NO: 127771
  Payload ID: 5009
  Gene Symbol: DNAJC28
  Gene Name: DnaJ (Hsp40) homolog, subfamily C, member 28
  Uniprot ID: Q9NX36
  ENST ID: ENST00000572540
  CDS Start-End: 151-1317

SEQ ID NO: 127776 - DNA, 2237 bp, Homo sapiens
  Payload ID: 5009
  Gene Symbol: DNAJC28
  Gene Name: DnaJ (Hsp40) homolog, subfamily C, member 28
  Uniprot ID: Q9NX36
  ENST ID: ENST00000617313
  CDS Start-End: 440-1606
gcagaggcgcggcaggggggcgggagccgcggaacccctaccccaggtctgcgcaggtgaggagggggcggggcaggaccgacctcccttgccatgataaccaccttcgcagccggctcccagaccgttggcaccgattgcctagaaaatagggggtctcaggagctccgttttagcgtttatatatcccaattccaattaagccacttccagtattttttggccattgtcagtgtacaagtcttcctcctcttcgagaccatgttattgcaatagcagcaaacgtgttgggaggcctcacaattcatcatggtttttctggcctctggcagatagctccttcctagcgagctgtggagcttaaagtcttttggacacttgattctattcaatccagtatcagaccaggtcattgctaggaagaactctgggtacaataatgaatacaatgtatgtgatgatggctcagatcttaagatctcacctgataaaggctacagtgattcctaatcgagtgaaaatgcttccatattttggtatcattagaaatagaatgatgtcaacccataaatccaaaaagaagatcagagaatattatagactgctgaacgtggaggaaggatgctctgcagatgaagtcagggaatcttttcataagcttgccaagcaatatcatcctgacagtggctctaatactgctgattctgcaacatttataaggattgaaaaagcttatagaaaggtgctctcccatgtgatagaacaaacaaatgccagtcagagtaaaggtgaagaagaagaagatgtagaaaaattcaaatataaaacaccccaacaccgacattatttaagttttgaaggtattggttttgggactccaactcaacgagagaagcattataggcaatttagggcagaccgtgctgctgaacaagtgatggaatatcaaaagcagaaactacaaagccagtattttcctgatagtgtaattgttaaaaatataagacagagcaaacagcaaaagataacgcaagctatagaacgtttagtggaggacctcattcaagaatccatggcaaaaggagactttgacaatctcagtgggaaaggaaaacctctgaaaaagttttctgactgttcttacattgatcccatgactcacaacctgaaccgaatactgatcgataatggataccaaccagaatggatccttaagcaaaaggaaataagcgatactattgagcaactcagagaggcaattttagtgtctaggaaaaaacttgggaatccaatgacaccaactgaaaagaaacagtggaaccatgtttgtgagcagtttcaagaaaacatcagaaaattaaacaagcgaattaatgattttaatttaattgttcccatcctgaccaggcaaaaagtccattttgatgctcagaaagaaattgtcagagcccagaaaatatacgagacccttataaaaacaaaagaagtcacagatagaaacccaaataaccttgatcaaggagaaggagagaaaacacctgaaatcaagaaaggttttttaaactggatgaatctgtggaaatttattaaaatacgatcattttgatgtttactatcataaatcattcttagttccactgacactttacatggaaaatgagatttattgctataatacaagaatttaagaattgtgccattgtacttatcacaaaactaatcacatagccaatgatgtgtgagtgagaaacctatcaggtttgtcctgaggatatagcaagaaaagaaaataactgaaactcctttttttttgagacggcgtctcgctctgtcacccaggctggagtgcaatggcacaatctaggctcactgcaacctctgcttcccaggttcaagtgattatcctgcctcagactcccgaatagctgggattataggcacacaccaccatacccggctatttttgtattttgttttctttttttttgagacagagtctcactctgtcgcccaggctgggtgacagagcaagactccgtcttaaaaaaaaaaaaaaagtgggaattagacgtaagaggcttaactgcattacagcaacatagatgaacaaaaccattttccatattggtcaatgagaaggtaaggttaccagaaaatgtcagtaaatttttaatttcagcacagtgcactttatgtttgtaaatgttgtctatgttaataaagttactataataatt

SEQ ID NO: 127777 - DNA, 2237 bp, Homo sapiens; identical to SEQ ID NO: 127776
  Payload ID: 5009
  Gene Symbol: DNAJC28
  Gene Name: DnaJ (Hsp40) homolog, subfamily C, member 28
  Uniprot ID: Q9NX36
  ENST ID: ENST00000615701
  CDS Start-End: 440-1606

SEQ ID NO: 127778 - DNA, 2273 bp, Homo sapiens
  Payload ID: 5010
  Gene Symbol: DNAJC3
  Gene Name: DnaJ (Hsp40) homolog, subfamily C, member 3
  ENST ID: ENST00000376795
  CDS Start-End: 99-1460
cgagagccgacggcgggcgggcgcagctgctgccggagcgccggcgcgtgctggtgggccacacacctttcctcctcttcactcgcgagccctcggacatggtggcccccggctccgtgaccagccggctgggctcggtattccccttcctgctagtcctggtggatctgcagtacgaaggtgctgaatgtggagtaaatgcagatgttgagaaacatcttgaattgggcaagaaattacttgcagctggacagctagctgatgctttatctcagtttcatgctgccgtagatggtgaccctgataactatattgcttattatcggagggctactgtctttttagctatgggcaaatcaaaagctgcacttcctgatttaactaaagtgattcaattgaagatggacttcactgcagcaagattacagagaggtcacttattactcaaacaaggaaaacttgatgaagcagaagatgattttaaaaaagtggtttgtgtttgggatgcagaactacgggaacttcgagctgaatgttttataaaagaaggagaacctaggaaagctataagtgacttaaaagctgcgtcaaagttgaagaatgataatactgaagcgttttataaaataagcacactgtactaccaactaggagaccacgaactgtccctcagtgaagttcgggaatgtcttaaacttgaccaggatcataaaaggtgttttgcacactataaacaagtaaagaaacttaataagctgattgagtcagctgaagagctcatcagagatggcagatacacagatgctaccagcaaatatgaatctgtcatgaaaacagagccaagcattgctgaatatacagttcgttcaaaggagaggatttgccactgcttttctaaggacgagaagcctgttgaagctattagggtttgttctgaagttttacagatggaacctgacaatgtgaatgccctgaaagatcgagcagaggcctatttgatagaggaaatgtatgatgaagctattcaggattatgaaactgctcaggaacacaatgaaaatgatcagcagattcgagaaggtctagagaaagcacaaagattattgaaacagtcgcagaaacgagattattataaaatcttgggagtaaaaagaaatgccaaaaagcaagaaattattaaagcataccgaaaattagcactgcagtggcacccagataacttccagaatgaagaagaaaagaaaaaagctgagaaaaagttcattgatatagcagctgctaaagaagtcctctctgatccagaaatgagaaagaagtttgacgacggagaagatcctttggatgcagagagccagcaaggaggcggcggcaaccctttccacagaagctggaactcatggcaagggttcaatcccttcagctcaggcggaccatttagatttaaattccacttcaattaaaccaactgtttttctgctcttcttaatttttttaaagattaaaaacaaagaaatcttgttccgggaccctaatgaaaaaaaatttcaaatcttttcagtttgtccatgaccaaagagttgctttaataggaaaaaatctgttcttatccctgtcagatttatggttaatgggtttgcaacggcaaggaggcaaggaatggttctatttctgacagagcagcctgcatctgctttatgctgtctggagggaagtggtctgaggcaggctcacccgtggaagtgctcacgtattctgtattatttttctacactggagctgagattcttctcttcacagccttgcagagtaagtcagtgcctacaagtgtaagaaggagctgtaatcttcatgaggatggttatacttcagtattcttaaagagaacatgaacatttttgagctgtatgttcttagggacaactgtgcttcgatgtggtcagtctcgtcacttgtgagtagctgtgaaatctttagtgtgcatgtgtttgcacctctgtggtctgtcaacgtggctgtcactgaaggagcaagagaccatcttttaggaaccctgccaccaaataataatatatccaggcttagactttggattaatgttaaatgtacatttttttggttcagtacctgaagaagaatactgaaacttgaatctataaattcctatggacccttttaatattaaacacaacaaattaaaagttgttataggtaaaataagttcagataaaatagtggtggtatttaaaataatattgctgaagtgcagattgaaa

SEQ ID NO: 127779 - DNA, 5591 bp, Homo sapiens
  Payload ID: 5010
  Gene Symbol: DNAJC3
  Gene Name: DnaJ (Hsp40) homolog, subfamily C, member 3
  Uniprot ID: Q13217
  ENST ID: ENST00000602402
  CDS Start-End: 118-1632
agagccactgaggcctgagcgagagccgacggcgggcgggcgcagctgctgccggagcgccggcgcgtgctggtgggccacacacctttcctcctcttcactcgcgagccctcggacatggtggcccccggctccgtgaccagccggctgggctcggtattccccttcctgctagtcctggtggatctgcagtacgaaggtgctgaatgtggagtaaatgcagatgttgagaaacatcttgaattgggcaagaaattacttgcagctggacagctagctgatgctttatctcagtttcatgctgccgtagatggtgaccctgataactatattgcttattatcggagggctactgtctttttagctatgggcaaatcaaaagctgcacttcctgatttaactaaagtgattcaattgaagatggacttcactgcagcaagattacagagaggtcacttattactcaaacaaggaaaacttgatgaagcagaagatgattttaaaaaagtgctcaaatctaatccaagtgaaaatgaagaaaaggaagcacagtctcaacttataaaatctgatgaaatgcagcgtttgcgttcacaagcacttaacgcttttggaagtggagattatactgctgctatagccttccttgataagattttagaggtttgtgtttgggatgcagaactacgggaacttcgagctgaatgttttataaaagaaggagaacctaggaaagctataagtgacttaaaagctgcgtcaaagttgaagaatgataatactgaagcgttttataaaataagcacactgtactaccaactaggagaccacgaactgtccctcagtgaagttcgggaatgtcttaaacttgaccaggatcataaaaggtgttttgcacactataaacaagtaaagaaacttaataagctgattgagtcagctgaagagctcatcagagatggcagatacacagatgctaccagcaaatatgaatctgtcatgaaaacagagccaagcattgctgaatatacagttcgttcaaaggagaggatttgccactgcttttctaaggacgagaagcctgttgaagctattagggtttgttctgaagttttacagatggaacctgacaatgtgaatgccctgaaagatcgagcagaggcctatttgatagaggaaatgtatgatgaagctattcaggattatgaaactgctcaggaacacaatgaaaatgatcagcagattcgagaaggtctagagaaagcacaaagattattgaaacagtcgcagaaacgagattattataaaatcttgggagtaaaaagaaatgccaaaaagcaagaaattattaaagcataccgaaaattagcactgcagtggcacccagataacttccagaatgaagaagaaaagaaaaaagctgagaaaaagttcattgatatagcagctgctaaagaagtcctctctgatccagaaatgagaaagaagtttgacgacggagaagatcctttggatgcagagagccagcaaggaggcggcggcaaccctttccacagaagctggaactcatggcaagggttcaatcccttcagctcaggcggaccatttagatttaaattccacttcaattaaaccaactgtttttctgctcttcttaatttttttaaagattaaaaacaaagaaatcttgttccgggaccctaatgaaaaaaaatttcaaatcttttcagtttgtccatgaccaaagagttgctttaataggaaaaaatctgttcttatccctgtcagatttatggttaatgggtttgcaacggcaaggaggcaaggaatggttctatttctgacagagcagcctgcatctgctttatgctgtctggagggaagtggtctgaggcaggctcacccgtggaagtgctcacgtattctgtattatttttctacactggagctgagattcttctcttcacagccttgcagagtaagtcagtgcctacaagtgtaagaaggagctgtaatcttcatgaggatggttatacttcagtattcttaaagagaacatgaacatttttgagctgtatgttcttagggacaactgtgcttcgatgtggtcagtctcgtcacttgtgagtagctgtgaaatctttagtgtgcatgtgtttgcacctctgtggtctgtcaacgtggctgtcactgaaggagcaagagaccatcttttaggaaccctgccaccaaataataatatatccaggcttagactttggattaatgttaaatgtacatttttttggttcagtacctgaagaagaatactgaaacttgaatctataaattcctatggacccttttaatattaaacacaacaaattaaaagttgttataggtaaaataagttcagataaaatagtggtggtatttaaaataatattgctgaagtgcagattgaaatactttttaaacaactgaagttctgagtttttatagggaatttcatgtaacaagactggtttagaaacgtaaagttgcgcagtcaacataaataaatacagaatgccatgttctccacttctaagtaaagacagtgggcagcttctgtttctccttctatcaaggcttcaccctatcttaaaggtctgtggtgcctcccacgtgggacctgtctgctggtatgtgttaaacagcagaccggcccttctaccagatcttgatgcctctgattttctcctgcctacaagaaaatacaggcaaggttagtcaggtctggctatatttccactgttgtttcatttaataagatggcatctcctcttgagatatgttcttcttaccttttaagaagatactatttaagaagtgaactattcagtctttgtatactgaatgctttttccctaaaaaatgttaatcaagaatattgaatatttatggcactcttgatgctgcatttgaaagctgaaggaattactttagatagataggaattgctacctttattctggaaaggttttgtttctgcctcaaagcattttgaagtgttttaaccattaaagggtctaatttttttttcttaatgaaatcaagcattttaattcactgtgggaggcatcctgaccacggacatccataacagcaaagcacaaatcgttttcgtctgtagtcatatcctgaaacataggtggacaaatttttaactgagagacaaaaatcacatagttgaattgagcagaacacttaagtgctttctgcatctatttaggagtctatttcttaccaataaacttgacaacgcatttggaaaactagtgaacaccttacagctttcattttgctttaatgtttcaattcaagccggtgtaaaaataatttccaaggcatttctgtttattctttagtaatctcactactggctatgtcagcaatatctttttcaatctggttccttttgtatatgatgtcactgtgacctctttgaaatatagtgatggcttttacctactttgaaaagaattttcacatagagtcagaaaaaaaaggaaatatcaaatcacttgcctttccacttggagagcacgacagttgccaacaacaaggggtcaagggccgcacaggagatgtgtgggggcctggccacctcccacctgctgcccagaggcttgtttgcattttcattttttctccacttgtaacaaccatagtttcagctcctaaattcttatcatggatttacttagtcatcttaactgacctgcagttacttgcctgttttcagtgaagagagagaagcagctctggtgccacatgccagtgccatggagggaaatgaattctctgcaatctgttgtttcgctgattcatgaagaaagtaacaactgttgagtttcagccttgatggctgtcggcagttttctggtgtccacccaaacggagagacagtcactcctgcttaccctaatgtgtgactgagaagcagcctgggtgtgtaaagagatagtcattccccctgcctgtctcactgtagggtagcattatccactgtaaaaccatactactttcattttcccttggggactacaggtgccaggtaacctttttttttttttttttttttttttgagacagaatcttgctctgttgcccaggctggagtgcagggacacctcccgggttcaagcagttctcctgcctcagcctccaagtagctgggactataggcacgcaccaccatgcctggctaatttttgtatttttagtagaaatggggtttcactgtgttagccaggatggtcttgatctcctgaccttgtgatctgcccgccttggccttccaaagtgttgggattacaggcgtgagccactgcgcctggccatcaggtaacctttatggctctttcaggaaaagtgaaatcagagaggcgtaccctagccacagctgttgtattctgctcttctttcctttttggtgagcttcatgggtggagttatcagtggtctgtactttgtggatattttgcccagcaggaagtattagacacatcagtctagaagcattgtgaaaaggttccaaaacgggagacaaaatttaattcattcctcagttctgaaagtttgtgctttcttaccatgaatagatgaaaacttgaaaaaaatcttgacagtttactaatgtgaatcagatgtaacgtactactaattctacaatgcctttctctttagtcagtattaaaaatcttttttaaagtattggtatgaaaacaaatttttgttgccctgataatggaattttaaaactacccacagtttaagagaaaacataacttggtaaaaaaggtagccaataaaaccacaatttgaaattgataccattttctactcacaatggatgatgaaaaatttcacctttaaatgggtcagaagttgtctttgacatttaccatgaaaaaactacataaaatggctccctggtgaggttacagacacggccctggtgatgggcgttgcaaagttttcactgagcacacagcaatggtatcacctagagaagttcacgcaactttgttgaatgtagttgacttttccaaatttataaaggaaggaagaaggcaaatgttaatttgccaacaacgaatatcctttttctaaatcagatcattccttttttgttagtggcagtttatcctgtaatttcaaatgacgttaagaggtgggattatttgggggttttttttgtttgtttacagatgatctcatttgctgaatgattgatttaagagtaaaattagccactgcgtggctttgtgtatagtaaccggttttgttgcacttgtctgtggctgaaacacttacctgcagtggaaagccgagcaaggaggaggtaaacattggagatgtttgtgaaaatattactcttgctgtgaggttttagtttgttttgaatgagaaaagactaagtaacttaatccatctcaatgtagtgttttaataaaaaaggaacctaatatttgaaatgggtctcagacatgtctacaaatatgggtactatttttatgcccgtgtattttcacatttaataaaaatatttatggtcatatcagtat

SEQ ID NO: 127780 - DNA, 2485 bp, Homo sapiens
  Payload ID: 5011
  Gene Symbol: DNAJC30
  Gene Name: DnaJ (Hsp40) homolog, subfamily C, member 30
  Uniprot ID: Q96LL9
  ENST ID: ENST00000395176
  CDS Start-End: 31-711
ctcttgcaccgcctgccgaatcaattcaacatggcagccatgcgctggcgatggtggcagcggctgttaccttggaggttgctgcaggcccgtggctttccacaaaattctgcacccagcctgggcctaggagcgaggacttattcccagggcgactgctcgtattcgcgcacggcgctgtatgatctgctcggcgtcccctccacagccacgcaggcccaaatcaaggcggcttactaccgtcagtgctttctctaccacccggaccgcaactccgggagcgcggaggccgccgagcgcttcacgcgcatctcccaggcctacgtggtgctgggcagtgccaccctccgtcgcaagtatgatcgcggcctactcagcgacgaggacctgcgcggacctggcgtccggccctccaggacgcccgcacccgaccccggctcgccgcgtaccccgccgcccacctctcggacccacgacggttctcgggcctcccccggcgccaaccgcacgatgttcaactttgacgccttctaccaggcccactacggggaacaactggagcgggaacggcgcctgagggcccggcgggaggcccttcgcaaacggcaggagtatcggtccatgaaaggcctccgctgggaggatacccgagacacggctgccattttcctcatcttttcaatcttcatcatcatcggcttttatatttaatcggagagagaagggaaggggagtgtccccagccaaccccccagaaacggccttttttcctgcctctgaacccttggccattgatagtctacctttgctgggatccgaaggaactgtactccccctgccctccccgacccgcccagcttagccgatgacctgcacatcgctccactgtggtccagaaaaggaggcctttcgatgtctgagaaagaggccccacgctgtagagtcccgaaagcccaggagtgaagggggttcctggagtctctagggtgcttcttccagagtctgtcttcttgcttccagatgtggtcaacttctggaacactcgctgtagctttattgtttagccccaagcaagatttatctcctcctgccccgcatgtgtatggtgggcctctgtaaccttgaaatgtgcaatgtgaccaattgttgactaccaaaagaaaaggtctggggttgtacgaaacttgtctttctgtgacttccccaagccgcaggtgagacctggtccagggtaagaatgggatcggtggagagcctgtcgttcctcccgctaaggtcagccccctggggcactcctccttatgttgatagcatgtaggagtgagaaaaagtcattgagcataaggaatgagtgttcctgtgcccatatttaatgtgtgaccttggagaagttactctgtaggcatgacagcagaggagaaaatcatttggcatcttgaggtctgtcatgctttattatccatagtttttggggggttttttgttttgttttgtttttgagatggagtcttgcgctctgttgcccaggctggagtgcagtggtgcgatcttagctcactgcaacctccacctcccgggttcaagcgattctcctgcctcagcctcctgtgtaactgggattacaggctcccaccacacctggctagtgttttgtatttttagtagatacggggtttcaccatgctggccagactgaggtctcgaactgccgacctcaggctgtctgcccgtccagcctcccaaagtgctgggattgcaggcatgagccactgctcccggccctattatccatagttctaatccacagggattacagcataatgctagcagggccaggttcatccttgagacagtgtggctggctgtcacctggtcctccctttaccagccagccccattgcacactgtgcagcccatcccctcccagaaatagagtgacaaactctgcacttaagtcccctgtttctgtttaacttgcagtgcttatcacaggcccttccttaattttttaaacaaggctgcttgaggctggggtaaattttggggctttgggagtacacaggactactgagggacggggagttggtggcttggtgttcatggtggagacttggttctttacgcagagcaggctaaaggcgtgttttttctgctctgtttctaattcatgttaagtagttggtcatcactttggtcagagctgctgctgaagctctcttaactgtgagtcactggacgttggcagggagttggctgtgagattgtaggtgctcaagtgtttctgttcgggactgagtgtgaatctgtaaaaggggaaaatcctcgcaagaggtctacgagaaggatgagggcccaagtctagggtctaaacaaagccaggagtggtttggtatattactgagtgcaatcattgcgtgccattcctgcactcaatgtattgtgtaaaatccttaggtaaaatgggataaacccacagctggtccta

SEQ ID NO: 127781 - DNA, 1015 bp, Homo sapiens
  Payload ID: 5012
  Gene Symbol: DNAJC4
  Gene Name: DnaJ (Hsp40) homolog, subfamily C, member 4
  ENST ID: ENST00000321460
  CDS Start-End: 98-847
aggccccttccctctgcccccgggtgcttgaagtctagccccatcctggtccaatgcgctcttggtagcctcctttcccagctgcccgcccgccgccatgccgcccttactgcccctgcgcctgtgccggctgtggccccgcaaccctccctcccggctcctcggagcggccgccgggcagcggtccagacccagtacttattatgaactgttgggggtgcatcctggtgccagcactgaggaagttaaacgagctttcttctccaagtccaaagagctgcacccagaccgggaccctgggaacccaagcctgcacagccgctttgtggagctgagcgaggcataccgtgtgctcagccgtgagcagagccgccgcagctatgatgaccagctccgctcaggtagtcccccaaagtctccacgaaccacagtccatgacaagtctgcccaccaaacacacagcagctcctggacaccccccaacgcacagtactggtcccagtttcacagcgtgaggccacaggggccccagttgaggcagcagcaacacaaacaaaacaaacaagtgctggggtactgcctcctcctcatgctggcgggcatgggcctgcactacattgccttcaggaaggtgaagcagatgcaccttaacttcatggatgaaaaggatcggatcatcacagccttctacaacgaagcccgggcacgggccaggtctgtccctgctctattctgctccctgctccctgtccaggaaccacacttcgggatccctatcccaaccacccaggtgccctctcctccagggccaacagaggcatccttcagcaggagcgacaacggctagggcagcggcagccgccaccatccgagccaacccaaggccccgagatcgtgccccggggcgccggcccctgaggggctcacctggatggggcctgcagtgcgttcccgctttgcttccttccctggacggcccgctccccgaaacgcgcgcaataaagtgattcgcaga

SEQ ID NO: 127782 - DNA, 759 bp, Homo sapiens
  Payload ID: 5012
  Gene Symbol: DNAJC4
  Gene Name: DnaJ (Hsp40) homolog, subfamily C, member 4
  ENST ID: ENST00000355040
  CDS Start-End: 289-492
aagttccctgggtgggaacggggtcttggggtccctggctgggtggccagaccccgaagccagcgctgggaagggctgcggatgcccgggtcagaggaaggggcaggtccaaggacacgcgggtctggtcctgggcaagaaccgccccctctccgggcctgcttcagtcttcctttgcagaacaacgggccaggccccttccctctgcccccgggtgcttgaagtctagccccatcctggtccaatgcgctcttggtagcctcctttcccagctgcccgcccgccgccatgccgcccttactgcccctgcgcctgtgccggctgtggccccgcaaccctccctcccggctcctcggagcggccgccgggcagcggtccagacccagtacttattatgaactgttgggggtgcatcctggtgccagcactgaggaagttaaacgagctttcttctccaagtccaaagaggaaggtgaagcagatgcaccttaacttcatggatgaaaaggatcggatcatcacagccttctacaacgaagcccgggcacgggccaggtctgtccctgctctattctgctccctgctccctgtccaggaaccacacttcgggatccctatcccaaccacccaggtgccctctcctccagggccaacagaggcatccttcagcaggagcgacaacggctagggcagcggcagccgccaccatccgagccaacccaaggccccgagatcgtgccccggggcgccggcccctga

SEQ ID NO: 127783 - DNA, 1288 bp, Homo sapiens
  Payload ID: 5012
  Gene Symbol: DNAJC4
  Gene Name: DnaJ (Hsp40) homolog, subfamily C, member 4
  Uniprot ID: Q9NNZ3
  ENST ID: ENST00000321685
  CDS Start-End: 466-1191
acaaagccgcagagagcgggctctgtcccgcccgctccccaggtggacgtggtcttggcatccacgccaatgagaatgtgagggcggggcctgaatagacgcaggaaatggcgacggccgcgggtctgtgagcagcgggggcggggcctggttgtggcccctccttctcccgtccccaagttccctgggtgggaacggggtcttggggtccctggctgggtggccagaccccgaagccagcgctgggaagggctgcggatgcccgggtcagaggaaggggcaggtccaaggacacgcgggtctggtcctgggcaagaaccgccccctctccgggcctgcttcagtcttcctttgcagaacaacgggccaggccccttccctctgcccccgggtgcttgaagtctagccccatcctggtccaatgcgctcttggtagcctcctttcccagctgcccgcccgccgccatgccgcccttactgcccctgcgcctgtgccggctgtggccccgcaaccctccctcccggctcctcggagcggccgccgggcagcggtccagacccagtacttattatgaactgttgggggtgcatcctggtgccagcactgaggaagttaaacgagctttcttctccaagtccaaagagctgcacccagaccgggaccctgggaacccaagcctgcacagccgctttgtggagctgagcgaggcataccgtgtgctcagccgtgagcagagccgccgcagctatgatgaccagctccgctcaggtagtcccccaaagtctccacgaaccacagtccatgacaagtctgcccaccaaacacacagctcctggacaccccccaacgcacagtactggtcccagtttcacagcgtgaggccacaggggccccagttgaggcagcagcaacacaaacaaaacaaacaagtgctggggtactgcctcctcctcatgctggcgggcatgggcctgcactacattgccttcaggaaggtgaagcagatgcaccttaacttcatggatgaaaaggatcggatcatcacagccttctacaacgaagcccgggcacgggccagggccaacagaggcatccttcagcaggagcgacaacggctagggcagcggcagccgccaccatccgagccaacccaaggccccgagatcgtgccccggggcgccggcccctgaggggctcacctggatggggcctgcagtgcgttcccgctttgcttccttccctggacggcccgctccccgaaacgcgcgcaataaagtgattcgcaga

SEQ ID NO: 127784 - DNA, 502 bp, Homo sapiens
  Payload ID: 5012
  Gene Symbol: DNAJC4
  Gene Name: DnaJ (Hsp40) homolog, subfamily C, member 4
  ENST ID: ENST00000535246
  CDS Start-End: 1-502
tgaactgttgggggtgcatcctggtgccagcactgaggaagttaaacgagctttcttctccaagtccaaagagccgtgagcagagccgccgcagctatgatgaccagctccgctcaggtagtcccccaaagtctccacgaaccacagtccatgacaagtctgcccaccaaacacacagctcctggacaccccccaacgcacagtactggtcccagtttcacagcgtgaggccacaggggccccagttgaggcagcagcaacacaaacaaaacaaacaagtgctggggtactgcctcctcctcatgctggcgggcatgggcctgcactacattgccttcaggaaggtgaagcagatgcaccttaacttcatggatgaaaaggatcggatcatcacagccttctacaacgaagcccgggcacgggccagggccaacagaggcatccttcagcaggagcgacaacggctagggcagcggcagccgccaccatccgagccaaccca

SEQ ID NO: 127785 - DNA, 693 bp, Homo sapiens
  Payload ID: 5012
  Gene Symbol: DNAJC4
  Gene Name: DnaJ (Hsp40) homolog, subfamily C, member 4
  ENST ID: ENST00000536006
  CDS Start-End: 204-347
ccgggtcagaggaaggggcaggtccaaggacacgcgggtctggtcctgggcaagaaccgccccctctccgggcctgcttcagtcttcctttgcagaacaacgggccaggccccttccctctgcccccgggtgcttgaagtctagccccatcctggtccaatgcgctcttggtagcctcctttcccagctgcccgcccgccgccatgccgcccttactgcccctgcgcctgtgccggctgtggccccgcaaccctccctcccggctcctcggagcggccgccgggcagcggaggctcccaggtttgtctcaggtaaccctcgccttccctgctgaggatcagagatagagaagacccccaaggtcatacaccgatttaagcggcagaggaggaagtttgagtccaggtccagacccagtacttattatgaactgttgggggtgcatcctggtgccagcactgaggaagttaaacgagctttcttctccaagtccaaagagctgcacccagaccgggaccctgggaacccaagcctgcacagccgctttgtggagctgagcgaggcataccgtgtgctcagccgtgagcagagccgccgcagctatgatgaccagctccgctcaggtagtcccccaaagtctccacgaaccacagtccatgacaagtctgcccaccaaacacacagctcctggac

SEQ ID NO: 127786 - DNA, 938 bp, Homo sapiens
  Payload ID: 5012
  Gene Symbol: DNAJC4
  Gene Name: DnaJ (Hsp40) homolog, subfamily C, member 4
  ENST ID: ENST00000628077
  CDS Start-End: 466-669
acaaagccgcagagagcgggctctgtcccgcccgctccccaggtggacgtggtcttggcatccacgccaatgagaatgtgagggcggggcctgaatagacgcaggaaatggcgacggccgcgggtctgtgagcagcgggggcggggcctggttgtggcccctccttctcccgtccccaagttccctgggtgggaacggggtcttggggtccctggctgggtggccagaccccgaagccagcgctgggaagggctgcggatgcccgggtcagaggaaggggcaggtccaaggacacgcgggtctggtcctgggcaagaaccgccccctctccgggcctgcttcagtcttcctttgcagaacaacgggccaggccccttccctctgcccccgggtgcttgaagtctagccccatcctggtccaatgcgctcttggtagcctcctttcccagctgcccgcccgccgccatgccgcccttactgcccctgcgcctgtgccggctgtggccccgcaaccctccctcccggctcctcggagcggccgccgggcagcggtccagacccagtacttattatgaactgttgggggtgcatcctggtgccagcactgaggaagttaaacgagctttcttctccaagtccaaagaggaaggtgaagcagatgcaccttaacttcatggatgaaaaggatcggatcatcacagccttctacaacgaagcccgggcacgggccagggccaacagaggcatccttcagcaggagcgacaacggctagggcagcggcagccgccaccatccgagccaacccaaggccccgagatcgtgccccggggcgccggcccctgaggggctcacctggatggggcctgcagtgcgttcccgctttgcttccttccctggacggcccgctccccgaaacgcgcgcaataaagtgattcgc

SEQ ID NO: 127787 - DNA, 5213 bp, Homo sapiens
  Payload ID: 5013
  Gene Symbol: DNAJC5
  Gene Name: DnaJ (Hsp40) homolog, subfamily C, member 5
  Uniprot ID: Q9H3Z4
  ENST ID: ENST00000360864
  CDS Start-End: 154-750
acccgcgccctctgccgccgccgccgccgccgcccggggtctccaggctgaggagtgcgtcggccgctgcccagcagcgccgcgaatcggggagcggagccgcggagccggcgggagggcgggcgggcgggcggacgggcagaatagcctaacatggcagaccagagacagcgctcactgtctacctctggggagtcattgtaccacgtccttgggttggacaagaacgcaacctcagatgacattaaaaagtcctatcggaagcttgccttgaaatatcaccccgacaagaaccccgacaacccggaggccgcggacaagtttaaggagatcaacaacgcgcacgccatcctcacggacgccacaaaaaggaacatctacgacaagtacggctcgctgggtctctacgtggccgagcagtttggggaagagaacgtgaacacctacttcgtgctgtccagctggtgggccaaggccctgtttgtcttctgcggcctcctcacgtgctgctactgctgctgctgtctgtgctgctgcttcaactgctgctgcgggaagtgtaagcccaaggcgcctgaaggcgaggagacggagttctacgtgtcccccgaggatctggaggcacagctgcagtctgacgagagggaggccacagacacgccgatcgtcatacagccggcatccgccaccgagaccacccagctcacagccgactcccaccccagctaccacactgacgggttcaactaaatccaggaggagctgtggtcagaggaggagccggcgcctggccacgccaaccttagaatcatgaactgtagtcacagagatgggaaggcagcctcctgcctgccctggccttgctggggcccctcctgcctccacgcccacccagcgtcgacccttgacccacgaagtgcgtagcatgcagtatttaaagcagtgtagctacggtcttctgtttttttcccttttttaatagcatgtatggggttctgttccatgtctgtgttgtggacattccgcggcatgaccgcgtgaactgcacggtggagctgcctcagggctgtcggtcaggttggtccagtgaggggtgactgcagccggtcaggtgggcgaggagaaggggggctgcccctttcctacctgtgcttgaggggccggaggcaggtgctgcctggcagagctgtgttaccgtcttggcctcggggtctggtccacactctgtgctcccagccttgaggctgcagtaggactctgatctcacctgccagaagagaggcggggccgcgtcctcctggcgtcaccggcgtcactgtcattccttggtgtctgtgctgggcatggttggcttgggggtctgtggtttcctgggccttgtggcagggtttctcccgtgggagaatttggtgtggaaagcataggaggccccttccgaggttgacaccgtgtcctccgcggtgtttctcgcctggtcgtctcgtcgtgtggacgctgccgttctggttctcggaggtgtgtccttcgccgtgttggggttatttgtctgtgttcctgcacttttcccgggctctgagctggattgatggggccagtctcccccctcccatcttgaggtcgttctccacattccttccagcacacctgtcctttccatagccctttttggacctttagaaccacagatgataggaccagcccaatgagccacagtcagagagtagattgtgcatgtgtgagcacccagctactggggacgggggctctcccacgacccctcctcctgtgtttgccagagctcccatctgccccactcgcctttgccccgtcatcgatgattcaggcagagccagattcgttaggtccctggaggaaggactgactggaccagagggaccctctggctcaggagggttgggtccctgggaggccggcagccaggccacagaatccacacgtggaccattgtgggtccctgggaggccggcagccaggccacggaatccacacgtggaccattgtgggtcccttgggaggccagcagccagactacggaatccacatgtggaccatgggaagtcagtctcttgcgtgtcctagaccttgtgggtggcgccctgcataggggagcagggggaacgggtctgatgtccctgtgctggctgagggctcagagctgcccgcactccgtagctcatgggatgtgctgggcctgcctttggcgccatgctgcagactccagtgggcctggtttctgcagaatgtccatggtggccgctgcagagttgcagaggtccctgtagagataaagctgaggaggaggctgtgtgtgatggctctggctcggaccaaccagatgagcctcctgaagcccccttccctgcctgcctgctgacccgtggccccagctcactcattgccctcagcagccacccgaggctgtgcagaagggtaggttcaggttgaccaggaagctgccaaaagggacatggatatgaggatacatctggacgtgcttaggaacagggtgctggttgagggcccccagctgacccctactgcagatccgcatgtggaccatgagccggctgccagcactaggtcctgggcagctttgtttgtcccacttttctttgtttcttctcactaaaatgatcacgaagacctttgacaagaggagagatatgcactgtgatattaaattagaaataatttatcaaaatcagacctctcctaaaagaataagaaattcattgtttggcccatcctgaaaggtgaggtggcgagacagtggggtgcctccgtgccgcttcgtgcagcagcaagttcagcctgagatgctggctgtactcagcctttgcaatttttgtagatgtagcttaggacgtgagttatttttccgcagactggccaagagccaggttctaagcttggacctaaggtagaaagctgcccatcgggggccctagctcagccccaccaggccctctgttgggcctgcacacagctctgtggctagaacactccaaggcccttcggtacccatcagagtgggccccttgccaggtggcttttcagttacagagtccagtggaccattttgtagaaccatgcagctccctgcggaaggtggggtagggtgggaaagaggagcaggtctggaggtttgtggaacccagtcccctgcagaatctgtaaaacctaataaatcatggttgtggccattctcacggtggtgattgtgattagacgacccccgggaagcccagacactcggggcctggagttcctccccctgcctgacctagaagcagaaccgttttcagcgctctgccctgttggctttaaggctttgtcttaatttaaggaaaaagatcctcccgggttttatttctctctttcttgagtggactgtttccctataattaaaagaggtggtgagtcctggggcagcttccgcgcctccctgtccacgtgctaacagatcaggacgcccccagcacccctgcctgcttttgctggtggcagtgacgggaccccgactcctcactctcgggccgcagacaatgctgtgagcaagtgtggccatgggcacagaatgtccctttggacgccgctgctgggggctgccaggggccctctggggtcgtgctttgaggcccgtccggttcacgagggggtccgggcagcactgactgcttccgacctgcaggaggcgtaggagcggccctgcgggccctttcacggcagctgctgctgtatagatttgtctccactcagtgacgtgggatttttttgtcttccttttggctttatttttaaactgctttagatattactgctcagtgtttgtgaactttcctagttctctatgttgttagtgcagccagcacccagtggggacctactagaaaaaggaactggcatgcacacgtgcccagcaggaaaagcttcgtcttcacgtcggctgctgccatccagaagaggccctggagcctcacgccgtcgaggctgctctcaggcgttctgttccgggcgaggcttgtgctgcaaggaagggcaccagcatgcaggctgccactggagggtccgggtgctgcgggcagagttcagcgcttgtccaccctcccttagctctgactcagtgcatcctactgtggggacatctcgtgaggggacacgaaatgactgatctcaccctttcccagtattcagagctgtgaacccctgtggcgcaggactggcctgtgtctgttattttggttgtaaatcattctcctgtggaattggcaaaagctacatttttactgtccttaccagcaacagtttgcgtcgtcacatgctgtgagtgtgggctgtggtgtgtccgtgtgtgtacatatgtgtatatgtatatatcacgcagcaggagtgtcattcatgctgctgtcccctggtgaagtgacaagtacaattaaaggtggctctgaaatggcctctggtttcttgggagtcgggcagggacctgcaggaggctttcccagcaggtgcacagaaggaagcgctgagcccactgtgtgcagagggtgtgtgcccagggcactgccacggcccccaccagcattggcctctgctctgcagggtggggtgcccatcctgggggctgtgtgtcatgctcacctgacccaggtgtgtgtcccggtgtgaaatcgaggaggggactggaagcccttccctgccttgaaacatgaaagctgattttctgagcagcagatacggtcagtggcaaagctgcatctgaagggcggcctgggaaggggccctgtgctggccccgggtccgccccagaggagtccacacagcaccacctccagaaggggctgggcccggggtcctgcaggcggcaccttttggtagagtttgtttccctggaaaatggggaaaatgtttcaagccaggtgaggggggaagttaacactgaaatatgtattgtttttaaaaatcaaatgcacacgcatggaagctgcttgtccatgcactggttttgtcactggcgtcctggaatccgaccgtgttggggtgcaggcgctgtcagactccggctgatcctggctcgagcacacacatctaagggccaggctggttccgcatggtgatctccgtcttgtatgtctgaatgttggcctaaaataaagattactgttgtaaaataaatgttttcactgcggacccca

SEQ ID NO: 127788 - DNA, 5287 bp, Homo sapiens
  Payload ID: 5013
  Gene Symbol: DNAJC5
  Gene Name: DnaJ (Hsp40) homolog, subfamily C, member 5
  Uniprot ID: Q9H3Z4
  ENST ID: ENST00000470551
  CDS Start-End: 154-657
acccgcgccctctgccgccgccgccgccgccgcccggggtctccaggctgaggagtgcgtcggccgctgcccagcagcgccgcgaatcggggagcggagccgcggagccggcgggagggcgggcgggcgggcggacgggcagaatagcctaacatggcagaccagagacagcgctcactgtctacctctggggagtcattgtaccacgtccttgggttggacaagaacgcaacctcagatgacattaaaaagtcctatcggaagcttgccttgaaatatcaccccgacaagaaccccgacaacccggaggccgcggacaagtttaaggagatcaacaacgcgcacgccatcctcacggacgccacaaaaaggaacatctacgacaagtacggctcgctgggtctctacgtggccgagcagtttggggaagagaacgtgaacacctacttcgtgctgtccagctggtgggccaaggccctgtttgtcttctgcggcctcctcacgtgctgctactgctgctgctgtctgtgctgctgcttcaactgctgctgcgggaagtgtaagcccaaggcgcctgaaggcgaggagacggagttctacgtgtcccccgaggatctggaggcacagctgcagtctgacgagaggggagggcactgacactgtgccgcgagtgtttgtggtggcagctgggactgttgaggtgtgaacgtggaccctgagaggccacagacacgccgatcgtcatacagccggcatccgccaccgagaccacccagctcacagccgactcccaccccagctaccacactgacgggttcaactaaatccaggaggagctgtggtcagaggaggagccggcgcctggccacgccaaccttagaatcatgaactgtagtcacagagatgggaaggcagcctcctgcctgccctggccttgctggggcccctcctgcctccacgcccacccagcgtcgacccttgacccacgaagtgcgtagcatgcagtatttaaagcagtgtagctacggtcttctgtttttttcccttttttaatagcatgtatggggttctgttccatgtctgtgttgtggacattccgcggcatgaccgcgtgaactgcacggtggagctgcctcagggctgtcggtcaggttggtccagtgaggggtgactgcagccggtcaggtgggcgaggagaaggggggctgcccctttcctacctgtgcttgaggggccggaggcaggtgctgcctggcagagctgtgttaccgtcttggcctcggggtctggtccacactctgtgctcccagccttgaggctgcagtaggactctgatctcacctgccagaagagaggcggggccgcgtcctcctggcgtcaccggcgtcactgtcattccttggtgtctgtgctgggcatggttggcttgggggtctgtggtttcctgggccttgtggcagggtttctcccgtgggagaatttggtgtggaaagcataggaggccccttccgaggttgacaccgtgtcctccgcggtgtttctcgcctggtcgtctcgtcgtgtggacgctgccgttctggttctcggaggtgtgtccttcgccgtgttggggttatttgtctgtgttcctgcacttttcccgggctctgagctggattgatggggccagtctcccccctcccatcttgaggtcgttctccacattccttccagcacacctgtcctttccatagccctttttggacctttagaaccacagatgataggaccagcccaatgagccacagtcagagagtagattgtgcatgtgtgagcacccagctactggggacgggggctctcccacgacccctcctcctgtgtttgccagagctcccatctgccccactcgcctttgccccgtcatcgatgattcaggcagagccagattcgttaggtccctggaggaaggactgactggaccagagggaccctctggctcaggagggttgggtccctgggaggccggcagccaggccacagaatccacacgtggaccattgtgggtccctgggaggccggcagccaggccacggaatccacacgtggaccattgtgggtcccttgggaggccagcagccagactacggaatccacatgtggaccatgggaagtcagtctcttgcgtgtcctagaccttgtgggtggcgccctgcataggggagcagggggaacgggtctgatgtccctgtgctggctgagggctcagagctgcccgcactccgtagctcatgggatgtgctgggcctgcctttggcgccatgctgcagactccagtgggcctggtttctgcagaatgtccatggtggccgctgcagagttgcagaggtccctgtagagataaagctgaggaggaggctgtgtgtgatggctctggctcggaccaaccagatgagcctcctgaagcccccttccctgcctgcctgctgacccgtggccccagctcactcattgccctcagcagccacccgaggctgtgcagaagggtaggttcaggttgaccaggaagctgccaaaagggacatggatatgaggatacatctggacgtgcttaggaacagggtgctggttgagggcccccagctgacccctactgcagatccgcatgtggaccatgagccggctgccagcactaggtcctgggcagctttgtttgtcccacttttctttgtttcttctcactaaaatgatcacgaagacctttgacaagaggagagatatgcactgtgatattaaattagaaataatttatcaaaatcagacctctcctaaaagaataagaaattcattgtttggcccatcctgaaaggtgaggtggcgagacagtggggtgcctccgtgccgcttcgtgcagcagcaagttcagcctgagatgctggctgtactcagcctttgcaatttttgtagatgtagcttaggacgtgagttatttttccgcagactggccaagagccaggttctaagcttggacctaaggtagaaagctgcccatcgggggccctagctcagccccaccaggccctctgttgggcctgcacacagctctgtggctagaacactccaaggcccttcggtacccatcagagtgggccccttgccaggtggcttttcagttacagagtccagtggaccattttgtagaaccatgcagctccctgcggaaggtggggtagggtgggaaagaggagcaggtctggaggtttgtggaacccagtcccctgcagaatctgtaaaacctaataaatcatggttgtggccattctcacggtggtgattgtgattagacgacccccgggaagcccagacactcggggcctggagttcctccccctgcctgacctagaagcagaaccgttttcagcgctctgccctgttggctttaaggctttgtcttaatttaaggaaaaagatcctcccgggttttatttctctctttcttgagtggactgtttccctataattaaaagaggtggtgagtcctggggcagcttccgcgcctccctgtccacgtgctaacagatcaggacgcccccagcacccctgcctgcttttgctggtggcagtgacgggaccccgactcctcactctcgggccgcagacaatgctgtgagcaagtgtggccatgggcacagaatgtccctttggacgccgctgctgggggctgccaggggccctctggggtcgtgctttgaggcccgtccggttcacgagggggtccgggcagcactgactgcttccgacctgcaggaggcgtaggagcggccctgcgggccctttcacggcagctgctgctgtatagatttgtctccactcagtgacgtgggatttttttgtcttccttttggctttatttttaaactgctttagatattactgctcagtgtttgtgaactttcctagttctctatgttgttagtgcagccagcacccagtggggacctactagaaaaaggaactggcatgcacacgtgcccagcaggaaaagcttcgtcttcacgtcggctgctgccatccagaagaggccctggagcctcacgccgtcgaggctgctctcaggcgttctgttccgggcgaggcttgtgctgcaaggaagggcaccagcatgcaggctgccactggagggtccgggtgctgcgggcagagttcagcgcttgtccaccctcccttagctctgactcagtgcatcctactgtggggacatctcgtgaggggacacgaaatgactgatctcaccctttcccagtattcagagctgtgaacccctgtggcgcaggactggcctgtgtctgttattttggttgtaaatcattctcctgtggaattggcaaaagctacatttttactgtccttaccagcaacagtttgcgtcgtcacatgctgtgagtgtgggctgtggtgtgtccgtgtgtgtacatatgtgtatatgtatatatcacgcagcaggagtgtcattcatgctgctgtcccctggtgaagtgacaagtacaattaaaggtggctctgaaatggcctctggtttcttgggagtcgggcagggacctgcaggaggctttcccagcaggtgcacagaaggaagcgctgagcccactgtgtgcagagggtgtgtgcccagggcactgccacggcccccaccagcattggcctctgctctgcagggtggggtgcccatcctgggggctgtgtgtcatgctcacctgacccaggtgtgtgtcccggtgtgaaatcgaggaggggactggaagcccttccctgccttgaaacatgaaagctgattttctgagcagcagatacggtcagtggcaaagctgcatctgaagggcggcctgggaaggggccctgtgctggccccgggtccgccccagaggagtccacacagcaccacctccagaaggggctgggcccggggtcctgcaggcggcaccttttggtagagtttgtttccctggaaaatggggaaaatgtttcaagccaggtgaggggggaagttaacactgaaatatgtattgtttttaaaaatcaaatgcacacgcatggaagctgcttgtccatgcactggttttgtcactggcgtcctggaatccgaccgtgttggggtgcaggcgctgtcagactccggctgatcctggctcgagcacacacatctaagggccaggctggttccgcatggtgatctccgtcttgtatgtctgaatgttggcctaaaataaagattactgttgtaaaataaatgttttcactgcggacccca

SEQ ID NO: 127789 - DNA, 1382 bp, Homo sapiens
  Payload ID: 5014
  Gene Symbol: DNAJC5B
  Gene Name: DnaJ (Hsp40) homolog, subfamily C, member 5 beta
  Uniprot ID: Q9UF47
  ENST ID: ENST00000276570
  CDS Start-End: 288-887
gcagttactgatatagccaaggtgggacactactggagggagctagaagggatcagccagccatgcctccagttcaggtacttggcattgctaagctcagaacaggacttgccagtgtctagatgaaaaagaggagagatctcaagagggataaccaattggctggcaaagtaacaaatgaaaagtaacctgactctattgacctgcttaaccctgcatgggggggaaggatggaaaggagcagctgtttgctttgaaacggtggaacagttttgcagccttagaaaatggcatgtaacatacctaaccaaagacagcggactctgtcaacaacaggagaagctctatacgaaattcttggtctgcataagggagcatcaaatgaagaaattaagaaaacctacagaaaattggccctgaaacaccatccagacaagaatccagatgatccagctgctactgagaagtttaaagaaatcaacaacgcccacgcaatacttaccgacatttcaaagagaagcatatacgacaagtacggatcgctgggactctacgtggccgagcagtttggagacgaaaacgttaacacctacttcatgctgtcgagctggtgggcaaaggccctgtttgtcatcgttggcctcttgacgggctgctacttttgctgctgcctgtgctgctgctgcaactgctgctgtggacactgccggcccgagtcatcagtgccagaagaggacttctatgtgtccccagaggatctggaggagcagatcaagtctgacatggaaaaagatgtggactttccagtttttctccagcctacaaatgcaaatgagaaaacacagctaatcaaagaaggatctcgaagttattgcacagactcttgatattgagccctcagagagtccacagtccctcctctcagttcagtcttgtctccagatggtcgtaggggagcgtgtggggcataaagtgctgtgaacttttccatcttgttgttttatttttgggttaggaaaacatgattgctatataattttctcagtatgcagactttctctctgagtagaatttcttatgaaacacattcaatttgggtgaataaaggcctgaagagttattttaccctccttgcctgatgtaggacagtggaattgtacagcctttatgaacctgccctttatgtgtggcagatctgattcctaactgaccaaagtaatattccagaacaaaagccacttttcttacatttaacacaatattcatatctaccacgaacatgatcatcaaaatatatgagaacttataaagagtttttgtgtgtggagcctcttccgtgtcaatattcaataaagttatagaaatgtttcaagagccagaaa

SEQ ID NO: 127790 - DNA, 441 bp, Homo sapiens
  Payload ID: 5014
  Gene Symbol: DNAJC5B
  Gene Name: DnaJ (Hsp40) homolog, subfamily C, member 5 beta
  ENST ID: ENST00000522619
  CDS Start-End: 153-441
gtgttttccagagggataaccaattggctggcaaagtaacaaatgaaaagtaacctgactctattgacctgcttaaccctgcatgggggggaaggatggaaaggagcagctgtttgctttgaaacggtggaacagttttgcagccttagaaaatggcatgtaacatacctaaccaaagacagcggactctgtcaacaacaggagaagctctatacgaaattcttggtctgcataagggagcatcaaatgaagaaattaagaaaacctacagaaaattggccctgaaacaccatccagacaagaatccagatgatccagctgctactgagaagtttaaagaaatcaacaacgcccacgcaatacttaccgacatttcaaagagaagcatatacgacaagtacggatcgctgggactctacgtggccgagcagtttggagacg

SEQ ID NO: 127791 - DNA, 2008 bp, Homo sapiens
  Payload ID: 5015
  Gene Symbol: DNAJC5G
  Gene Name: DnaJ (Hsp40) homolog, subfamily C, member 5 gamma
  Uniprot ID: Q8N7S2
  ENST ID: ENST00000296097
  CDS Start-End: 419-988
aaaaaacgacctgcccagaccctcagcgtcgacgctgcgcacaagcgcagtcaactgctggacccggccggtgtgaagtttcacacccaaaaggatgaagggcacccacctggcttaagagaacgactcccagaaaattagccgggcgtggtggcgtgcacctgtaatctcagctactcgggaggctgaggcaggaaaatcgcttgcacccaggaggtggaggttgcagtgagccgagatcgcgccattacacttcagcctgggcaacaagagcaaaaaactccgtcaaaaaaaaaaaaaagaagaagaagttgtggagctgtctgattcctgatcctgtccgttcaggctggggccgccctggtctttcaaacccagcagtgagcttggacagacccagaggtgtttactccagatcatgtctactgtgaaggaagcagcacaccggctgtccaaaagtgagatgagcctctatgcagtgctggatcttaagaagggcgcctcacctgaagacttcaaaaaatcctacagccattccgcattgcttccccaccctccttttgagtatcacctgggtaggaaactggccttgcggtatcatcccgacaagaatccagggaatgctcaagcagcagaaatattcaaagagatcaacgcagctcatgccatactgagcgactctaagaagcggaaaatttacgaccagcatggctcattgggaatatatctgtatgatcactttggtgaagaaggcgtcagatactattttattctgaatagttgttggttcaagacacttgtcatcctgtgtactctgctcacttgttgctgtttctgttgttgctgctgtttttgctgtggagcacttaaaccaccacctgagcaggatagtgggagaaaatatcagcagaatgtccagagtcagcctccaaggtcaggagccaaatgtgattttagaagcgaggaaaatagcgaagatgatttttaagagatgaagaaggatgaggtgctgacccagtgagggtgccttctgctgcccagtcccctggacacattgaagagaggagcaagtagccctgtcctgacattgaccctgatttgacccctcttcttataaggatctcaagaatctcttcagaagcactgatgacgttgatcccagtaaggacatcacctctacccttggtaccacaactctgtatggggttgcccagctactcttcctttcagttgcagtcccaattttactccgtcagaaagcagccctcccctccctccccttatgaggtctcaggcagtggtggcagatttttcctgaagagtctttttcctgtgtctgccttgttattggaaccaatgccagctggtaggatccctgagccccttgcgatatcaccaccaagagcctgataactgagcagggtggatcctgtccctggagctgctgcacccattaattctcccttgttgcaactctgtgtaccaagaacccctagcatcagcctcattcctaagccaataacgcctgtatggagttggtttcatcttctggtgcccacggccattggcattgccagcctcattccatgccactatgagtcaactcaggaaaactgcgagtgcatttgaggcttaggggtagtcattccatctttagattatccttggacttcagctaccagcacagcatgcattagccttggtcctgtaggttaactgaagttcaaacatcagtgccagcttgcctccatccttttcacatattatgcaggccaattgacatataatttgttcttaaaaataggggcatgaaatatgtgatctggaaaagattgtactttctggactcttttcccactcttgcctctttgtgctgctgtttcgtatcctcctcacaccgtgtatttcccacccactcagggtcacagcctactaattcctcaaacttctctccctggactaggagaaaggctaaagaatgtcagtaaataaaagagctttcatccaa

SEQ ID NO: 127792 - DNA, 1904 bp, Homo sapiens
  Payload ID: 5015
  Gene Symbol: DNAJC5G
  Gene Name: DnaJ (Hsp40) homolog, subfamily C, member 5 gamma
  Uniprot ID: Q8N7S2
  ENST ID: ENST00000402462
  CDS Start-End: 315-884
aagcgcagtcaactgctggacccggccggtgtgaagtttcacacccaaaaggatgaagggcacccacctggcttaagagaacgactcccaggtaaagggccagacccaggaggtggaggttgcagtgagccgagatcgcgccattacacttcagcctgggcaacaagagcaaaaaactccgtcaaaaaaaaaaaaaagaagaagaagttgtggagctgtctgattcctgatcctgtccgttcaggctggggccgccctggtctttcaaacccagcagtgagcttggacagacccagaggtgtttactccagatcatgtctactgtgaaggaagcagcacaccggctgtccaaaagtgagatgagcctctatgcagtgctggatcttaagaagggcgcctcacctgaagacttcaaaaaatcctacagccattccgcattgcttccccaccctccttttgagtatcacctgggtaggaaactggccttgcggtatcatcccgacaagaatccagggaatgctcaagcagcagaaatattcaaagagatcaacgcagctcatgccatactgagcgactctaagaagcggaaaatttacgaccagcatggctcattgggaatatatctgtatgatcactttggtgaagaaggcgtcagatactattttattctgaatagttgttggttcaagacacttgtcatcctgtgtactctgctcacttgttgctgtttctgttgttgctgctgtttttgctgtggagcacttaaaccaccacctgagcaggatagtgggagaaaatatcagcagaatgtccagagtcagcctccaaggtcaggagccaaatgtgattttagaagcgaggaaaatagcgaagatgatttttaagagatgaagaaggatgaggtgctgacccagtgagggtgccttctgctgcccagtcccctggacacattgaagagaggagcaagtagccctgtcctgacattgaccctgatttgacccctcttcttataaggatctcaagaatctcttcagaagcactgatgacgttgatcccagtaaggacatcacctctacccttggtaccacaactctgtatggggttgcccagctactcttcctttcagttgcagtcccaattttactccgtcagaaagcagccctcccctccctccccttatgaggtctcaggcagtggtggcagatttttcctgaagagtctttttcctgtgtctgccttgttattggaaccaatgccagctggtaggatccctgagccccttgcgatatcaccaccaagagcctgataactgagcagggtggatcctgtccctggagctgctgcacccattaattctcccttgttgcaactctgtgtaccaagaacccctagcatcagcctcattcctaagccaataacgcctgtatggagttggtttcatcttctggtgcccacggccattggcattgccagcctcattccatgccactatgagtcaactcaggaaaactgcgagtgcatttgaggcttaggggtagtcattccatctttagattatccttggacttcagctaccagcacagcatgcattagccttggtcctgtaggttaactgaagttcaaacatcagtgccagcttgcctccatccttttcacatattatgcaggccaattgacatataatttgttcttaaaaataggggcatgaaatatgtgatctggaaaagattgtactttctggactcttttcccactcttgcctctttgtgctgctgtttcgtatcctcctcacaccgtgtatttcccacccactcagggtcacagcctactaattcctcaaacttctctccctggactaggagaaaggctaaagaatgtcagtaaataaaagagctttcatccaa

SEQ ID NO: 127793 - DNA, 1562 bp, Homo sapiens
  Payload ID: 5015
  Gene Symbol: DNAJC5G
  Gene Name: DnaJ (Hsp40) homolog, subfamily C, member 5 gamma
  Uniprot ID: Q8N7S2
  ENST ID: ENST00000406962
  CDS Start-End: 166-480
ctgctggacccggccggtgtgaagtttcacacccaaaaggatgaagggcacccacctggcttaagagaacgactcccagtgagtttcctgtcactggaagtgcacttctcggtacccttacttgtagaagttctcacagatgctgcttctcctctggctcagatcatgtctactgtgaaggaagcagcacaccggctgtccaaaagtgagatgagcctctatgcagtgctggatcttaagaagggcgcctcacctgaagacttcaaaaaatcctacagacacttgtcatcctgtgtactctgctcacttgttgctgtttctgttgttgctgctgtttttgctgtggagcacttaaaccaccacctgagcaggatagtgggagaaaatatcagcagaatgtccagagtcagcctccaaggtcaggagccaaatgtgattttagaagcgaggaaaatagcgaagatgatttttaagagatgaagaaggatgaggtgctgacccagtgagggtgccttctgctgcccagtcccctggacacattgaagagaggagcaagtagccctgtcctgacattgaccctgatttgacccctcttcttataaggatctcaagaatctcttcagaagcactgatgacgttgatcccagtaaggacatcacctctacccttggtaccacaactctgtatggggttgcccagctactcttcctttcagttgcagtcccaattttactccgtcagaaagcagccctcccctccctccccttatgaggtctcaggcagtggtggcagatttttcctgaagagtctttttcctgtgtctgccttgttattggaaccaatgccagctggtaggatccctgagccccttgcgatatcaccaccaagagcctgataactgagcagggtggatcctgtccctggagctgctgcacccattaattctcccttgttgcaactctgtgtaccaagaacccctagcatcagcctcattcctaagccaataacgcctgtatggagttggtttcatcttctggtgcccacggccattggcattgccagcctcattccatgccactatgagtcaactcaggaaaactgcgagtgcatttgaggcttaggggtagtcattccatctttagattatccttggacttcagctaccagcacagcatgcattagccttggtcctgtaggttaactgaagttcaaacatcagtgccagcttgcctccatccttttcacatattatgcaggccaattgacatataatttgttcttaaaaataggggcatgaaatatgtgatctggaaaagattgtactttctggactcttttcccactcttgcctctttgtgctgctgtttcgtatcctcctcacaccgtgtatttcccacccactcagggtcacagcctactaattcctcaaacttctctccctggactaggagaaaggctaaagaatgtcagtaaataaaagagctttcatccaatcccaaggcatatattatgcccaaaaaagacaaattgtgtctggggtagagaaaaaaggcctaaagaaa

SEQ ID NO: 127794 - DNA, 1647 bp, Homo sapiens
  Payload ID: 5015
  Gene Symbol: DNAJC5G
  Gene Name: DnaJ (Hsp40) homolog, subfamily C, member 5 gamma
  ENST ID: ENST00000404433
  CDS Start-End: 106-627
ctgctggacccggccggtgtgaagtttcacacccaaaaggatgaagggcacccacctggcttaagagaacgactcccagatgctgcttctcctctggctcagatcatgtctactgtgaaggaagcagcacaccggctgtccaaaagtgagatgagcctctatgcagtgctggatcttaagaagggcgcctcacctgaagacttcaaaaaatcctacaggaaactggccttgcggtatcatcccgacaagaatccagggaatgctcaagcagcagaaatattcaaagagatcaacgcagctcatgccatactgagcgactctaagaagcggaaaatttacgaccagcatggctcattgggaatatatctgtatgatcactttggtgaagaaggcgtcagatactattttattctgaatagttgttggttcaagacacttgtcatcctgtgtactctgctcacttgttgctgtttctgttgttgctgctgtttttgctgtggagcacttaaaccaccacctgagcaggatagtgggagaaaatatcagcagaatgtccagagtcagcctccaaggtcaggagccaaatgtgattttagaagcgaggaaaatagcgaagatgatttttaagagatgaagaaggatgaggtgctgacccagtgagggtgccttctgctgcccagtcccctggacacattgaagagaggagcaagtagccctgtcctgacattgaccctgatttgacccctcttcttataaggatctcaagaatctcttcagaagcactgatgacgttgatcccagtaaggacatcacctctacccttggtaccacaactctgtatggggttgcccagctactcttcctttcagttgcagtcccaattttactccgtcagaaagcagccctcccctccctccccttatgaggtctcaggcagtggtggcagatttttcctgaagagtctttttcctgtgtctgccttgttattggaaccaatgccagctggtaggatccctgagccccttgcgatatcaccaccaagagcctgataactgagcagggtggatcctgtccctggagctgctgcacccattaattctcccttgttgcaactctgtgtaccaagaacccctagcatcagcctcattcctaagccaataacgcctgtatggagttggtttcatcttctggtgcccacggccattggcattgccagcctcattccatgccactatgagtcaactcaggaaaactgcgagtgcatttgaggcttaggggtagtcattccatctttagattatccttggacttcagctaccagcacagcatgcattagccttggtcctgtaggttaactgaagttcaaacatcagtgccagcttgcctccatccttttcacatattatgcaggccaattgacatataatttgttcttaaaaataggggcatgaaatatgtgatctggaaaagattgtactttctggactcttttcccactcttgcctctttgtgctgctgtttcgtatcctcctcacaccgtgtatttcccacccactcagggtcacagcctactaattcctcaaacttctctccctggactaggagaaaggctaaagaatgtcagtaaataaaagagctttcatccaa

SEQ ID NO: 127795 - DNA, 593 bp, Homo sapiens
  Payload ID: 5015
  Gene Symbol: DNAJC5G
  Gene Name: DnaJ (Hsp40) homolog, subfamily C, member 5 gamma
  ENST ID: ENST00000420191
  CDS Start-End: 407-593
gcccagaccctcagcgtcgacgctgcgcacaagcgcagtcaactgctggacccggccggtgtgaagtttcacacccaaaaggatgaagggcacccacctggcttaagagaacgactcccagaaaattagccgggcgtggtggcgtgcacctgtaatctcagctactcgggaggctgaggcaggaaaatcgcttgcacccaggaggtggaggttgcagtgagccgagatcgcgccattacacttcagcctgggcaacaagagcaaaaaactccgtcaaaaaaaaaaaaaagaagaagaagttgtggagctgtctgattcctgatcctgtccgttcaggctggggccgccctggtctttcaaacccagcagtgagcttggacagacccagaggtgtttactccagatcatgtctactgtgaaggaagcagcacaccggctgtccaaaagtgagatgagcctctatgcagtgctggatcttaagaagggcgcctcacctgaagacttcaaaaaatcctacagacacttgtcatcctgtgtactctgctcacttgttgctgtttctgttgttgctgctgtttttgctgtggagcact

SEQ ID NO: 127796 - DNA, 5916 bp, Homo sapiens
  Payload ID: 5016
  Gene Symbol: DNAJC6
  Gene Name: DnaJ (Hsp40) homolog, subfamily C, member 6
  Uniprot ID: O75061
  ENST ID: ENST00000263441
  CDS Start-End: 370-3072
gtgtttacgtctgccttcatccccatcctttccgctccagcataagcaaaattataaccccgcacaccgacttgcatgcaattatcatagcccgagtgctcctccgttgagagacttcgcccccgagaccgctgactgtgaatgacaaatcaaaagtcagggttgcagaatcagccggactttcctgctcatttgcagcagagggaggaagcagagaatgaaagattctgaaaataaaggagtggttattattgagtcgagaatttttgggaaaagtaacacgtggagagtcaatttttgagtggaaggagtctgaagagagggtaggaaccaacctcctactacccaccaggtgcctcatctccagacatggagcccagctatgggggaggtctctttgacatggtaaaaggaggtgcagggaggctctttagtaacctaaaggacaacttgaaagacaccctcaaagacacatcttctagagtgatacaatctgtgaccagctacacaaagggagatttagacttcacttatgttacctccagaattattgtgatgtcctttcctctggacaatgttgacataggattcaggaatcaggttgatgacattcgaagctttttggattccagacatcttgaccactacacagtatacaatctgtcacctaagtcttatcgaactgccaagtttcacagccgggtctcagaatgcagttggcccattaggcaggctcccagtctgcacaacctttttgctgtgtgtcggaatatgtataactggctactgcagaatcccaaaaatgtctgtgttgtccactgcttggatggacgggcggcatcatcaattctggttggtgctatgttcattttctgtaatctctactctactcctggcccagccattcgattgctatatgcaaagcgaccaggaattggactttcaccatcccataggagatacctgggctatatgtgtgacctactggcagacaagccctaccgccctcacttcaagcctctcacaattaagtcgatcactgtcagtccaataccctttttcaacaaacagaggaatggatgtcgcccttactgtgatgtactcattggagaaaccaaaatatattcgacttgcacagattttgaacgaatgaaagaatatcgtgtccaagatggaaaaatcttcattcccttgaacatcactgtgcaaggagacgtggttgtttccatgtatcacttgaggtcaaccattgggagccggctacaggctaaggtgaccaacacacagatattccagcttcagtttcacactggattcataccactggacacaacagttttaaagttcaccaagcctgagttagatgcatgtgatgtaccagaaaaatatcctcagctatttcaggtgacactggatgtagaactacagccccatgacaaagtaatagacttaactccaccatgggaacattactgcacaaaagatgtcaatcccagcatcctcttctcttctcaccaggaacatcaagatacgctggccttaggaggacaggctccaatagatatccctccagacaaccccaggcattacggacaaagtggtttctttgcctctctctgttggcaagatcagaaatcggagaagtcattctgtgaggaggaccacgctgccctagtgaatcaggaaagtgagcaatcagatgatgaacttctgacactttccagtccgcatggcaatgccaatggtgacaagcctcatggagtcaagaagcccagcaaaaagcagcaggagccagcagcccctccaccccctgaggatgtggaccttttgggcctggaagggtctgcaatgagtaacagcttctctccgccagcggctcctcccaccaattctgaactactgagtgacctgtttgggggtggaggtgcagctggtcccacccaggctggacagtcaggagtggaagatgtgtttcatcctagtggacctgcgtctacccagtcaacaccacgccgctctgccacctccacctctgcgtctccaaccctaagagtgggagaaggtgccacctttgacccatttggagcaccttctaaaccatcaggtcaggatttgctgggttcttttctgaacacatccagtgcttccagtgacccctttctccagccaacaagaagtccttcgcccacagtacatgcttctagtacgcctgctgtgaacattcagccagatgtttctggaggttgggactggcatgctaaaccaggaggctttggaatgggaagcaagtcagctgccaccagcccaaccggatcctcgcatggtactcccacccatcaaagcaaaccccagactctggatccttttgccgaccttgggacactaggtagttcttcctttgccagcaaacccaccacaccaactggattgggtggaggattcccgcctctcagctcgccacagaaggcgtctccccagcctatgggtggcgggtggcagcagggaggtgcctacaactggcagcagccacagcctaagcctcagcccagcatgccccactcctctccccagaaccgacccaactacaacgtgagcttctcagccatgcctgggggccagaacgaacgtgggaaaggatcaagtaatttggaagggaaacaaaaagcagctgattttgaagacctactctctggtcaaggtttcaatgctcacaaagacaaaaaggggcctcggacaatagctgagatgagaaaggaggaaatggccaaggaaatggatcctgagaaattaaagattctggaatggattgaaggcaaagaaagaaatatcagagcccttctttccacgatgcataccgtactatgggctggggagaccaagtggaaaccagttggcatggcagacctggtaacaccagagcaggtgaagaaggtgtacaggaaggctgtcctggtggtgcacccagataaagctactgggcaaccctatgaacaatacgcaaagatgattttcatggagctcaatgatgcctggtctgaatttgaaaaccaaggccaaaagcccttatattaatttatgagcttttccatctctgctgcagacctgtgctaatgcttagtgtgtgtcacaattctgaggttttcgcagatgaaccaaaaactccagtaacatgttttcagtactaaaccgttaagttactcatgaattaatttctcattgataaggaatgtggatgtttggtttctccaaagttcccaccataaaagatccaaagcatgagaggaacttctagtcagatgaccttgcagaaccaccgcattccaccctgccctttggggagcctactcagcattctacctggggaaatggaaaacagaggccaccacccatgaaggcataacacccatcacattgtctgagaataggattaatgagcaaaagttatgataatagagttatatgatggtttaatggtttctagatttttcttggaaagatataatttgagcagtggctttatgcagactccaagaacaaaaccaccaggtatttttttttaagtaaaaatttactaaggcctttagcataatactgtaaatgtcttttggtcaagagaactaacaaatataaaggaacttgaaatgtggggagtgataatagtccagtgattaaactacagtccagtgattaccaccaactttctgactaagctaaaaatgaatgaaaatggtggctaaagaaaatagggactctgaagatgtcgaaatctttattcctggttaggaaggtgggccgctacccttctttccctttagaaaactgtgattaattaaataaaaagtcttactactataacaactctaaacctggtttaaatgaaacatctaattttgctgtaaggcttaatgctcttcttttgtttagccaagaaaacattcttagttggaaacaggtggtaaagtagtttggcctgttcacaacttatcaggaccaatatctagtgtggactcagtgttctctaggtttgtgagcagttgtggtaagagaatggaaggcaacactgaataggagttaagggaatggcacgatcacagtgagagagctgcactcacctgcagacccagtcagatggcttgtcagtatctgctctgaggaaccaggtcccacctccccacaaggcaaatctagacccattaaattattacagtgggcttttttgttttaaaagtggttggggatccacaggaacgacattcatacagggacatttgtgaaagcaaagcaagaatgaatgctttcccgatctcagactggctggattcagatcagtgtgttggctggttctcattttaaggggtaagcagtttgctattctgtgactttagtagatctcttttgtgtgcacatatacaatgtgcattatacatatatattaaatatatccacaaagcagatgggcaaaaagattttcatgctaatcttcaaaggttcatgctcaatattgtgaaaagcttttaaaagttgttttgaaaagacaatcattttttgtttttgttttaactttcttgtggcaagctataccggaaaagcggcatgtcaaaaatactttaggttctacatagatctctttctctcttttgttttgtttgtttgtttgttaaagttcattatttattttaccttttactgacaatgtgaaactcgaagaaaatgttctctttttaaatatacagtcataaactgttcaaggtaaccataacaaactaggtgttatttattaacgtattataaaataatgtttgatccagtatgtgcttgtcttatttaaaattggaatgtgagacatgttgctgtgacctgtttttctttctcattcacatttgtagatattgtgtgaactacagtatataatgataacaattaaaaggatattctgtggatgtcacgtattttgaaatgatagaactacattagctttgtatcatgtttggataattcatcaatgttcacagtttaaaacatcattaaacattatgtaattacaatgagaaagaatcttacttaaatttggagattttcccccacatctcttttccggatacattataattctggacccctatttatctcaaaactcttaatatatgcagaccaacaggtctttgcattccttttaaataactggttgtgacaaagcttgttgttgatcagattcactgtttcatcatatttattgtaatatattttttgttttgtaaatatgttacaacaaaatgtgattggtctaaaatatttgtaatgtatattaaaaggttcaaaaatatttgtataaatctaagttatttgggtacttgtaggaatacaatgaggagcttgaatgccaccttctgacatgatttacttttaaggaaagttatgaggagagaatacaaaaagcatgcaccaaaatgtaatctgacaggatttctggatttatacgtaatcactcctgccccaacacacacacacacacacacacacacacacacacacatgcacgcacacatgattttgattatgctacatgatatatgtttcaaaaagaattagcatagaaatcctggtctcctagccaaaaaaatcaaaggattttcaaaaaaacgaatctgtatgttgaggcaaaaggattgaacctggaagtctgggactttatcatagaaacaaagtctcagatattttagttctttggaaacaaatgctgtaattcaaaagcatttgacctgtcactgtactatctacatgtggaagaatgttcaagttgaatcctaatgccgtgaatgaaacacagtctgtgtagggaatgagcaaaaaagttgaattccaattgctttttggccttttggctaaaataaatgtagcatctaattttatcagttt

SEQ ID NO: 127797 - DNA, 5365 bp, Homo sapiens
  Payload ID: 5016
  Gene Symbol: DNAJC6
  Gene Name: DnaJ (Hsp40) homolog, subfamily C, member 6
  Uniprot ID: O75061
  ENST ID: ENST00000371069
  CDS Start-End: 202-3114
gccgagctcagcccagggcggcggcttcgcctcgcccggcgaagcttctctccggtggccgctccttcttttccctcctctttgcgtcatgtcgggcacttaatttttttttttttttaattccttcttcagccctttccaccttccatctcccttttcgcttcccaggttgattattttctcttttctccgggcttgcccatgagcctcctcgggagctaccggaaaaagaccagcaacgatggttatgaatctttgcagctggtggacagtaacggggacttaagtgcgggaagcggcggggttggcggcaagcagagagtgaacgccggggcagcggcgcggagtcccgcccgacagcctccggaccgcgccagcaccatggacagctcaggtgcctcatctccagacatggagcccagctatgggggaggtctctttgacatggtaaaaggaggtgcagggaggctctttagtaacctaaaggacaacttgaaagacaccctcaaagacacatcttctagagtgatacaatctgtgaccagctacacaaagggagatttagacttcacttatgttacctccagaattattgtgatgtcctttcctctggacaatgttgacataggattcaggaatcaggttgatgacattcgaagctttttggattccagacatcttgaccactacacagtatacaatctgtcacctaagtcttatcgaactgccaagtttcacagccgggtctcagaatgcagttggcccattaggcaggctcccagtctgcacaacctttttgctgtgtgtcggaatatgtataactggctactgcagaatcccaaaaatgtctgtgttgtccactgcttggatggacgggcggcatcatcaattctggttggtgctatgttcattttctgtaatctctactctactcctggcccagccattcgattgctatatgcaaagcgaccaggaattggactttcaccatcccataggagatacctgggctatatgtgtgacctactggcagacaagccctaccgccctcacttcaagcctctcacaattaagtcgatcactgtcagtccaataccctttttcaacaaacagaggaatggatgtcgcccttactgtgatgtactcattggagaaaccaaaatatattcgacttgcacagattttgaacgaatgaaagaatatcgtgtccaagatggaaaaatcttcattcccttgaacatcactgtgcaaggagacgtggttgtttccatgtatcacttgaggtcaaccattgggagccggctacaggctaaggtgaccaacacacagatattccagcttcagtttcacactggattcataccactggacacaacagttttaaagttcaccaagcctgagttagatgcatgtgatgtaccagaaaaatatcctcagctatttcaggtgacactggatgtagaactacagccccatgacaaagtaatagacttaactccaccatgggaacattactgcacaaaagatgtcaatcccagcatcctcttctcttctcaccaggaacatcaagatacgctggccttaggaggacaggctccaatagatatccctccagacaaccccaggcattacggacaaagtggtttctttgcctctctctgttggcaagatcagaaatcggagaagtcattctgtgaggaggaccacgctgccctagtgaatcaggaaagtgagcaatcagatgatgaacttctgacactttccagtccgcatggcaatgccaatggtgacaagcctcatggagtcaagaagcccagcaaaaagcagcaggagccagcagcccctccaccccctgaggatgtggaccttttgggcctggaagggtctgcaatgagtaacagcttctctccgccagcggctcctcccaccaattctgaactactgagtgacctgtttgggggtggaggtgcagctggtcccacccaggctggacagtcaggagtggaagatgtgtttcatcctagtggacctgcgtctacccagtcaacaccacgccgctctgccacctccacctctgcgtctccaaccctaagagtgggagaaggtgccacctttgacccatttggagcaccttctaaaccatcaggtcaggatttgctgggttcttttctgaacacatccagtgcttccagtgacccctttctccagccaacaagaagtccttcgcccacagtacatgcttctagtacgcctgctgtgaacattcagccagatgtttctggaggttgggactggcatgctaaaccaggaggctttggaatgggaagcaagtcagctgccaccagcccaaccggatcctcgcatggtactcccacccatcaaagcaaaccccagactctggatccttttgccgaccttgggacactaggtagttcttcctttgccagcaaacccaccacaccaactggattgggtggaggattcccgcctctcagctcgccacagaaggcgtctccccagcctatgggtggcgggtggcagcagggaggtgcctacaactggcagcagccacagcctaagcctcagcccagcatgccccactcctctccccagaaccgacccaactacaacgtgagcttctcagccatgcctgggggccagaacgaacgtgggaaaggatcaagtaatttggaagggaaacaaaaagcagctgattttgaagacctactctctggtcaaggtttcaatgctcacaaagacaaaaaggggcctcggacaatagctgagatgagaaaggaggaaatggccaaggaaatggatcctgagaaattaaagattctggaatggattgaaggcaaagaaagaaatatcagagcccttctttccacgatgcataccgtactatgggctggggagaccaagtggaaaccagttggcatggcagacctggtaacaccagagcaggtgaagaaggtgtacaggaaggctgtcctggtggtgcacccagataaagctactgggcaaccctatgaacaatacgcaaagatgattttcatggagctcaatgatgcctggtctgaatttgaaaaccaaggccaaaagcccttatattaatttatgagcttttccatctctgctgcagacctgtgctaatgcttagtgtgtgtcacaattctgaggttttcgcagatgaaccaaaaactccagtaacatgttttcagtactaaaccgttaagttactcatgaattaatttctcattgataaggaatgtggatgtttggtttctccaaagttcccaccataaaagatccaaagcatgagaggaacttctagtcagatgaccttgcagaaccaccgcattccaccctgccctttggggagcctactcagcattctacctggggaaatggaaaacagaggccaccacccatgaaggcataacacccatcacattgtctgagaataggattaatgagcaaaagttatgataatagagttatatgatggtttaatggtttctagatttttcttggaaagatataatttgagcagtggctttatgcagactccaagaacaaaaccaccaggtatttttttttaagtaaaaatttactaaggcctttagcataatactgtaaatgtcttttggtcaagagaactaacaaatataaaggaacttgaaatgtggggagtgataatagtccagtgattaaactacagtccagtgattaccaccaactttctgactaagctaaaaatgaatgaaaatggtggctaaagaaaatagggactctgaagatgtcgaaatctttattcctggttaggaaggtgggccgctacccttctttccctttagaaaactgtgattaattaaataaaaagtcttactactataacaactctaaacctggtttaaatgaaacatctaattttgctgtaaggcttaatgctcttcttttgtttagccaagaaaacattcttagttggaaacaggtggtaaagtagtttggcctgttcacaacttatcaggaccaatatctagtgtggactcagtgttctctaggtttgtgagcagttgtggtaagagaatggaaggcaacactgaataggagttaagggaatggcacgatcacagtgagagagctgcactcacctgcagacccagtcagatggcttgtcagtatctgctctgaggaaccaggtcccacctccccacaaggcaaatctagacccattaaattattacagtgggcttttttgttttaaaagtggttggggatccacaggaacgacattcatacagggacatttgtgaaagcaaagcaagaatgaatgctttcccgatctcagactggctggattcagatcagtgtgttggctggttctcattttaaggggtaagcagtttgctattctgtgactttagtagatctcttttgtgtgcacatatacaatgtgcattatacatatatattaaatatatccacaaagcagatgggcaaaaagattttcatgctaatcttcaaaggttcatgctcaatattgtgaaaagcttttaaaagttgttttgaaaagacaatcattttttgtttttgttttaactttcttgtggcaagctataccggaaaagcggcatgtcaaaaatactttaggttctacatagatctctttctctcttttgttttgtttgtttgtttgttaaagttcattatttattttaccttttactgacaatgtgaaactcgaagaaaatgttctctttttaaatatacagtcataaactgttcaaggtaaccataacaaactaggtgttatttattaacgtattataaaataatgtttgatccagtatgtgcttgtcttatttaaaattggaatgtgagacatgttgctgtgacctgtttttctttctcattcacatttgtagatattgtgtgaactacagtatataatgataacaattaaaaggatattctgtggatgtcacgtattttgaaatgatagaactacattagctttgtatcatgtttggataattcatcaatgttcacagtttaaaacatcattaaacattatgtaattacaatgagaaagaatcttacttaaatttggagattttcccccacatctcttttccggatacattataattctggacccctatttatctcaaaactcttaatatatgcagaccaacaggtctttgcattccttttaaataactggttgtgacaaagcttgttgttgatcagattcactgtttcatcatatttattgtaatatattttttgttttgtaaatatgttacaacaaaatgtgattggtctaaaatatttgtaatgtatattaaaaggttcaaaaata

SEQ ID NO: 127798 - DNA, 5743 bp, Homo sapiens
  Payload ID: 5016
  Gene Symbol: DNAJC6
  Gene Name: DnaJ (Hsp40) homolog, subfamily C, member 6
  Uniprot ID: O75061
  ENST ID: ENST00000395325
  CDS Start-End: 158-2899
cgcacaccgacttgcatgcaattatcatagcccgagtgctcctccgttgagagacttcgcccccgagaccgctgactgtgaatgacaaatcaaaagtcagggttgcagaatcagccggactttcctgctcatttgcagcagagggaggaagcagagaatgaaagattctgaaaataaaggtgcctcatctccagacatggagcccagctatgggggaggtctctttgacatggtaaaaggaggtgcagggaggctctttagtaacctaaaggacaacttgaaagacaccctcaaagacacatcttctagagtgatacaatctgtgaccagctacacaaagggagatttagacttcacttatgttacctccagaattattgtgatgtcctttcctctggacaatgttgacataggattcaggaatcaggttgatgacattcgaagctttttggattccagacatcttgaccactacacagtatacaatctgtcacctaagtcttatcgaactgccaagtttcacagccgggtctcagaatgcagttggcccattaggcaggctcccagtctgcacaacctttttgctgtgtgtcggaatatgtataactggctactgcagaatcccaaaaatgtctgtgttgtccactgcttggatggacgggcggcatcatcaattctggttggtgctatgttcattttctgtaatctctactctactcctggcccagccattcgattgctatatgcaaagcgaccaggaattggactttcaccatcccataggagatacctgggctatatgtgtgacctactggcagacaagccctaccgccctcacttcaagcctctcacaattaagtcgatcactgtcagtccaataccctttttcaacaaacagaggaatggatgtcgcccttactgtgatgtactcattggagaaaccaaaatatattcgacttgcacagattttgaacgaatgaaagaatatcgtgtccaagatggaaaaatcttcattcccttgaacatcactgtgcaaggagacgtggttgtttccatgtatcacttgaggtcaaccattgggagccggctacaggctaaggtgaccaacacacagatattccagcttcagtttcacactggattcataccactggacacaacagttttaaagttcaccaagcctgagttagatgcatgtgatgtaccagaaaaatatcctcagctatttcaggtgacactggatgtagaactacagccccatgacaaagtaatagacttaactccaccatgggaacattactgcacaaaagatgtcaatcccagcatcctcttctcttctcaccaggaacatcaagatacgctggccttaggaggacaggctccaatagatatccctccagacaaccccaggcattacggacaaagtggtttctttgcctctctctgttggcaagatcagaaatcggagaagtcattctgtgaggaggaccacgctgccctagtgaatcaggaaagtgagcaatcagatgatgaacttctgacactttccagtccgcatggcaatgccaatggtgacaagcctcatggagtcaagaagcccagcaaaaagcagcaggagccagcagcccctccaccccctgaggatgtggaccttttgggcctggaagggtctgcaatgagtaacagcttctctccgccagcggctcctcccaccaattctgaactactgagtgacctgtttgggggtggaggtgcagctggtcccacccaggctggacagtcaggagtggaagatgtgtttcatcctagtggacctgcgtctacccagtcaacaccacgccgctctgccacctccacctctgcgtctccaaccctaagagtgggagaaggtgccacctttgacccatttggagcaccttctaaaccatcaggtcaggatttgctgggttcttttctgaacacatccagtgcttccagtgacccctttctccagccaacaagaagtccttcgcccacagtacatgcttctagtacgcctgctgtgaacattcagccagatgtttctggaggttgggactggcatgctaaaccaggaggctttggaatgggaagcaagtcagctgccaccagcccaaccggatcctcgcatggtactcccacccatcaaagcaaaccccagactctggatccttttgccgaccttgggacactaggtagttcttcctttgccagcaaacccaccacaccaactggattgggtggaggattcccgcctctcagctcgccacagaaggcgtctccccagcctatgggtggcgggtggcagcagggaggtgcctacaactggcagcagccacagcctaagcctcagcccagcatgccccactcctctccccagaaccgacccaactacaacgtgagcttctcagccatgcctgggggccagaacgaacgtgggaaaggatcaagtaatttggaagggaaacaaaaagcagctgattttgaagacctactctctggtcaaggtttcaatgctcacaaagacaaaaaggggcctcggacaatagctgagatgagaaaggaggaaatggccaaggaaatggatcctgagaaattaaagattctggaatggattgaaggcaaagaaagaaatatcagagcccttctttccacgatgcataccgtactatgggctggggagaccaagtggaaaccagttggcatggcagacctggtaacaccagagcaggtgaagaaggtgtacaggaaggctgtcctggtggtgcacccagataaagctactgggcaaccctatgaacaatacgcaaagatgattttcatggagctcaatgatgcctggtctgaatttgaaaaccaaggccaaaagcccttatattaatttatgagcttttccatctctgctgcagacctgtgctaatgcttagtgtgtgtcacaattctgaggttttcgcagatgaaccaaaaactccagtaacatgttttcagtactaaaccgttaagttactcatgaattaatttctcattgataaggaatgtggatgtttggtttctccaaagttcccaccataaaagatccaaagcatgagaggaacttctagtcagatgaccttgcagaaccaccgcattccaccctgccctttggggagcctactcagcattctacctggggaaatggaaaacagaggccaccacccatgaaggcataacacccatcacattgtctgagaataggattaatgagcaaaagttatgataatagagttatatgatggtttaatggtttctagatttttcttggaaagatataatttgagcagtggctttatgcagactccaagaacaaaaccaccaggtatttttttttaagtaaaaatttactaaggcctttagcataatactgtaaatgtcttttggtcaagagaactaacaaatataaaggaacttgaaatgtggggagtgataatagtccagtgattaaactacagtccagtgattaccaccaactttctgactaagctaaaaatgaatgaaaatggtggctaaagaaaatagggactctgaagatgtcgaaatctttattcctggttaggaaggtgggccgctacccttctttccctttagaaaactgtgattaattaaataaaaagtcttactactataacaactctaaacctggtttaaatgaaacatctaattttgctgtaaggcttaatgctcttcttttgtttagccaagaaaacattcttagttggaaacaggtggtaaagtagtttggcctgttcacaacttatcaggaccaatatctagtgtggactcagtgttctctaggtttgtgagcagttgtggtaagagaatggaaggcaacactgaataggagttaagggaatggcacgatcacagtgagagagctgcactcacctgcagacccagtcagatggcttgtcagtatctgctctgaggaaccaggtcccacctccccacaaggcaaatctagacccattaaattattacagtgggcttttttgttttaaaagtggttggggatccacaggaacgacattcatacagggacatttgtgaaagcaaagcaagaatgaatgctttcccgatctcagactggctggattcagatcagtgtgttggctggttctcattttaaggggtaagcagtttgctattctgtgactttagtagatctcttttgtgtgcacatatacaatgtgcattatacatatatattaaatatatccacaaagcagatgggcaaaaagattttcatgctaatcttcaaaggttcatgctcaatattgtgaaaagcttttaaaagttgttttgaaaagacaatcattttttgtttttgttttaactttcttgtggcaagctataccggaaaagcggcatgtcaaaaatactttaggttctacatagatctctttctctcttttgttttgtttgtttgtttgttaaagttcattatttattttaccttttactgacaatgtgaaactcgaagaaaatgttctctttttaaatatacagtcataaactgttcaaggtaaccataacaaactaggtgttatttattaacgtattataaaataatgtttgatccagtatgtgcttgtcttatttaaaattggaatgtgagacatgttgctgtgacctgtttttctttctcattcacatttgtagatattgtgtgaactacagtatataatgataacaattaaaaggatattctgtggatgtcacgtattttgaaatgatagaactacattagctttgtatcatgtttggataattcatcaatgttcacagtttaaaacatcattaaacattatgtaattacaatgagaaagaatcttacttaaatttggagattttcccccacatctcttttccggatacattataattctggacccctatttatctcaaaactcttaatatatgcagaccaacaggtctttgcattccttttaaataactggttgtgacaaagcttgttgttgatcagattcactgtttcatcatatttattgtaatatattttttgttttgtaaatatgttacaacaaaatgtgattggtctaaaatatttgtaatgtatattaaaaggttcaaaaatatttgtataaatctaagttatttgggtacttgtaggaatacaatgaggagcttgaatgccaccttctgacatgatttacttttaaggaaagttatgaggagagaatacaaaaagcatgcaccaaaatgtaatctgacaggatttctggatttatacgtaatcactcctgccccaacacacacacacacacacacacacacacacacacacatgcacgcacacatgattttgattatgctacatgatatatgtttcaaaaagaattagcatagaaatcctggtctcctagccaaaaaaatcaaaggattttcaaaaaaacgaatctgtatgttgaggcaaaaggattgaacctggaagtctgggactttatcatagaaacaaagtctcagatattttagttctttggaaacaaatgctgtaattcaaaagcatttgacctgtcactgtactatctacatgtggaagaatgttcaagttgaatcctaatgccgtgaatgaaacacagtctgtgtagggaatgagcaaaaaagttgaattccaattgctttttggccttttggctaaaataaatgtagcatctaattttatcagttt

SEQ ID NO: 127799 - DNA, 1621 bp, Homo sapiens
  Payload ID: 5016
  Gene Symbol: DNAJC6
  Gene Name: DnaJ (Hsp40) homolog, subfamily C, member 6
  ENST ID: ENST00000494710
  CDS Start-End: 74-1621
agacgcgcggcggcggcggcgagcggtggcgctcggctcgggcgaccgcggcgggggagggcgcggcgcaccgatgggcgccactgagaagggaggccagaagagccggaagctgttttccttgcggcggccgtggaaggcgacccggcggctgtggaggccacgctcagctcgccaggcggcgcagggtgcctcatctccagacatggagcccagctatgggggaggtctctttgacatggtaaaaggaggtgcagggaggctctttagtaacctaaaggacaacttgaaagacaccctcaaagacacatcttctagagtgatacaatctgtgaccagctacacaaagggagatttagacttcacttatgttacctccagaattattgtgatgtcctttcctctggacaatgttgacataggattcaggaatcaggttgatgacattcgaagctttttggattccagacatcttgaccactacacagtatacaatctgtcacctaagtcttatcgaactgccaagtttcacagccgggtctcagaatgcagttggcccattaggcaggctcccagtctgcacaacctttttgctgtgtgtcggaatatgtataactggctactgcagaatcccaaaaatgtctgtgttgtccactgcttggatggacgggcggcatcatcaattctggttggtgctatgttcattttctgtaatctctactctactcctggcccagccattcgattgctatatgcaaagcgaccaggaattggactttcaccatcccataggagatacctgggctatatgtgtgacctactggcagacaagccctaccgccctcacttcaagcctctcacaattaagtcgatcactgtcagtccaataccctttttcaacaaacagaggaatggatgtcgcccttactgtgatgtactcattggagaaaccaaaatatattcgacttgcacagattttgaacgaatgaaagaatatcgtgtccaagatggaaaaatcttcattcccttgaacatcactgtgcaaggagacgtggttgtttccatgtatcacttgaggtcaaccattgggagccggctacaggctaaggtgaccaacacacagatattccagcttcagtttcacactggattcataccactggacacaacagttttaaagttcaccaagcctgagttagatgcatgtgatgtaccagaaaaatatcctcagctatttcaggtgacactggatgtagaactacagccccatgacaaagtaatagacttaactccaccatgggaacattactgcacaaaagatgtcaatcccagcatcctcttctcttctcaccaggaacatcaagatacgctggccttaggaggacaggctccaatagatatccctccagacaaccccaggcattacggacaaagtggtttctttgcctctctctgttggcaagatcagaaatcggagaagtcattctgtgaggaggaccacgctgccctagtgaatcaggaaagtgagcaatcagatgatgaacttctgacactttccagtccgcatggcaatgccaatggtgacaagcctcatggagtcaagaagcccagcaaaaagcag

SEQ ID NO: 127800 - DNA, 1468 bp, Homo sapiens
  Payload ID: 5017
  Gene Symbol: DNAJC7
  Gene Name: DnaJ (Hsp40) homolog, subfamily C, member 7
  Uniprot ID: Q99615
  ENST ID: ENST00000316603
  CDS Start-End: 83-1399
aagatggcggctgccgcggagtgcgatgtggtaatggcggcgaccgagccggagctgctcgacgaccaagaggcgaagagatatgtgtcctaaaaatgctagctattatggtaatcgagcagccaccttgatgatgcttggaaggttccgggaagctcttggagatgcacaacagtcagtgaggttggatgacagttttgtccggggacatctacgagagggcaagtgccacctctctctggggaatgccatggcagcatgtcgcagcttccagagagccctagaactggatcataaaaatgctcaggcacaacaagagttcaagaatgctaatgcagtcatggaatatgagaaaatagcagaaacagattttgagaagcgagattttcggaaggttgttttctgcatggaccgtgccctagaatttgcccctgcctgccatcgcttcaaaatcctcaaggcagaatgtttagcaatgctgggtcgttatccagaagcacagtctgtggctagtgacattctacgaatggattccaccaatgcagatgctctgtatgtacgaggtctttgcctttattacgaagattgtattgagaaggcagttcagtttttcgtacaggctctcaggatggctcctgaccacgagaaggcctgcattgcctgcagaaatgccaaagcactcaaagcaaagaaagaagatgggaataaagcatttaaggaaggaaattacaaactagcatatgaactgtacacagaagccctggggatagaccccaacaatataaaaacaaatgctaaactctactgtaatcggggtacggttaattccaagcttaggaaactagatgatgcaatagaagactgcacaaatgcagtgaagcttgatgacacttacataaaagcctacttgagaagagctcagtgttacatggacacagaacagtatgaagaagcagtacgagactatgaaaaagtataccagacagagaaaacaaaagaacacaaacagctcctaaaaaatgcgcagctggaactgaagaagagtaagaggaaagattactacaagattctaggagtggacaagaatgcctctgaggacgagatcaagaaagcttatcggaaacgggccttgatgcaccatccagatcggcatagtggagccagtgctgaggttcagaaggaggaggagaagaagttcaaggaagttggagaggcctttactatcctctctgatcccaagaaaaagactcgctatgacagtggacaggacctagatgaggagggcatgaatatgggtgattttgatccaaacaatatcttcaaggcattctttggcggtcctggcggcttcagctttgaagcatctggtccagggaatttcttttttcaatttggctaatgaagggcaaccacccagaacccagaaaatgcagattcactcagtttaatcttgaatgtggaaacagtt

SEQ ID NO: 127801 - DNA, 1774 bp, Homo sapiens
  Payload ID: 5017
  Gene Symbol: DNAJC7
  Gene Name: DnaJ (Hsp40) homolog, subfamily C, member 7
  Uniprot ID: Q99615
  ENST ID: ENST00000426588
  CDS Start-End: 204-1520
gcttccgcctggcgtaggagctgaggcatggccttgttctccagctgagaggacgatcgtccttataggagaggccgagtctccgagggcaatttcagaggtctggtgcgagggaagcagagactttcaaggaacaaggaaatgcatactatgccaagaaagattacaatgaagcttataattattatacaaaagccatagatatgtgtcctaaaaatgctagctattatggtaatcgagcagccaccttgatgatgcttggaaggttccgggaagctcttggagatgcacaacagtcagtgaggttggatgacagttttgtccggggacatctacgagagggcaagtgccacctctctctggggaatgccatggcagcatgtcgcagcttccagagagccctagaactggatcataaaaatgctcaggcacaacaagagttcaagaatgctaatgcagtcatggaatatgagaaaatagcagaaacagattttgagaagcgagattttcggaaggttgttttctgcatggaccgtgccctagaatttgcccctgcctgccatcgcttcaaaatcctcaaggcagaatgtttagcaatgctgggtcgttatccagaagcacagtctgtggctagtgacattctacgaatggattccaccaatgcagatgctctgtatgtacgaggtctttgcctttattacgaagattgtattgagaaggcagttcagtttttcgtacaggctctcaggatggctcctgaccacgagaaggcctgcattgcctgcagaaatgccaaagcactcaaagcaaagaaagaagatgggaataaagcatttaaggaaggaaattacaaactagcatatgaactgtacacagaagccctggggatagaccccaacaatataaaaacaaatgctaaactctactgtaatcggggtacggttaattccaagcttaggaaactagatgatgcaatagaagactgcacaaatgcagtgaagcttgatgacacttacataaaagcctacttgagaagagctcagtgttacatggacacagaacagtatgaagaagcagtacgagactatgaaaaagtataccagacagagaaaacaaaagaacacaaacagctcctaaaaaatgcgcagctggaactgaagaagagtaagaggaaagattactacaagattctaggagtggacaagaatgcctctgaggacgagatcaagaaagcttatcggaaacgggccttgatgcaccatccagatcggcatagtggagccagtgctgaggttcagaaggaggaggagaagaagttcaaggaagttggagaggcctttactatcctctctgatcccaagaaaaagactcgctatgacagtggacaggacctagatgaggagggcatgaatatgggtgattttgatccaaacaatatcttcaaggcattctttggcggtcctggcggcttcagctttgaagcatctggtccagggaatttcttttttcaatttggctaatgaagggcaaccacccagaacccagaaaatgcagattcactcagtttaatcttgaatgtggaaacagttcacctcctcccttcatcacgtctccgtgtgcttagagcagtttcgttttctcagttggatgccctgtgtctctgtgagtggggtggagcaaagggaaccaatgccgaagaccgagggcaggggagggaggcgggggtggacagggaggcagcttgtgaatttttgttttactgtttaactttatt

SEQ ID NO: 127802 - DNA, 2022 bp, Homo sapiens
  Payload ID: 5017
  Gene Symbol: DNAJC7
  Gene Name: DnaJ (Hsp40) homolog, subfamily C, member 7
  Uniprot ID: Q99615
  ENST ID: ENST00000457167
  CDS Start-End: 238-1722
acgggtaaagtggcgccgcctacgcaccggcacagcccctgggctcccgccccggcgcggagaccaccgtggacatccgggggcgggaggccgctctggccccaagcggagcctctctctggtagacgagcccgagggagcccttctgggcgcggcgccgcggagctgctctatgctccaaccggaagtgctcttcaccgccggcctcccacccagctctctggtcccggcggtaagatggcggctgccgcggagtgcgatgtggtaatggcggcgaccgagccggagctgctcgacgaccaagaggcgaagagggaagcagagactttcaaggaacaaggaaatgcatactatgccaagaaagattacaatgaagcttataattattatacaaaagccatagatatgtgtcctaaaaatgctagctattatggtaatcgagcagccaccttgatgatgcttggaaggttccgggaagctcttggagatgcacaacagtcagtgaggttggatgacagttttgtccggggacatctacgagagggcaagtgccacctctctctggggaatgccatggcagcatgtcgcagcttccagagagccctagaactggatcataaaaatgctcaggcacaacaagagttcaagaatgctaatgcagtcatggaatatgagaaaatagcagaaacagattttgagaagcgagattttcggaaggttgttttctgcatggaccgtgccctagaatttgcccctgcctgccatcgcttcaaaatcctcaaggcagaatgtttagcaatgctgggtcgttatccagaagcacagtctgtggctagtgacattctacgaatggattccaccaatgcagatgctctgtatgtacgaggtctttgcctttattacgaagattgtattgagaaggcagttcagtttttcgtacaggctctcaggatggctcctgaccacgagaaggcctgcattgcctgcagaaatgccaaagcactcaaagcaaagaaagaagatgggaataaagcatttaaggaaggaaattacaaactagcatatgaactgtacacagaagccctggggatagaccccaacaatataaaaacaaatgctaaactctactgtaatcggggtacggttaattccaagcttaggaaactagatgatgcaatagaagactgcacaaatgcagtgaagcttgatgacacttacataaaagcctacttgagaagagctcagtgttacatggacacagaacagtatgaagaagcagtacgagactatgaaaaagtataccagacagagaaaacaaaagaacacaaacagctcctaaaaaatgcgcagctggaactgaagaagagtaagaggaaagattactacaagattctaggagtggacaagaatgcctctgaggacgagatcaagaaagcttatcggaaacgggccttgatgcaccatccagatcggcatagtggagccagtgctgaggttcagaaggaggaggagaagaagttcaaggaagttggagaggcctttactatcctctctgatcccaagaaaaagactcgctatgacagtggacaggacctagatgaggagggcatgaatatgggtgattttgatccaaacaatatcttcaaggcattctttggcggtcctggcggcttcagctttgaagcatctggtccagggaatttcttttttcaatttggctaatgaagggcaaccacccagaacccagaaaatgcagattcactcagtttaatcttgaatgtggaaacagttcacctcctcccttcatcacgtctccgtgtgcttagagcagtttcgttttctcagttggatgccctgtgtctctgtgagtggggtggagcaaagggaaccaatgccgaagaccgagggcaggggagggaggcgggggtggacagggaggcagcttgtgaatttttgttttactgtttaactttattaaaaaagaaaaaaaaaagagaataaaatgttttgacccttcctggc

SEQ ID NO: 127803 - DNA, 832 bp, Homo sapiens
  Payload ID: 5017
  Gene Symbol: DNAJC7
  Gene Name: DnaJ (Hsp40) homolog, subfamily C, member 7
  ENST ID: ENST00000590348
  CDS Start-End: 48-832
agtggtcgctgtggtttcagctccctccacactgggataggcagagtatgagcattggcacatgctgttttcctggaacaaacagggaagcagagactttcaaggaacaaggaaatgcatactatgccaagaaagattacaatgaagcttataattattatacaaaagccatagatatgtgtcctaaaaatgctagctattatggtaatcgagcagccaccttgatgatgcttggaaggttccgggaagctcttggagatgcacaacagtcagtgaggttggatgacagttttgtccggggacatctacgagagggcaagtgccacctctctctggggaatgccatggcagcatgtcgcagcttccagagagccctagaactggatcataaaaatgctcaggcacaacaagagttcaagaatgctaatgcagtcatggaatatgagaaaatagcagaaacagattttgagaagcgagattttcggaaggttgttttctgcatggaccgtgccctagaatttgcccctgcctgccatcgcttcaaaatcctcaaggcagaatgtttagcaatgctgggtcgttatccagaagcacagtctgtggctagtgacattctacgaatggattccaccaatgcagatgctctgtatgtacgaggtctttgcctttattacgaagattgtattgagaaggcagttcagtttttcgtacaggctctcaggatggctcctgaccacgagaaggcctgcattgcctgcagaaatgccaaagcactcaaagcaaagaaagaagatgggaataaagcatttaaggaaggaaattacaaactagc

SEQ ID NO: 127804 - DNA, 579 bp, Homo sapiens
  Payload ID: 5017
  Gene Symbol: DNAJC7
  Gene Name: DnaJ (Hsp40) homolog, subfamily C, member 7
  ENST ID: ENST00000586335
  CDS Start-End: 1-268
gaaagaagatgggaataaagcatttaaggaaggaaattacaaactagcatatgaactgtacacagaagccctggggatagaccccaacaatataaaaacaaatgctaaactctactgtaatcggggtacggttaattccaagcttaggaaactagatgatgcaatagaagactgcacaaatgcagtgaagcttgatgacacttacataaaagcctacttgagaagagctcagtggtgggattgttccagccctagactatctttatagacctccagcggaggagattgcacaagctccctcagtctcccatgcctgtgtctaacgcccctcacgttacatggacacagaacagtatgaagaagcagtacgagactatgaaaaagtataccagacagagaaaacaaaagaacacaaacagctcctaaaaaatgcgcagctggaactgaagaagagtaagaggaaagattactacaagattctaggagtggacaagaatgcctctgaggacgagatcaagaaagcttatcggaaacgggccttgatgcaccatccagatcggcatagtggagccagtgctg

SEQ ID NO: 127805 - DNA, 566 bp, Homo sapiens
  Payload ID: 5017
  Gene Symbol: DNAJC7
  Gene Name: DnaJ (Hsp40) homolog, subfamily C, member 7
  ENST ID: ENST00000591787
  CDS Start-End: 345-566
accatcccaatgctagtcagaggaaacggatgtctccatgtctactactggatgtcccacgcctttgacatctcatccttcagtccctttgctgtaaaggcaacttgaacaagcttcagccctttctcagacttccagggcaggacttgaatggatttgacactggaattgttcctgatgcagccttgttcagttcttgctgctgccatgctggattccaaagatccactctttcctcgactggtctcgcaggggaagcagagactttcaaggaacaaggaaatgcatactatgccaagaaagattacaatgaagcttataattattatacaaaagccatagatatgtgtcctaaaaatgctagctattatggtaatcgagcagccaccttgatgatgcttggaaggttccgggaagctcttggagatgcacaacagtcagtgaggttggatgacagttttgtccggggacatctacgagagggcaagtgccacctctctctggggaatgccatggcagcatgtcgcagcttccagagagccctagaactggatcataaaaatgct

SEQ ID NO: 127806 - DNA, 678 bp, Homo sapiens
  Payload ID: 5017
  Gene Symbol: DNAJC7
  Gene Name: DnaJ (Hsp40) homolog, subfamily C, member 7
  ENST ID: ENST00000589773
  CDS Start-End: 372-678
gtcgctgtggtttcagctccctccacactgggataggcagagtatgagcattggcacatgctgttttcctggaacaaacagtcccacgcctttgacatctcatccttcagtccctttgctgtaaaggcaacttgaacaagcttcagccctttctcagacttccagggcaggacttgaatggatttgacactggaattgttcctgatgcagccttgttcagttcttgctgctgccatgctggattccaaagatccactctttcctcgactggtctcgcaggggaagcagagactttcaaggaacaaggaaatgcatactatgccaagaaagattacaatgaagcttataattattatacaaaagccatagatatgtgtcctaaaaatgctagctattatggtaatcgagcagccaccttgatgatgcttggaaggttccgggaagctcttggagatgcacaacagtcagtgaggttggatgacagttttgtccggggacatctacgagagggcaagtgccacctctctctggggaatgccatggcagcatgtcgcagcttccagagagccctagaactggatcataaaaatgctcaggcacaacaagagttcaagaatgctaatgcagtcatggaatatgagaaaatagcagaaacagattttgagaagcgagattttc

SEQ ID NO: 127807 - DNA, 544 bp, Homo sapiens
  Payload ID: 5017
  Gene Symbol: DNAJC7
  Gene Name: DnaJ (Hsp40) homolog, subfamily C, member 7
  ENST ID: ENST00000590774
  CDS Start-End: 204-544
ctttcttaagttaagcaccaaggaagagggcaactgcttgggcgctgttggcactccgaagcagccgcagtggttcgagattgccagtcggactagccaagggagctgctgaggaagcagagactttcaaggaacaaggaaatgcatactatgccaagaaagattacaatgaagcttataattattatacaaaagccatagatatgtgtcctaaaaatgctagctattatggtaatcgagcagccaccttgatgatgcttggaaggttccgggaagctcttggagatgcacaacagtcagtgaggttggatgacagttttgtccggggacatctacgagagggcaagtgccacctctctctggggaatgccatggcagcatgtcgcagcttccagagagccctagaactggatcataaaaatgctcaggcacaacaagagttcaagaatgctaatgcagtcatggaatatgagaaaatagcagaaacagattttgagaagcgagattttcggaaggttgttttctgcatggaccgtgccctaga

SEQ ID NO: 127808 - DNA, 543 bp, Homo sapiens
  Payload ID: 5017
  Gene Symbol: DNAJC7
  Gene Name: DnaJ (Hsp40) homolog, subfamily C, member 7
  ENST ID: ENST00000590886
  CDS Start-End: 317-543
attgaagtttgtattttaatggttttgaaaagctgagtactgggcacttgcttttttgttcttcgggactttagaagtttggagaacaatagtcagcagttgcctagttgctttgtggcctgatgcagagtccctctgagagcccatttctcccttactgcactagtctttggtcccctttctccagcactgagtgatgtggaagttactcagaggtctttccagggaagcagagactttcaaggaacaaggaaatgcatactatgccaagaaagattacaatgaagcttataattattatacaaaagccatagatatgtgtcctaaaaatgctagctattatggtaatcgagcagccaccttgatgatgcttggaaggttccgggaagctcttggagatgcacaacagtcagtgaggttggatgacagttttgtccggggacatctacgagagggcaagtgccacctctctctggggaatgccatggcagcatgtcgcagcttccagagagccctagaactggatcataaaaatgctcaggc

SEQ ID NO: 127809 - DNA, 1719 bp, Homo sapiens
  Payload ID: 5017
  Gene Symbol: DNAJC7
  Gene Name: DnaJ (Hsp40) homolog, subfamily C, member 7
  ENST ID: ENST00000588814
  CDS Start-End: 4-417
aagatggcggctgccgcggagtgcgatgtggtaatggcggcgaccgagccggagctgctcgacgaccaagaggcgaagagggaagcagagactttcaaggaacaaggaaatgcatactatgccaagaaagattacaatgaagcttataattattatacaaaagccatagatatgtgtcctaaaaatgctagctattatggtaatcgagcagccaccttgatgatgcttggaaggttccgggaagctcttggagatgcacaacagtcagtgaggttggatgacagttttgtccggggacatctacgagagggcaagtgccacctctctctggggaatgccatggcagcatgtcgcagcttccagagagccctagaactggatcataaaaatgctcaggcacaacaagagcttcattaaaactttcctatgtctgattttccggtgcagttcaagaatgctaatgcagtcatggaatatgagaaaatagcagaaacagattttgagaagcgagattttcggaaggttgttttctgcatggaccgtgccctagaatttgcccctgcctgccatcgcttcaaaatcctcaaggcagaatgtttagcaatgctgggtcgttatccagaagcacagtctgtggctagtgacattctacgaatggattccaccaatgcagatgctctgtatgtacgaggtctttgcctttattacgaagattgtattgagaaggcagttcagtttttcgtacaggctctcaggatggctcctgaccacgagaaggcctgcattgcctgcagaaatgccaaagcactcaaagcaaagaaagaagatgggaataaagcatttaaggaaggaaattacaaactagcatatgaactgtacacagaagccctggggatagaccccaacaatataaaaacaaatgctaaactctactgtaatcggggtacggttaattccaagcttaggaaactagatgatgcaatagaagactgcacaaatgcagtgaagcttgatgacacttacataaaagcctacttgagaagagctcagtgttacatggacacagaacagtatgaagaagcagtacgagactatgaaaaagtataccagacagagaaaacaaaagaacacaaacagctcctaaaaaatgcgcagctggaactgaagaagagtaagaggaaagattactacaagattctaggagtggacaagaatgcctctgaggacgagatcaagaaagcttatcggaaacgggccttgatgcaccatccagatcggcatagtggagccagtgctgaggttcagaaggaggaggagaagaagttcaaggaagttggagaggcctttactatcctctctgatcccaagaaaaagactcgctatgacagtggacaggacctagatgaggagggcatgaatatgggtgattttgatccaaacaatatcttcaaggcattctttggcggtcctggcggcttcagctttgaagcatctggtccagggaatttcttttttcaatttggctaatgaagggcaaccacccagaacccagaaaatgcagattcactcagtttaatcttgaatgtggaaacagttcacctcctcccttcatcacgtctccgtgtgcttagagcagtttcgttttctcagttggatgccctgtgtctctgtgagtggggtggagcaaagggaaccaatgccgaagaccgagggcagggg

SEQ ID NO: 127810 - DNA, 620 bp, Homo sapiens
  Payload ID: 5017
  Gene Symbol: DNAJC7
  Gene Name: DnaJ (Hsp40) homolog, subfamily C, member 7
  ENST ID: ENST00000589586
  CDS Start-End: 309-620
gcctggcgtaggagctgaggcatggccttgttctccagctgagaggacgatcgtccttataggagaggccgagtctccgagggcaatttcagaggtctggtgcgagtgacaaatgcatgagccacttttcaggaggtgaaattattaaaactcttgaggatgtgacctatttcacattgagaaataagttgccctgaatggagtaaccatttttcctggaagcagagactttcaaggaacaaggaaatgcatactatgccaagaaagattacaatgaagcttataattattatacaaaagccatagatatgtgtcctaaaaatgctagctattatggtaatcgagcagccaccttgatgatgcttggaaggttccgggaagctcttggagatgcacaacagtcagtgaggttggatgacagttttgtccggggacatctacgagagggcaagtgccacctctctctggggaatgccatggcagcatgtcgcagcttccagagagccctagaactggatcataaaaatgctcaggcacaacaagagttcaagaatgctaatgcagtcatggaatatgagaaaatagcagaaacagattttgagaagcgagattttcggaag

SEQ ID NO: 127811 - DNA, 686 bp, Homo sapiens
  Payload ID: 5017
  Gene Symbol: DNAJC7
  Gene Name: DnaJ (Hsp40) homolog, subfamily C, member 7
  ENST ID: ENST00000585866
  CDS Start-End: 8-127
cggtaagatggcggctgccgcggagtgcgatgtggtaatggcggcgaccgagccggagctgctcgacgaccaagaggcgaagagtcccacgcctttgacatctcatccttcagtccctttgctgtaaaggcaacttgaacaagcttcagccctttctcagacttccagggcaggacttgaatggatttgacactggaattgttcctgatgcagccttgttcagttcttgctgctgccatgctggattccaaagatccactctttcctcgactggtctcgcaggggaagcagagactttcaaggaacaaggaaatgcatactatgccaagaaagattacaatgaagcttataattattatacaaaagccatagatatgtgtcctaaaaatgctagctattatggtaatcgagcagccaccttgatgatgcttggaaggttccgggaagctcttggagatgcacaacagtcagtgaggttggatgacagttttgtccggggacatctacgagagggcaagtgccacctctctctggggaatgccatggcagcatgtcgcagcttccagagagccctagaactggatcataaaaatgctcaggcacaacaagagttcaagaatgctaatgcagtcatggaatatgagaaaatagcagaaacagattttgagaagcgagattttcggaag

SEQ ID NO: 127812 - DNA, 1058 bp, Homo sapiens
  Payload ID: 5017
  Gene Symbol: DNAJC7
  Gene Name: DnaJ (Hsp40) homolog, subfamily C, member 7
  ENST ID: ENST00000589810
  CDS Start-End: 204-965
gcttccgcctggcgtaggagctgaggcatggccttgttctccagctgagaggacgatcgtccttataggagaggccgagtctccgagggcaatttcagaggtctggtgcgagggaagcagagactttcaaggaacaaggaaatgcatactatgccaagaaagattacaatgaagcttataattattatacaaaagccatagatatgtgtcctaaaaatgctagctattatggtaatcgagcagccaccttgatgatgcttggaaggttccgggaagctcttggagatgcacaacagtcagtgaggttggatgacagttttgtccggggacatctacgagagggcaagtgccacctctctctggggaatgccatggcagcatgtcgcagcttccagagagccctagaactggatcataaaaatgctcaggcacaacaagagttcaagaatgctaatgcagtcatggaatatgagaaaatagcagaaacagattttgagaagcgagattttcggaaggttgttttctgcatggaccgtgccctagaatttgcccctgcctgccatcgcttcaaaatcctcaaggcagaatgtttagcaatgctgggtcgttatccagaagcacagtctgtggctagtgacattctacgaatggattccaccaatgcagatgctctgtatgtacgaggtctttgcctttattacgaagattgtattgagaaggcagttcagtttttcgtacaggctctcaggatggctcctgaccacgagaaggcctgcattgcctgcagaaatgccaaagcactcaaagcaaagaaagaagatgggaataaagcatttaaggaaggaaattacaaactagcatatgaactgtacacagaagccctggggatagaccccaacaatataaaaacaaatgctaaactctactgtaatcggggtacggttaattccaaggaaactagatgatgcaatagaagactgcacaaatgcagtgaagcttgatgacacttacataaaagcctacttgagaagagctcagtggtgggattgttccagccc

SEQ ID NO: 127813 - DNA, 449 bp, Homo sapiens
  Payload ID: 5017
  Gene Symbol: DNAJC7
  Gene Name: DnaJ (Hsp40) homolog, subfamily C, member 7
  ENST ID: ENST00000587727
  CDS Start-End: 1-168
gacaagaatgcctctgaggacgagatcaagaaagcttatcggaaacgggccttgatgcaccatccagattttgatccaaacaatatcttcaaggcattctttggcggtcctggcggcttcagctttgaagcatctggtccagggaatttcttttttcaatttggctaatgaagggcaaccacccagaacccagaaaatgcagattcactcagtttaatcttgaatgtggaaacagttcacctcctcccttcatcacgtctccgtgtgcttagagcagtttcgttttctcagttggatgccctgtgtctctgtgagtggggtggagcaaagggaaccaatgccgaagaccgagggcaggggagggaggcgggggtggacagggaggcagcttgtgaatttttgttttactgtttaactttattaaaaaagaaaaaaaaaagagaataaaa

SEQ ID NO: 127814 - DNA, 586 bp, Homo sapiens
  Payload ID: 5017
  Gene Symbol: DNAJC7
  Gene Name: DnaJ (Hsp40) homolog, subfamily C, member 7
  ENST ID: ENST00000589576
  CDS Start-End: 203-586
cttcctctcccgcttccgcctggcgtaggagctgaggcatggccttgttctccagctgagaggacgatcgtccttataggagaggccgagtctccgagggcaatttcagagggaagcagagactttcaaggaacaaggaaatgcatactatgccaagaaagattacaatgaagcttataattattatacaaaagccatagatatgtgtcctaaaaatgctagctattatggtaatcgagcagccaccttgatgatgcttggaaggttccgggaagctcttggagatgcacaacagtcagtgaggttggatgacagttttgtccggggacatctacgagagggcaagtgccacctctctctggggaatgccatggcagcatgtcgcagcttccagagagccctagaactggatcataaaaatgctcaggcacaacaagagttcaagaatgctaatgcagtcatggaatatgagaaaatagcagaaacagattttgagaagcgagattttcggaaggttgttttctgcatggaccgtgccctagaatttgcccctgcctgccatcgcttcaaaatcctcaaggcagaa

SEQ ID NO: 127815 - DNA, 782 bp, Homo sapiens
  Payload ID: 5017
  Gene Symbol: DNAJC7
  Gene Name: DnaJ (Hsp40) homolog, subfamily C, member 7
  ENST ID: ENST00000588641
  CDS Start-End: 8-782
cggtaagatggcggctgccgcggagtgcgatgtggtaatggcggcgaccgagccggagctgctcgacgaccaagaggcgaagagggaagcagagactttcaaggaacaaggaaatgcatactatgccaagaaagattacaatgaagcttataattattatacaaaagccatagatatgtgtcctaaaaatgctagctattatggtaatcgagcagccaccttgatgatgcttggaaggttccgggaagctcttggagatgcacaacagtcagtgaggttggatgacagttttgtccggttcaagaatgctaatgcagtcatggaatatgagaaaatagcagaaacagattttgagaagcgagattttcggaaggttgttttctgcatggaccgtgccctagaatttgcccctgcctgccatcgcttcaaaatcctcaaggcagaatgtttagcaatgctgggtcgttatccagaagcacagtctgtggctagtgacattctacgaatggattccaccaatgcagatgctctgtatgtacgaggtctttgcctttattacgaagattgtattgagaaggcagttcagtttttcgtacaggctctcaggatggctcctgaccacgagaaggcctgcattgcctgcagaaatgccaaagcactcaaagcaaagaaagaagatgggaataaagcatttaaggaaggaaattacaaactagcatatgaactgtacacagaagccctggggatagaccccaacaatataaaaacaaatgctaaactct

SEQ ID NO: 127816 - DNA, 1759 bp, Homo sapiens
  Payload ID: 5018
  Gene Symbol: DNAJC8
  Gene Name: DnaJ (Hsp40) homolog, subfamily C, member 8
  Uniprot ID: O75937
  ENST ID: ENST00000263697
  CDS Start-End: 28-789
gggtcacgtggtggctgggccggggaaatggcggcttcaggagagagcgggacttcaggcggcggaggcagcaccgaggaagcatttatgaccttctacagtgaggtgaaacaaatagagaagagagactcggttctaacttcgaaaaatcagattgaaagactgacccgtcctggttcctcttacttcaatttgaacccatttgaggttcttcagatagatcctgaagttacagatgaagaaataaaaaagaggtttcggcagttatccatcttggtgcatcctgacaaaaatcaagatgatgctgacagagcacaaaaggcttttgaagctgtggacaaagcttacaagttgctactggatcaggagcaaaagaagagggccctggatgtaattcaggcaggaaaagaatacgtggaacacactgtgaaagagcgaaaaaaacaattaaagaaggaaggaaaacctacaattgtagaggaggatgatcctgagctgttcaaacaagctgtatataaacagacaatgaaactctttgcagagctggaaattaaaaggaaagagagagaagccaaagagatgcatgaaaggaaacgacaaagggaagaagagattgaagctcaagaaaaagccaaacgggaaagagagtggcagaaaaactttgaggaaagtcgagatggtcgtgtggacagctggcgaaacttccaagccaatacgaaggggaagaaagagaagaaaaatcggaccttcctgagaccaccgaaagtaaaaatggagcaacgtgagtgaccgcccaaggtcacaggcacagaacctttcccctgctatctcccttcctgcttcgaaggactcattctttcctcccacttccaccccaacatagagtagtatttgctttttagtccattttgttttcaatacgatttaatatcgatcagagtaattcttttgtacattgaaatgaggggcttggtttaaaaaaagacctttccctctccctgcccctagaacaaccagtattagaaggtgccaccattggtgctgccttctcttcccacagcctgtaactcagtgttttgtacttcactgaattgtgatggttagaaacttcgtggatagtttgtggaaatcatccaattaaacatactgcttaaaacagtgttgctgtgacttcagagacaagcctggaaggggcaccttaggaagccccttcgcttcagttgctcgcttctgggtgtgctcccttcgaaggcccagataagacagggaacacttgtgagcacacagagcagcatctgatgccctgtggtgtttggcatgtgccccctgtctactgaccaatcagtgtggcatgaggcccacgccacccaaacctttcactttccaaagagctagccgtcctccacccagtaccatgtcctagcctgtctgcatttgttagtggtaatattctttatgtataataaatttttatacccaagccattgatgtacttttccttgtactctcccttgtgggtcccttgtctggcttggctgaaccccaaaatgctttggggttggacagacctggctgaaccttagtttcttcatctatgaaatgggaatatgaattactgcagcagcttttagggcagatttgccatggcatatacaaggtaactaccatagtgctccttgggtattgccaatatcctattatttctgtgtaaaatgaagatactgattgttttgaggattaaatgaagtaatatatgaaa

SEQ ID NO: 127817 - DNA, 483 bp, Homo sapiens
  Payload ID: 5018
  Gene Symbol: DNAJC8
  Gene Name: DnaJ (Hsp40) homolog, subfamily C, member 8
  ENST ID: ENST00000603289
  CDS Start-End: 1-319
gttcaaacaagctgtatataaacagacaatgaaactctttgcagagctggaaattaaaaggaaagagagagaagccaaagagatgcatgaaaggaaacgacaaagggaagaagagattgaagctcaagaaaaagccaaacgggaaagagagtggcagaaaaactttgaggaaagtcgagatggtcgtgtggacagctggcgaaacttccaagccaatacgaaggggaagaaagagaagaaaaatcggaccttcctgagaccaccgaaagtaaaaatggagcaacggacagaatcagccctcaggaggggcccaaagtgagaaggggaaaggtgacacttgaaatgtgaagatacaggaaactaggctttacaggaagcatggctggggaggcctcaggaaacttaacagttgtggcagaaggtgaagaggaaggaggcacgtcttacatggccggagcaggaggaagagagcgcagggagagg

SEQ ID NO: 127818 - DNA, 3032 bp, Homo sapiens
  Payload ID: 5019
  Gene Symbol: DNAJC9
  Gene Name: DnaJ (Hsp40) homolog, subfamily C, member 9
  Uniprot ID: Q8WXX5
  ENST ID: ENST00000372950
  CDS Start-End: 1674-2456
atttcagtgtgcgatttcaattttccgtagcaaatgtatatatagaaaaatgttaaaatagatgtatttgaataccttaaaaaatacaagaaactggaagaaagataatattgcaaagcatctacatatatcctaggccttttgtgtacaaggttatttgtgacaattgtaaggtattatgaaggcaggtaggattatctccgttttacagatagggaagctgaggcctagaggtggaaacttgcccagtgatgtaagattcatctcccggttatgccctcctggaaagcccttcccaacatattatgttgtccatagagggaaaaatgagcaaagacagatggcttaactctggtgtgtgactaagatataggaaatttatagaggaggttctatcaatgtgccgacttactttgtgttttatgttctgagaacgattaccagccatctcaaattctgtggttgtcaaagctcccctggggttgttgctggttggcccccacttgctttgagactttgatgccagggcaggttgagaggaactgacttcagctgagtttgatcttggatctgggaaagagaaatgctttgaaaatcacggcaactctgggaagtttaaaagatattaatgtatcctggagagtttgaggctttgcagaaacttattggcagagcagaatgattctgaaaaatgctacatcagtgaggggatatttgataaggtattttctgccaactcgggtattcacttagcattgtttatcctttaagatatgtatacacatacttcctctgtgagtttaccctactaacaaagttttatccccagcctcaaccttgctttgggtctccaggcccaagtttctcaccatctcttggatgattgctccagcccactctgctgccacctgggatccaacatgttcaaacccagctgtgaacttcacagagtattaaaagaaagagcctttgcttcagcagtttatgttattaagacggaggcttgggtcatgttatctctctccaccaatgtgtaaggtgaaagtcctattaggtaagagtttttggaagacccgtgttttgtgctttttgggtttcagtatagggttttttcctacagggctagagggaaagtaccccagcatttccaaccagtggggtgcaaaattatttgggtctacagctttacctattcctttcaagaacatttttgaaaaaacacatctgttaagttgaaccatgtgtaactgctgaatgctgatgtttggccgttttctacttaaaaaaataggccagcagtttgtaaattcaagctaatatatgaactttttgaaaaagttgttcttggacactaaaaggtaagacggacgccagatttccagagcaaggggaggagagacccgagcaacatcacttccctgaagacctagctcctgcgcgcggccggggactgtgactccacatgccggcgttacttacccgggcccgcgcctgactcgccacacctcattttgcggccgccgtaaagcgcggatgcgcggcgtggccacgccccttcagtgcttgtgacgcaggcgccctgggctttttgggcgcgaaaaagaagcagtcctgggttgtacccggcgcagctgggagcggctgcttcctccggggtcgtatctccgcccggcatggggctgctggacctttgcgaggaagtgttcggcaccgccgacctttaccgggtgctgggcgtgcgacgcgaggcctccgacggcgaggtccgacgaggctaccacaaggtgtccctgcaggtacacccggaccgggtgggtgagggcgacaaggaggacgccacccgccgcttccagatcctgggaaaagtctattccgttctcagtgacagagaacagagagcagtgtacgatgagcagggaacagtggacgaggactctcctgtgctcacccaagaccgagactgggaggcgtattggcggctactctttaaaaagatatctttagaggacattcaagcttttgaaaagacatacaaaggttcggaagaagagctggctgatattaagcaggcctatctggacttcaagggtgacatggatcagatcatggagtctgtgctttgcgtgcagtacacagaggaacccaggataaggaatatcattcagcaagctattgacgccggagaggtcccatcctataatgcctttgtcaaagaatcgaaacaaaagatgaatgcaaggaaaaggagggctcaggaagaggccaaagaagcagaaatgagcagaaaggagttggggcttgatgaaggcgtggatagcctgaaggcagccattcagagcagacaaaaggatcggcaaaaggaaatggacaattttctggctcagatggaagcaaagtactgcaaatcttccaaaggaggagggaaaaaatctgctctcaagaaagaaaagaaataatggaatttttctcttcaaaggtccttaggtgtaaattgatgccatcgtaggcaaggtgcaggcaggatttgaaggcaaaagtcaattcagctcttgagaaaaggtgtctttccagcctgaatttttcagattgactagaccaagcagaatctctcaacctgatcttagtatttcctagaaagcacttgacattgtgtgaggtctcacctgaaggaacttggtggtgacatttgggagggtggagggaggcagtgtccttcctgacagcacttgcctccatggatcttctgtacacagaactcttatctaggatgtggttctgttcatgctgctttctgcgatgtgcgtgtctgttagaataggctctctacccagctagaacaccttccagacacttgctggacagctatcttccacatacttcccagtttacatttggtcttaatgatcttgaatagatcctctcttcattttactcagccaggttttgtactgatgtacaggtgttaaattacttcaagcatttttgtaagaggtgtatataattcaataaaaaaggtaaaacatgatgattaa

SEQ ID NO: 127819 - DNA, 1448 bp, Homo sapiens
  Payload ID: 5020
  Gene Symbol: DNAJC25-GNG10
  Gene Name: DNAJC25-GNG10 readthrough
  ENST ID: ENST00000374294
  CDS Start-End: 23-484
agagccgccagcgaggctggggatgggggcgccgctgctctctcccggctggggagccggggctgccggccggcgctggtggatgctgctggcgcccctgctgccggcgctgctgctggtgcggcccgcgggggccctggtggaggggctctactgcggcacgcgggactgctacgaggtgctgggcgtgagccgctcggcgggcaaggcggagatcgcgcgggcctaccgccagctggcccggcgctaccaccctgaccgctaccggccccagcccggagacgagggccccgggcggacgccgcagagcgccgaggaggctttcctgctggtggcaaccgcctacgagacactcaaggtctctcaggcagctgcagagcttcaacagtactgtatgcagaatgcctgcaaggatgccctgctggtgggtgttccagctggaagtaaccccttccgggagcctagatcctgtgctttactctgaagactcgagagaagtttgctgaggaatgccttcaagcacaaagtgatgaatgactgccttcaagtctcaagaaaacacttttccctaacttttagagatatttcagccctttcctgtggcctggtcctatagccaaaatcacagatattcatgagtttctacttgagtgagaaaactgggtgaaggaatagaattttaaatagtaataactgcttgttttttttgtgcaagtacttttatacataagataaacaaaaaccttaccaccaaacataccaaaatgcacctctttcataagtgagttactaagatttctatacctggaatatcatgtatgtttcatttactggatgtttacattttaggaaggaaaatagttttgtttatttaaacaactgaatacttataaactgttgttcctggaagttatttattccataaaaaatttgttcttttgtcatgaatttataattcctaaatgaagaccagaaagtacaaattgctgggaggaagaataggctttattaatcaactgatgtcttgatttttctaaatgggaagattgctttatttttaacactaattatgggagcagattcttagcaaacttctttggaaaagttaatgttatgatgtgcattaggctgccccatcgtgtatataaatgaagcagatttgatttttgtattcttacgtttctctgctttgtagttgtggctgtacttaaagaaatacagaatttcatatatttaaaaatgtttaaaatgtgacccacagaacattgtaaatgattaaaaactaacatgaaaatattacaacctaaaagaattcttaacttcacaagtgttttacttcgacgatgtgcctttgatttaatttgggacacttttttagaaggatacattattcgtgtttgcaacggtctttgaagagcttggaaataaaatttctgcttaattaatca

SEQ ID NO: 127820 - DNA, 1605 bp, Homo sapiens
  Payload ID: 5021
  Gene Symbol: DND1
  Gene Name: DND microRNA-mediated repression inhibitor 1
  Uniprot ID: Q8IYX4
  ENST ID: ENST00000542735
  CDS Start-End: 45-1106
ggaggaagttataaagagggtacgagggggccagctggagagccatgcagtccaagcgggattgtgagctgtggtgtgagagggtgaatccagagaacaaggcggcgctggaggcgtgggtcagggagacaggcatccgcctggtgcaggtgaacgggcagaggaagtatggcgggccacccccaggctgggtgggcagcccgccgccagctgggtcagaggtgttcatcgggcggctgcctcaggacgtgtacgagcaccagcttatcccgctgttccagcgcgtgggccgcctctacgagttccgcctgatgatgaccttcagcggcctgaaccgcggcttcgcctatgcccgctacagctcgaggcgcggcgcgcaggccgccatcgccacgctgcacaaccatccgctgcggccgtcctgcccgctgctcgtgtgccgcagcaccgagaagtgtgagctgagcgttgacggcctgccgccgaatctgacccgcagcgcgctgctgctcgcgctgcagccgctgggtcccggcttgcaggaggcgcggctgctgcccagccccggaccggcgcccgggcagatcgctctgctcaaattcagctcgcaccgggccgctgccatggccaaaaaggccctggtggaagggcagtcacacctctgtggagagcaggtggctgtggagtggctcaagccagacctgaagcagcgacttcgccagcagcttgtgggtcccttcttgcggtccccacagccagagggcagccagttggctttggcaagggacaagttagggttccaaggggctcgggctaccctgcagttgctgtgccaacgaatgaagctgggcagccctgtgttcctcaccaagtgtttgggcataggacctgctggctggcaccgcttctggtaccaggtggtgattcctgggcatccggtgcccttcagcggcctcatctgggttgtgctgaccctagatggccgggatgggcatgaggtggccaaggatgctgtgtctgtacggctgctgcaggcactcagtgagtctggggccaacctcctgtggtctgctggggctgaggcaggtaccatggttaaacagtgactccattctttctccacaggcaccctgaatgggcatgcagagcctgtgtcaggccccatcccagcaggcctgggtggccactttctgacccccaaaggtggggaggggcatgggcccaggcccatcagcctccctgctgggacagggacctatggcacctgggggcagcttaggtttgggttaagttgtggtgaggggccttgccctcccgctcccagcccagggtccaacctgacccagtgatcttccatggccgttccttgtcccacccccacccgatcataccttcccccctctgccacagcttagcatgaatcttctttattgtcctgatttgtcctctttgttggtttttatttgtggggaagggcagctgagccaaaggggtcagaaattctgccctttgcctccaccacatggcattctggttttggtttctgtatagttttgggtctttctatgctggttgtatttatattaaacccctggttagtatata

SEQ ID NO: 127821 - DNA, 724 bp, Homo sapiens
  Payload ID: 5022
  Gene Symbol: DNLZ
  Gene Name: DNL-type zinc finger
  Uniprot ID: Q5SXM8
  ENST ID: ENST00000371738
  CDS Start-End: 76-612
gcttccgcccggcgcccacttccaagatggcggcggggcggggccggggcagggcggacggagccggcgagcgggatgctgcggactgcgctgcgcggcgcgccgaggttgctgagtcgcgtgcagccccgggcgccctgcctgaggcggctgtggggccgcggggcccgtccagaggtcgcggggaggcggcgggcctgggcctggggctggcggcgctcaagctccgagcaggggccggggcccgcggcggctctggggcgcgtggaggcggcgcactaccagctcgtctacacctgcaaggtctgcgggactaggtcctccaagcgcatctccaagctggcctatcaccaaggcgtggtcattgtgacctgccccggctgccagaaccaccatatcatcgctgacaacctgggctggttctcggacctgaatgggaagagaaatatcgaagagatcctgacggccagaggcgagcaggtgcaccgtgtggcgggcgagggggccctggaactggttctggaggctgcaggggcccccacatccactgcagctccggaagcgggtgaggatgagggtccccccagccctggcaagacggagccgagctgactcctgcgctccccggcactgtgggacttcggccttccagaaggaggttttggccctgggcctctctggacgtggcctgttttctatcaataaacagacattacttccagat

SEQ ID NO: 127822 - DNA, 2934 bp, Homo sapiens
  Payload ID: 5022
  Gene Symbol: DNLZ
  Gene Name: DNL-type zinc finger
  ENST ID: ENST00000371739
  CDS Start-End: 6-359
gcgggatgctgcggactgcgctgcgcggcgcgccgaggttgctgagtcgcgtgcagccccgggcgccctgcctgaggcggctgtggggccgcggggcccgtccagaggtcgcggggaggcggcgggcctgggcctggggctggcggcgctcaagctccgagcaggggccggggcccgcggcggctctggggcgcgtggaggcggcgcactaccagctcgtctacacctgcaagaaatatcgaagagatcctgacggccagaggcgagcaggtgcaccgtgtggcgggcgagggggccctggaactggttctggaggctgcaggggcccccacatccactgcagctccggaagcgggtgaggatgagggtccccccagccctggcaagacggagccgagctgactcctgcgctccccggcactgtgggacttcggccttccagaaggaggttttggccctgggcctctctggacgtggcctgttttctatcaataaacagacattacttccagatgctggggcctgtggccctcgtggcctttctttttctggagttagaacgattgctctgaatccctggtgctgctgggtgggacataggagccgcaggacctctcgcctcaccacagttccttctacacagagtcacccagctcttgcccacagaggccacagtcgcgtggaaagggggctggatgtggcgtcagagcccttcctggctgtcgctgcgtgactttgagcaggtcaccacccctgtgagcctcagccttcctctgcaaggcccttgccgcccccctggccagctctggcggcctcccttccgtgagccagtgcagacctgagccctggtcctcggccgccggccgtcggcgaaacagtgagcaaaccaggctgcctgctggcccaggcaggacgagcagctatggcgtggccgtgtgttaggagctccagacccctcccgggggagccacctgggcctccttccctcggtggacagcgctctggacgtccccagggccctccgaggtgtgtggggtttgtctcccagccttgtctgtgcgcaggatgttcccgtgtttatgaaagcgagcaaacacagcagcctgtttatttgcagaagcgttctgggcagcgtaaccttcagcattcatcacccgccacactccggcagggaagagaatggggcgaggtgggaggtggaggcaggactgagcacgacagggacccagtgcggcccctcccagcgggacacggccaggactgccagctcacatccggcccgtgggaggccggggcgcggcggcatcgttcccagtgtgcttgtggcgtgggctttgcctcgattaccccctgtccttctttcagccaacaaccctctattattcccacccagagccttctgtgccatttgtggaaactgtcctcttctcggctgagccaccggcacccaggcctgctcctccatggaggcactggctgggggtctcttgggggcttggaagtgcagtggggctgggcttggcttggctgcctcactgcctccagagggcctggaccagcatgtggggaggtccagggagccgtctggacctggaagtgcagaattagagcaaggagagccgcttgggccaacccctcctcttacggatggggagatggcggctggtagttgggatgtggacgttaccatgtcttttctgtctgatgccagcacctctgggcccaggctggccctggagggaaatccttcccaaggctggcacgttcctagagaagacctatggctaccccccgcgtgccagaagcatcccgccagctcctgcctgaggccccctggaccctgtctccctccgcccttccctccccgcagccccaatcccacagccaggtttctgcaaggggctttgccatcctaatctcctgccactctacacccccccgccccaggacatccctgcctcccgggcacggttgctggcctgggcatccctcgtcacagcgtctctccaagcaggttcctcggccgcaccttcagaggctgtcccagccagtagcgtgggcggcactgctgcgcttccctggctgtgcgcggtcctgggccctgcacggttacttggaccctgtgtgcgtgtaccaccacacgcaagctggctgggaccctggacctggagtacacgttgattctggttcccaaggccccttctggggtggaggaggcaacggagtcaaccagcacagaggctgtggctgccaacatggccaggtgggctgtggcgaggggcagcaggactgcccggcgcacctgtgtgtcccctgacgggggccccgtgggggtgccacccaccacaagcagcgcccagacaagccccaagactgcagatctgccgtcggctcctccactgtggctcagtgtccagaccctgagcccagccggatcagactccaggaaaggacctccctcccccgggtgctgggtgggcggcagcaggctgggtcctcagggggtcgtggggctgacctgggggctgctgcttctgggggctggtcccggccacgtgagtgtcagctcagagcatgctctgtttccctaggggctgggagcgtgaggaggtaggggtgcaggaatcagtggtgacagcaggcagccacttcacccctctgtgccccagctcccccgtggttaaatgcagtgggaactccatctctctgaggtctcagagggcccagacagtgggtatctgtggacactttgcacagtgcagcctcttaccgggttaggcccccacccgggactaagcccatacggaccacactcacttggccgactttatttttcaggaaaaacagaaaaacaaatgtacctcttgggttggaaaggacccattgacaacatggcacagacgtgagcaataaatacgcacatacattcaagta

SEQ ID NO: 127823 - DNA, 2555 bp, Homo sapiens
  Payload ID: 5023
  Gene Symbol: DOK1
  Gene Name: docking protein 1, 62kDa (downstream of tyrosine kinase 1)
  Uniprot ID: Q99704
  ENST ID: ENST00000233668
  CDS Start-End: 670-2115
ctctgggtcctccctccccgtggagctggccactgccgcgccccctccccctccctggccctcccggctcgttcaatgaagctttctcttcccgcggcatggaggccaggcctctgcggtcagggagctgacatgcaagcggcggccgggcggcggggcggccccggtggtggcgggaagcggttcaaccccagccctccctccgagtcccgggccagcggagtctaaacagcccggctcgggcggggctgggggcgggcccggccagggtaaataaagccccggaggcccgtgtgggtctctccggtgcccggggcgctttcggggtgatgtcatggctttcactctgacgtcaccttgggcatatgacgtcacgcgcagccaccacgcccagaggccagggccctcgcgccaaaaccgaggactttcggtggagccactggcgcgcccccacgacggcgggtaggggcctggggtgctgcagctcccggctaatccgggggtctccaccattccttctcgctcctctccctcaccccaccgcgacccccccagcggctgccggcgggggccggggaggggcggaaactcctccagggaacccggccccgcctcccgccccgcctcccgccgcagggccaggaagcgcggaaggaaccgccgggggccatggacggagcagtgatggaagggccgctttttttgcagagtcagcgctttgggaccaagaggtggaggaagacctgggccgtgctctacccggccagtccccacggcgtagcgcggctcgagttctttgaccataaggggtcgagctctgggggtggccgagggagctcgcgccgcctggactgcaaagtgatccgtctggctgagtgtgtgagtgtggcccccgtcaccgtggagaccccccctgagcccggcgccactgccttccgcctggacactgctcagcgctcgcacctgctggcggccgacgcgccgtccagtgcagcctgggtgcagacgctgtgccgaaacgcctttccgaaaggcagctggactctggcgcctaccgataacccacctaagctttctgccctggagatgctggagaactccttgtacagccctacctgggaaggatcccaattctgggtaacggtgcagaggactgaggccgccgagcgctgtggcctgcatggctcctacgtgctgagggtggaggctgaaaggctgactctcctgaccgtgggggcccagagtcagatactggagccactcctgtcctggccctacactctgttgcgtcgctatggccgggacaaggtcatgttctctttcgaggccggccgccgctgcccctcaggccctggaaccttcaccttccagacggcacagggaaatgacatcttccaggcagttgagactgccatccaccggcagaaggcccagggaaaggccggacaggggcacgatgttctcagagctgactcccatgaaggggaggtggcagaggggaagttgccttccccacctggcccccaagagctcctcgacagtcccccagccctgtatgctgagcccttagactccctgcgcattgctccatgcccttcccaggactccctatactcagaccccttggacagcacgtctgctcaggcaggagagggagtacaacggaagaaacctctctattgggacttgtatgagcatgcgcagcagcagttgctgaaggccaagctgacagaccccaaagaggatcccatctatgatgaacctgagggcctggccccagtccctccccagggcctttatgatctgcctcgggagcccaaggatgcatggtggtgccaagctcgggtgaaggaggagggctatgagctcccctacaaccctgccactgatgactacgctgtgccaccccctcggagcacaaagcccctccttgctcccaagccccagggcccagccttccctgaacctggtactgcaactggcagtggcatcaaaagccacaactcagccctgtacagccaggtccagaagagcggggcctcagggagctgggactgtgggctctctagagtagggactgacaagactggggtcaagtcagagggctctacctgagaaggacggcaaggctgaggtggctaagggggaccatggggaggtggcactagggatcaaagaagatggttagaaccagcagaagccagagggtgggaggggccatgctgtgtgagaccaggggaccagagggatgggagagtcaagggaaggacaatcccaggaagtcctaagaagtggggcagatggcagggctgaggatgggctctgcatcccccaaagccatcccttccctacttccccaaatgaagggacggctgtgggaccaggtctgtggaaagtggtgcatggtcagaatgggtgcagtttgaggggcctgtgtggaggcctcagggagatgttggactgtgcctggatccttactcctgcattgttctttgccagagacctatttaaaaattttaaaattctcattaaagtcagcttgggtttaagaagtt

SEQ ID NO: 127824 - DNA, 1722 bp, Homo sapiens
  Payload ID: 5023
  Gene Symbol: DOK1
  Gene Name: docking protein 1, 62kDa (downstream of tyrosine kinase 1)
  Uniprot ID: Q99704
  ENST ID: ENST00000340004
  CDS Start-End: 25-558
gcgcggaaggaaccgccgggggccatggacggagcagtgatggaagggccgctttttttgcagagtcagcgctttgggaccaagaggtggaggaagacctgggccgtgctctacccggccagtccccacggcgtagcgcggctcgagttctttgaccataaggggtcgagctctgggggtggccgagggagctcgcgccgcctggactgcaaagtgatccgtctggctgagtgtgtgagtgtggcccccgtcaccgtggagaccccccctgagcccggcgccactgccttccgcctggacactgctcagcgctcgcacctgctggcggccgacgcgccgtccagtgcagcctgggtgcagacgctgtgccgaaacgcctttccgaaaggcagctggactctggcgcctaccgataacccacctaagctttctgccctggagatgctggagaactccttgtacagccctacctgggaaggtcatgttctctttcgaggccggccgccgctgcccctcaggccctggaaccttcaccttccagacggcacagggaaatgacatcttccaggcagttgagactgccatccaccggcagaaggcccagggaaaggccggacaggggcacgatgttctcagagctgactcccatgaaggggaggtggcagaggggaagttgccttccccacctggcccccaagagctcctcgacagtcccccagccctgtatgctgagcccttagactccctgcgcattgctccatgcccttcccaggactccctatactcagaccccttggacagcacgtctgctcaggcaggagagggagtacaacggaagaaacctctctattgggacttgtatgagcatgcgcagcagcagttgctgaaggccaagctgacagaccccaaagaggatcccatctatgatgaacctgagggcctggccccagtccctccccagggcctttatgatctgcctcgggagcccaaggatgcatggtggtgccaagctcgggtgaaggaggagggctatgagctcccctacaaccctgccactgatgactacgctgtgccaccccctcggagcacaaagcccctccttgctcccaagccccagggcccagccttccctgaacctggtactgcaactggcagtggcatcaaaagccacaactcagccctgtacagccaggtccagaagagcggggcctcagggagctgggactgtgggctctctagagtagggactgacaagactggggtcaagtcagagggctctacctgagaaggacggcaaggctgaggtggctaagggggaccatggggaggtggcactagggatcaaagaagatggttagaaccagcagaagccagagggtgggaggggccatgctgtgtgagaccaggggaccagagggatgggagagtcaagggaaggacaatcccaggaagtcctaagaagtggggcagatggcagggctgaggatgggctctgcatcccccaaagccatcccttccctacttccccaaatgaagggacggctgtgggaccaggtctgtggaaagtggtgcatggtcagaatgggtgcagtttgaggggcctgtgtggaggcctcagggagatgttggactgtgcctggatccttactcctgcattgttctttgccagagacctatttaaaaattttaaaattctcattaaagtcagcttgggtttaagaa

SEQ ID NO: 127825 - DNA, 1955 bp, Homo sapiens
  Payload ID: 5023
  Gene Symbol: DOK1
  Gene Name: docking protein 1, 62kDa (downstream of tyrosine kinase 1)
  Uniprot ID: Q99704
  ENST ID: ENST00000409429
  CDS Start-End: 505-1533
cgctggccggcagcgccagcgctggaatcgcccccgcgcctgggagtggcctcgcgaggccggcgcgcgccccggggccgaggaatccgcctgcccgcccaggcgtcggccacgagagagcgggagcctcgctggtccccatttcagaggtggaggaagacctgggccgtgctctacccggccagtccccacggcgtagcgcggctcgagttctttgaccataaggggtcgagctctgggggtggccgagggagctcgcgccgcctggactgcaaagtgatccgtctggctgagtgtgtgagtgtggcccccgtcaccgtggagaccccccctgagcccggcgccactgccttccgcctggacactgctcagcgctcgcacctgctggcggccgacgcgccgtccagtgcagcctgggtgcagacgctgtgccgaaacgcctttccgaaaggcagctggactctggcgcctaccgataacccacctaagctttctgccctggagatgctggagaactccttgtacagccctacctgggaaggatcccaattctgggtaacggtgcagaggactgaggccgccgagcgctgtggcctgcatggctcctacgtgctgagggtggaggctgaaaggctgactctcctgaccgtgggggcccagagtcagatactggagccactcctgtcctggccctacactctgttgcgtcgctatggccgggacaaggtcatgttctctttcgaggccggccgccgctgcccctcaggccctggaaccttcaccttccagacggcacagggaaatgacatcttccaggcagttgagactgccatccaccggcagaaggcccagggaaaggccggacaggggcacgatgttctcagagctgactcccatgaaggggaggtggcagaggggaagttgccttccccacctggcccccaagagctcctcgacagtcccccagccctgtatgctgagcccttagactccctgcgcattgctccatgcccttcccaggactccctatactcagaccccttggacagcacgtctgctcaggcaggagagggagtacaacggaagaaacctctctattgggacttgtatgagcatgcgcagcagcagttgctgaaggccaagctgacagaccccaaagaggatcccatctatgatgaacctgagggcctggccccagtccctccccagggcctttatgatctgcctcgggagcccaaggatgcatggtggtgccaagctcgggtgaaggaggagggctatgagctcccctacaaccctgccactgatgactacgctgtgccaccccctcggagcacaaagcccctccttgctcccaagccccagggcccagccttccctgaacctggtactgcaactggcagtggcatcaaaagccacaactcagccctgtacagccaggtccagaagagcggggcctcagggagctgggactgtgggctctctagagtagggactgacaagactggggtcaagtcagagggctctacctgagaaggacggcaaggctgaggtggctaagggggaccatggggaggtggcactagggatcaaagaagatggttagaaccagcagaagccagagggtgggaggggccatgctgtgtgagaccaggggaccagagggatgggagagtcaagggaaggacaatcccaggaagtcctaagaagtggggcagatggcagggctgaggatgggctctgcatcccccaaagccatcccttccctacttccccaaatgaagggacggctgtgggaccaggtctgtggaaagtggtgcatggtcagaatgggtgcagtttgaggggcctgtgtggaggcctcagggagatgttggactgtgcctggatccttactcctgcattgttctttgccagagacctatttaaaaattttaaaattctcattaaagtca

SEQ ID NO: 127826 - DNA, 747 bp, Homo sapiens
  Payload ID: 5023
  Gene Symbol: DOK1
  Gene Name: docking protein 1, 62kDa (downstream of tyrosine kinase 1)
  ENST ID: ENST00000429631
  CDS Start-End: 1-266
cgcggctcgagttctttgaccataaggggtcgagctctgggggtggccgagggagctcgcgccgcctggactgcaaagtgatccgtctggctgagtgtgtgagtgtggcccccgtcaccgtggagaccccccctgagcccggcgccactgccttccgcctggacactgctcagcgctcgcacctgctggcggccgacgcgccgtccagtgcagcctgggtgcagacgctgtgccgaaacgcctttccggatcccaattctgggtaacggtgcagaggactgaggccgccgagcgctgtggcctgcatggctcctacgtgctgagggtggaggctgaaaggctgactctcctgaccgtgggggcccagagtcagatactggagccactcctgtcctggccctacactctgttgcgtcgctatggccgggacaaggtcatgttctctttcgaggccggccgccgctgcccctcaggccctggaaccttcaccttccagacggcacagggaaatgacatcttccaggcagttgagactgccatccaccggcagaaggcccagggaaaggccggacaggggcacgatgttctcagagctgactcccatgaaggggaggtggcagaggggaagttgccttccccacctggcccccaagagctcctcgacagtcccccagccctgtatgctgagcccttagactccctgcgcattgctccatgcccttcccaggactccctatactcagaccc

SEQ ID NO: 127827 - DNA, 1936 bp, Homo sapiens
  Payload ID: 5024
  Gene Symbol: DOK2
  Gene Name: docking protein 2, 56kDa
  Uniprot ID: O60496
  ENST ID: ENST00000276420
  CDS Start-End: 260-1498
ctaactcactggaaatgcaggaagcttgagtataaaactcactcagaaaaaaaaaaaaaaaagaaaaaaaagaacacacactcagaagaaaccgcagggcctatcagcctgtcgtcatcgagcagactagaatagtatagaaaaccctaggcagagaggaaatgaacttcagagaagggaaacacacggctaagaagagagaggcaagggcaggagtgaaggagagagctgaagcctggggctccgagatggtcagaggatgggagacggggcagtgaaacaaggcttcttgtatcttcagcagcagcagacgtttggaaagaaatggcgccgcttcggcgcctcactgtatggagggtcggactgcgccttggcccggctggagctgcaggagggcccggagaagcctcgtcggtgtgaggctgcccggaaggtcatccgcctcagtgactgcctgcgggtggccgaggccggcggagaggccagcagcccccgggacaccagtgccttcttcctggagaccaaggagcgcctgtacctcctggcggcccctgcagcggagcgcggcgactgggtgcaggccatctgcctcctggccttccccgggcagaggaaggagctctcggggccagagggaaagcagagccggccctgcatggaggaaaatgaattgtacagcagcgcagtcacagtcggcccccacaaggaatttgctgtgaccatgagacctacagaagccagtgagaggtgccacctgcgggggtcctataccctccgggctggggagagtgccctggagctgtggggtgggcccgagccagggacccagctgtacgactggccctacaggtttctgcggcgctttgggcgggacaaggtaaccttttcctttgaggcaggccgtcgctgcgtctctggagagggcaactttgagttcgaaacccggcaaggcaatgagatcttcttggccctggaagaggccatctctgcccagaagaatgctgcacccgctacaccccaaccgcagccagccacaatccccgcgtcgctgccccggcctgatagcccctactctcggccgcatgactcactgccgccgccttcacccaccacaccggtgcctgctccacggcctcggggccaggagggggagtatgccgtgcccttcgatgcggtggcccgttccttggggaagaacttcaggggcatcttggcagtccctcctcagctcctggccgaccctctgtacgacagcattgaggagaccctgccccctcgacctgaccacatatacgatgagcccgagggagtggctgccctgtccctctatgacagcccgcaggagccccggggtgaggcatggaggaggcaggcgacagctgacagggaccctgctggcctccagcatgtccagccagccgggcaggatttctctgcttctggctggcagccaggaactgagtatgacaatgttgtactaaagaaaggcccaaagtgacagaggcagcagagggatggtccaccgccccttggcttctgctggtgactcctcctggccactgcatcagaagaacctcctctgccccttctggagcccgaggcctggcctgtcttcgttggggctgataaattgcctctcccagggcctgctgggtgagtcaccatcccaaagcaggaagggtgccctggagagaaccaccctcctcctactctttttccacttcctcctctttctttccccagctgaggaggaacctggggcatttagggcagaggacaaaaggatgtcagcaattgcttgggctgcttggctatgcaagcctcctgcctgctgatggccacttcagggacagcctgggcccaggcacccagggggatggcggcagcttcctgcacctttcagatttcttggtggcattaaagcattttcagaaca

SEQ ID NO: 127828 - DNA, 774 bp, Homo sapiens
  Payload ID: 5024
  Gene Symbol: DOK2
  Gene Name: docking protein 2, 56kDa
  ENST ID: ENST00000523932
  CDS Start-End: 76-774
cacggctaagaagagagaggcaagggcaggagtgaaggagagagctgaagcctggggctccgagatggtcagaggatgggagacggggcagtgaaacaaggcttcttgtatcttcagcagcagcagacgtttggaaagaaatggcgccgcttcggcgcctcactgtatggagggtcggactgcgccttggcccggctggagctgcaggagggcccggagaagcctcgtcggtgtgaggctgcccggaaggtcatccgcctcagtgactgcctgcgggtggccgaggccggcggagaggccagcagcccccgggacaccagtgccttcttcctggagaccaaggagcgcctgtacctcctggcggcccctgcagcggagcgcggcgactgggtgcaggccatctgcctcctggccttccccgggcagaggaaggagctctcggggccagagggaaagcagagccggccctgcatggaggaaaatgaattgtacagcagcgcagtcacagtcggcccccacaaggaatttgctgtgaccatgagacctacagaagccagtgagaggtgccacctgcgggggtcctataccctccgggctggggagagtgccctggagctgtggggtgggcccgagccagggacccagctgtacgactggccctacaggtttctgcggcgctttgggcgggacaaggccgtcgctgcgtctctggagagggcaactttgagttcgaaacccggcaaggcaatgagatcttcttggccctggaagagg

SEQ ID NO: 127829 - DNA, 936 bp, Homo sapiens
  Payload ID: 5024
  Gene Symbol: DOK2
  Gene Name: docking protein 2, 56kDa
  ENST ID: ENST00000517422
  CDS Start-End: 90-461
agagaagggaaacacacggctaagaagagagaggcaagggcaggagtgaaggagagagctgaagcctggggctccgagatggtcagaggatgggagacggggcagtgaaacaaggcttcttgtatcttcagcagcagcagacgtttggaaagaaatggcgccgcttcggcgcctcactgtatggagggtcggactgcgccttggcccggctggagctgcaggagggcccggagaagcctcgtcggtgtgaggctgcccggaaggtcatccgcctcagtgactgcctgcgggtggccgaggccggcggagaggccagcagcccccgggacaccagtgccttcttcctggagaccaaggagcgcctgtacctcctggcggcccctgcagcggagcgcggcgactgggtgcaggccatctgcctcctggccttcccctcggcccccacaaggaatttgctgtgaccatgagacctacagaagccagtgagaggtgccacctgcgggggtcctataccctccgggctggggagagtgccctggagctgtggggtgggcccgagccagggacccagctgtacgactggccctacaggtttctgcggcgctttgggcgggacaaggtaaccttttcctttgaggcaggccgtcgctgcgtctctggagagggcaactttgagttcgaaacccggcaaggcaatgagatcttcttggccctggaagaggccatctctgcccagaagaatgctgcacccgctacaccccaaccgcagccagccacaatccccgcgtcgctgccccggcctgatagcccctactctcggccgcatgactcactgccgccgccttcacccaccacaccggtgcctgctccacggcctcggggccaggagggggagtatgccgtgcccttcgatgcggtggcccgttccttggggaa

SEQ ID NO: 127830 - DNA, 607 bp, Homo sapiens
  Payload ID: 5024
  Gene Symbol: DOK2
  Gene Name: docking protein 2, 56kDa
  ENST ID: ENST00000518197
  CDS Start-End: 155-607
agagaggcaagggcaggagtgaaggagagagctgaagcctggggctccgagatggtcagaggatgggagacggggcagtgaaacaaggcttcttgtatcttcagcagcagcagacgtttggaaagtcggcccccacaaggaatttgctgtgaccatgagacctacagaagccagtgagaggtgccacctgcgggggtcctataccctccgggctggggagagtgccctggagctgtggggtgggcccgagccagggacccagctgtacgactggccctacaggtttctgcggcgctttgggcgggacaaggtaaccttttcctttgaggcaggccgtcgctgcgtctctggagagggcaactttgagttcgaaacccggcaaggcaatgagatcttcttggccctggaagaggccatctctgcccagaagaatgctgcacccgctacaccccaaccgcagccagccacaatccccgcgtcgctgccccggcctgatagcccctactctcggccgcatgactcactgccgccgccttcacccaccacaccggtgcctgctccacggcctcggggccaggagggggagtatgccgtgcccttcgatgcg

SEQ ID NO: 127831 - DNA, 2292 bp, Homo sapiens
  Payload ID: 5025
  Gene Symbol: DOK3
  Gene Name: docking protein 3
  Uniprot ID: Q7L591
  ENST ID: ENST00000312943
  CDS Start-End: 162-1154
cccatgtggactggatgcccagcgtgagtgtataccgtgagggcctttgagctctcggacagcgtggagtggtcaagggaggcctccaggaggaagaggtggccaaccgccccaggcagcacagtggtcttgaagcggcggccctgctcctggccgtgaccatggaccctctggagacccctatcaaggatggcatcctctaccagcagcatgtcaagtttggcaagaagtgctggcggaaggtgtgggctctgctgtatgcaggaggcccatcaggcgtggcacggctggagagctgggaggtccgggatggtggcctgggagcagcgggtgacaggtcggcagggcctggccggcgaggggagcgacgggtcatccgcctggctgactgtgtgtccgtgctgccggctgacggcgagagctgcccccgggacaccggtgccttcctgctcaccaccaccgagcgaagccatctactggctgctcagcaccgccaggcctggatgggccccatctgccagctggccttcccggggacaggggaggcctcctcaggatccacagatgcccagtctcccaagaggggcctggtccccatggaggaaaactccatctactcctcctggcaggaagtgggcgagtttcccgtggtggtgcagaggactgaggccgccacccgctgccagctgaaggggccggccctgctggtgctgggcccagacgccatccagctgagggaggccaagggcacccaggccctctacagctggccctaccacttcctgcgcaagttcggctccgacaagatacttctgggaaccccaggcgtcagtctcctcatctgtaaaggagagagaaccgatgacgtatcaggcataatccttgatgagagtttgctgcgtgcctactcagtgccaggcgctgggggacacagccgtgttcaggacagccttggtcctgttctccgggagccgacattccagggggagagaagtttcctgaagacttccatgctgcgttccctcctctgctcctgctcctggcgccatcctaggagccagccacgcacgcaagcgtcatgcctccagggctctgactgcccagcccctcaccgcaactccacctcagctgcacacacccttggcacatcctgaacctcattttcatgacggacacacaatttttgctctctcctgtccaagcctcatcctctggccgccacctccttccagctcacttcctttagtgcggccagtaccgcccctgcctaggcatgtcgacctgcagggacccttttctggctcttcgaggcctctgcccaccatcccctctttgttctccatagtcccttccccctgttctctctcgtttcatcttactggtctggcaaagtccccggccttgggcgagcccagacctcctcagtgcctgcacacagctgcccacagccagagaaatccatttaagcagactgcctgcatccttcttaacagtgcaaggcaggcactccctgccacaagagaccctgttccctagtagggcagcttttctcctccccagaacctcctgtctatccccacccaatgtctcctcacaggcatattggggaaacaggtcgggctctcccaccgtatctgcaagtgtactggcatccatctgtcttcttcctacccctacagtagaaacagtgtctgtccccagctgtgctctgatcccggctcctttcacctcagagcttggaaaattgagctgtccccactctctcctgcgcccattcatcctaccagcagcttttccagccacacgcaaacatgctctgtaatttcacattttaaaccttcccttgacctcacattcctcttcggccacctctgtttctctgttcctcttcacagcaaaaactgttcaaaagagttgttgattactttcatttccactttctcacccccattctcccctcaattaactctccttcatccccatgatgccattatgtggcttttattagagtcaccaaccttattctccaaaacaaaagcaacaaggactttgacttctcagcagcactcggctctggttcttgaaacacccccgttacttgctattcctcctacctcataacaatctccttcccagcctctactgctgccttctctgagttcttcccagggtcctaggctcagatgtagtgtagctcaaccctgctacacaaagaatctcctgaaagcctgtaaaaatgtccatgcatgttctgtgagtgatctaccaagaaaataaaaaattttaaaaatc

SEQ ID NO: 127832 - DNA, 1729 bp, Homo sapiens
  Payload ID: 5025
  Gene Symbol: DOK3
  Gene Name: docking protein 3
  Uniprot ID: Q7L591
  ENST ID: ENST00000357198
  CDS Start-End: 6-1496
aactcatgactcggggagccagactgcgatcagacgcgcgtgcccagctgaaccagctgtctctagacggagggacgggaagtggccagaaggggaagtgtgaggagttcccgtccagcctgtcatcagtctccccaggtcttgaagcggcggccctgctcctggccgtgaccatggaccctctggagacccctatcaaggatggcatcctctaccagcagcatgtcaagtttggcaagaagtgctggcggaaggtgtgggctctgctgtatgcaggaggcccatcaggcgtggcacggctggagagctgggaggtccgggatggtggcctgggagcagcgggtgacaggtcggcagggcctggccggcgaggggagcgacgggtcatccgcctggctgactgtgtgtccgtgctgccggctgacggcgagagctgcccccgggacaccggtgccttcctgctcaccaccaccgagcgaagccatctactggctgctcagcaccgccaggcctggatgggccccatctgccagctggccttcccggggacaggggaggcctcctcaggatccacagatgcccagtctcccaagaggggcctggtccccatggaggaaaactccatctactcctcctggcaggaagtgggcgagtttcccgtggtggtgcagaggactgaggccgccacccgctgccagctgaaggggccggccctgctggtgctgggcccagacgccatccagctgagggaggccaagggcacccaggccctctacagctggccctaccacttcctgcgcaagttcggctccgacaagggcgtgttctcctttgaggccggccgtcgctgccactcgggtgagggcctctttgccttcagcaccccctgtgcccctgacctgtgcagggctgtggccggggccatcgcccgccagcgggagcggctgccagagctgaccaggccccagccctgccccctgccacgggccacctctctgccctccctggacacccccggagagcttcgggagatgccaccaggacctgagccacccacgtccaggaaaatgcacctggccgagcccggaccccagagcctgccgctactgctaggcccggagcccaacgatctggcgtccgggctctacgcttcagtgtgcaagcgtgccagtgggcccccaggcaatgagcacctctatgagaacctgtgtgtgctggaggccagccccacgctgcacggtggggaacctgagccgcacgagggccccggcagccgcagccccacaaccagtcccatctaccacaacggccaggacttgagctggcccggcccggccaacgacagtaccctggaggcccagtaccggcggctgctggagctggatcaggtggagggcacaggccgccctgaccctcaggcaggtttcaaggccaagctggtgaccctgctgagtcgtgagcggaggaagggcccagccccttgtgaccggccctgaacgcccagcagagtggtggccagaggggagaggtgctccccctgggacaggagggtgggctggtgggcaaacattgggcccatgcagacacacgcctgtgtccaccctggcctgcaggaacaaggcaggccgcctgtggaggacctcagccctgccctgccctcctcatgaatagtgtgcagactcacagataataaagctcagagcagctcccggcaggggcactcacggca

SEQ ID NO: 127833 - DNA, 1884 bp, Homo sapiens
  Payload ID: 5025
  Gene Symbol: DOK3
  Gene Name: docking protein 3
  Uniprot ID: Q7L591
  ENST ID: ENST00000377112
  CDS Start-End: 241-927
atgtggactggatgcccagcgtgagtgtataccgtgagggcctttgagctctcggacagcgtggagtggtcaagggaggcctccaggaggaagaggtggccaaccgccccaggcagcacagtgctgtctctagacggagggacgggaagtggccagaaggggaagtgtgaggagttcccgtccagcctgtcatcagtctccccaggtcttgaagcggcggccctgctcctggccgtgaccatggaccctctggagacccctatcaaggatggcatcctctaccagcagcatgtcaagtttggcaaggggacaggggaggcctcctcaggatccacagatgcccagtctcccaagaggggcctggtccccatggaggaaaactccatctactcctcctggcaggaagtgggcgagtttcccgtggtggtgcagaggactgaggccgccacccgctgccagctgaaggggccggccctgctggtgctgggcccagacgccatccagctgagggaggccaagggcacccaggccctctacagctggccctaccacttcctgcgcaagttcggctccgacaagatacttctgggaaccccaggcgtcagtctcctcatctgtaaaggagagagaaccgatgacgtatcaggcataatccttgatgagagtttgctgcgtgcctactcagtgccaggcgctgggggacacagccgtgttcaggacagccttggtcctgttctccgggagccgacattccagggggagagaagtttcctgaagacttccatgctgcgttccctcctctgctcctgctcctggcgccatcctaggagccagccacgcacgcaagcgtcatgcctccagggctctgactgcccagcccctcaccgcaactccacctcagctgcacacacccttggcacatcctgaacctcattttcatgacggacacacaatttttgctctctcctgtccaagcctcatcctctggccgccacctccttccagctcacttcctttagtgcggccagtaccgcccctgcctaggcatgtcgacctgcagggacccttttctggctcttcgaggcctctgcccaccatcccctctttgttctccatagtcccttccccctgttctctctcgtttcatcttactggtctggcaaagtccccggccttgggcgagcccagacctcctcagtgcctgcacacagctgcccacagccagagaaatccatttaagcagactgcctgcatccttcttaacagtgcaaggcaggcactccctgccacaagagaccctgttccctagtagggcagcttttctcctccccagaacctcctgtctatccccacccaatgtctcctcacaggcatattggggaaacaggtcgggctctcccaccgtatctgcaagtgtactggcatccatctgtcttcttcctacccctacagtagaaacagtgtctgtccccagctgtgctctgatcccggctcctttcacctcagagcttggaaaattgagctgtccccactctctcctgcgcccattcatcctaccagcagcttttccagccacacgcaaacatgctctgtaatttcacattttaaaccttcccttgacctcacattcctcttcggccacctctgtttctctgttcctcttcacagcaaaaactgttcaaaagagttgttgattactttcatttccactttctcacccccattctcccctcaattaactctccttcatccccatgatgccattatgtggcttttattagagtcaccaaccttattctccaaaacaaaagcaacaaggactttgacttctcagcagcactcggctctggttcttgaaacacccccgttacttgctattcctcc

SEQ ID NO: 127834 - DNA, 1872 bp, Homo sapiens
  Payload ID: 5025
  Gene Symbol: DOK3
  Gene Name: docking protein 3
  ENST ID: ENST00000501403
  CDS Start-End: 351-1673
atgtggactggatgcccagcgtgagtgtataccgtgagggcctttgagctctcggacagcgtggagtggtcaagggaggcctccaggaggaagaggtggccaaccgccccaggcagcacagtggtgagggggccctggaggggctggcctgggggagatgcaggccagaacacacaggtccctgagtgttgggctgaggagcctgggctgcaccccaggaaggggagagacagctgtctctagacggagggacgggaagtggccagaaggggaagtgtgaggagttcccgtccagcctgtcatcagtctccccaggtcttgaagcggcggccctgctcctggccgtgaccatggaccctctggagacccctatcaaggatggcatcctctaccagcagcatgtcaagtttggcaagaagtgctggcggaaggtgtgggctctgctgtatgcaggaggcccatcaggcgtggcacggctggagagctgggaggtccgggatggtggcctgggagcagcgggtgacaggtcggcagggcctggccggcgaggggagcgacgggtcatccgcctggctgactgtgtgtccgtgctgccggctgacggcgagagctgcccccgggacaccggtgccttcctgctcaccaccaccgagcgaagccatctactggctgctcagcaccgccaggcctggatgggccccatctgccagctggccttcccggggacaggggaggcctcctcaggatccacagatgcccagtctcccaagaggggcctggtccccatggaggaaaactccatctactcctcctggcaggaagtgggcgagtttcccgtggtggtgcagaggactgaggccgccacccgctgccagctgaaggggccggccctgctggtgctgggcccagacgccatccagctgagggaggccaagggcacccaggccctctacagctggccctaccacttcctgcgcaagttcggctccgacaagggcgtgttctcctttgaggccggccgtcgctgccactcgggtgagggcctctttgccttcagcaccccctgtgcccctgacctgtgcagggctgtggccggggccatcgcccgccagcgggagcggctgccagagctgaccaggccccagccctgccccctgccacgggccacctctctgccctccctggacacccccggagagcttcgggagatgccaccaggacctgagccacccacgtccaggaaaatgcacctggccgagcccggaccccagagcctgccgctactgctaggcccggagcccaacgatctggcgtccgggctctacgcttcagtgtgcaagcgtgccagtgggcccccaggcaatgagcacctctatgagaacctgtgtgtgctggaggccagccccacgctgcacggtggggaacctgagccgcacgagggccccggcagccgcagccccacaaccagtcccatctaccacaacggccaggacttgagctggcccggcccggccaacgacagtaccctggaggcccagtaccggcggctgctggagctggatcaggtggagggcacaggccgccctgaccctcaggcaggtttcaaggccaagctggtgaccctgctgagtcgtgagcggaggaagggcccagccccttgtgaccggccctgaacgcccagcagagtggtggccagaggggagaggtgctccccctgggacaggagggtgggctggtgggcaaacattgggcccatgcagacacacgcctgtgtccaccctggcctgcaggaacaaggcaggccgcctgtggaggacctcagccctgccctgccctcctcatgaatagtgtgcagactcacagataataaag

SEQ ID NO: 127835 - DNA, 721 bp, Homo sapiens
  Payload ID: 5025
  Gene Symbol: DOK3
  Gene Name: docking protein 3
  ENST ID: ENST00000510380
  CDS Start-End: 81-721
cggggagccagactgcgatcagacgcgcgtgcccagctgaaccaggtcttgaagcggcggccctgctcctggccgtgaccatggaccctctggagacccctatcaaggatggcatcctctaccagcagcatgtcaagtttggcaagaagtgctggcggaaggtgtgggctctgctgtatgcaggaggcccatcaggcgtggcacggctggagagctgggaggtccgggatggtggcctgggagcagcgggtgacaggtcggcagggcctggccggcgaggggagcgacgggtcatccgcctggctgactgtgtgtccgtgctgccggctgacggcgagagctgcccccgggacaccggtgccttcctgctcaccaccaccgagcgaagccatctactggctgctcagcaccgccaggcctggatgggccccatctgccagctggccttcccggggacaggggaggcctcctcaggatccacagatgcccagtctcccaagaggggcctggtccccatggaggaaaactccatctactcctcctggcaggaagtgggcgagtttcccgtggtggtgcagaggactgaggccgccacccgctgccagctgaaggggccggccctgctggtgctgggcccagacgccatccagctgagggaggccaagggcacccaggccctctacagctggccctaccacttcctgcgcaagttcggctccga

SEQ ID NO: 127836 - DNA, 577 bp, Homo sapiens
  Payload ID: 5025
  Gene Symbol: DOK3
  Gene Name: docking protein 3
  ENST ID: ENST00000506493
  CDS Start-End: 108-577
atcagacgcgcgtgcccagctgaaccaggtgcgtgagaaggctgccttcaggtggccgggggctccctccaggtcttgaagcggcggccctgctcctggccgtgaccatggaccctctggagacccctatcaaggatggcatcctctaccagcagcatgtcaagtttggcaagaagtgctggcggaaggtgtgggctctgctgtatgcaggaggcccatcaggcgtggcacggctggagagctgggaggtccgggatggtggcctgggagcagcgggtgacaggtcggcagggcctggccggcgaggggagcgacgggtcatccgcctggctgactgtgtgtccgtgctgccggctgacggcgagagctgcccccgggacaccggtgccttcctgctcaccaccaccgagcgaagccatctactggctgctcagcaccgccaggcctggatgggccccatctgccagctggccttcccggggacaggggaggcctcctcaggatccacagatgcccagtctcccaagaggggcctggtccccatggaggaaaactccatctactcctcctggcagga

SEQ ID NO: 127837 - DNA, 545 bp, Homo sapiens
  Payload ID: 5025
  Gene Symbol: DOK3
  Gene Name: docking protein 3
  ENST ID: ENST00000502885
  CDS Start-End: 114-545
agacgcgcgtgcccagctgaaccaggtgcgtgagaaggctgccttcaggtggccgggggctccctccagtctccccaggtcttgaagcggcggccctgctcctggccgtgaccatggaccctctggagacccctatcaaggatggcatcctctaccagcagcatgtcaagtttggcaagaagtgctggcggaaggtgtgggctctgctgtatgcaggaggcccatcaggcgtggcacggctggagagctgggaggtccgggatggtggcctgggagcagcgggtgacaggtcggcagggcctggccggcgaggggagcgacgggtcatccgcctggctgactgtgtgtccgtgctgccggctgacggcgagagctgcccccgggacaccggtgccttcctgctcaccaccaccgagcgaagccatctactggctgctcagcaccgccaggcctggatgggccccatctgccagctggccttcccggggacaggggaggcctcctcaggatccacagatgcccagtctcccaagaggggcctggtc

SEQ ID NO: 127838 - DNA, 603 bp, Homo sapiens
  Payload ID: 5025
  Gene Symbol: DOK3
  Gene Name: docking protein 3
  ENST ID: ENST00000509310
  CDS Start-End: 473-603
actcttcctgtcagggctgtgatgtttcagggacttctcctgaagccccttgggaggctgcttcttgcctcaggacccccacccactgcctgcctgtgccagccacctggagggagccctccattccgttgactgaggaggcagcagatgtcatagaactgccatttaggccacaagctctccctaagcctgctctgtgcccagctctgctgagctgtgaggacctagatgggccagggagatggctgcctgggaagccgtcaggcgaggggagagaaagacgcacacgcagaaacgtggacggcagtcacaagaccgctagcagatgaggcaggatctcagcatctggtgagagctgtctctagacggagggacgggaagtggccagaaggggaagtgtgaggagttcccgtccagcctgtcatcagtctccccaggtcttgaagcggcggccctgctcctggccgtgaccatggaccctctggagacccctatcaaggatggcatcctctaccagcagcatgtcaagtttggcaagaagtgctggcggaaggtgtgggctctgctgtatgcaggaggcccatcaggcgtggcacggctgga

SEQ ID NO: 127839 - DNA, 467 bp, Homo sapiens
  Payload ID: 5025
  Gene Symbol: DOK3
  Gene Name: docking protein 3
  ENST ID: ENST00000510898
  CDS Start-End: 213-467
atgactcggggagccagactgcgatcagacgcgcgtgcccagctgaaccaggtgcgtgagaaggctgccttcaggtggccgggggctccctccagctgtctctagacggagggacgggaagtggccagaaggggaagtgtgaggagttcccgtccagcctgtcatcagtctccccaggtcttgaagcggcggccctgctcctggccgtgaccatggaccctctggagacccctatcaaggatggcatcctctaccagcagcatgtcaagtttggcaagaagtgctggcggaaggtgtgggctctgctgtatgcaggaggcccatcaggcgtggcacggctggagagctgggaggtccgggatggtggcctgggagcagcgggtgacaggtcggcagggcctggccggcgaggggagcgacgggtcatccgcctggctgactgtgtgtccgtgctgccggctgacggc

SEQ ID NO: 127840 - DNA, 543 bp, Homo sapiens
  Payload ID: 5025
  Gene Symbol: DOK3
  Gene Name: docking protein 3
  ENST ID: ENST00000510389
  CDS Start-End: 505-543
ctgtcagggctgtgatgtttcagggacttctcctgaagccccttgggaggctgcttcttgcctcaggacccccacccactgcctgcctgtgccagccacctggagggagccctccattccgttgactgaggaggcagcagatgtcatagaactgccatttaggccacaagctctccctaagcctgctctgtgcccagctctgctgagctgtgaggacctagatgggccagggagatggctgcctgggaagccgtcaggcgaggggagagaaagacgcacacgcagaaacgtggacggcagtcacaagaccgctagcagatgaggcaggatctcagcatctggtgagagaggtggtgctgaatgacctgaggctgttccagaataaagctgtctctagacggagggacgggaagtggccagaaggggaagtgtgaggagttcccgtccagcctgtcatcagtctccccaggtcttgaagcggcggccctgctcctggccgtgaccatggaccctctggagacccctatcaaggatggcatcctc

SEQ ID NO: 127841 - DNA, 2772 bp, Homo sapiens
  Payload ID: 5026
  Gene Symbol: DOK4
  Gene Name: docking protein 4
  Uniprot ID: Q8TEW6
  ENST ID: ENST00000340099
  CDS Start-End: 373-1353
gcggagtcccagccggagccccagccggagcccgatccctagccctgcggccgcgcctccctcgccgtccccgcctggagcccggcgccgccgccgccctgccgcccccgccagccgcgccgtgacgcgggcatgagcctgctccgcggcgccgctgagcaggcgctcctggcccgggcctcggcgcccagcaggcgcggggcgaaggagctgctagaacaatgctgaggcgggtgaggtgaggagcagcccctcgcggcagccccgacagagtgtctggaacaggtgattggaggagccggagacccaggcacctgggcatccttcccctcgcctctgccaggccccgcgcccctaaaaggtgggaaaaccatggcgaccaatttcagtgacatcgtcaagcaaggctacgtgaagatgaagagcaggaagctcgggatctaccggaggtgctggctggtgttccggaaatcctccagcaaggggccccagcggctggagaagtatccagatgagaagtcggtgtgcctccggggctgccccaaggtgactgagatcagcaacgtcaagtgtgttacgcggctccccaaggagaccaagcggcaggcggtggccatcatattcactgatgactcggcacgtaccttcacctgcgactcagagctagaggcagaggagtggtacaagacactatctgtggagtgtctggggtcccgcctcaacgacatcagtctgggagaacctgacctcctggccccaggggtgcagtgtgaacagacagatcgcttcaatgtcttcctgctgccctgccccaacctggacgtgtatggcgagtgcaagctgcagatcacccacgagaacatctacctctgggacatccacaacccccgtgtgaagctcgtctcgtggcccctctgctcactgcgccgctatggccgggatgccacacgctttaccttcgaggctggccggatgtgtgatgctggggaaggactctataccttccagacacaagagggggagcagatttaccagcgcgtccacagtgccaccctggccatcgcagagcagcacaagcgggtcctgctggaaatggagaagaacgtgaggctgctgaacaagggcacggaacattactcgtatccctgcacacccacgaccatgctgccgcgcagtgcctactggcaccacatcactggttcccagaacatcgccgaagcctccagctatgctggtgaggggtatggggcagcccaggccagctcggaaacagacctcctcaacagattcatcctgctaaagccaaagcccagccagggggacagcagtgaggccaagaccccatcccagtgaccacagtgctggcgagcaccgatgactgctgggggctgcctgctgcggggctggctgcagtgtaccgtggacagcctcagggggctgtcggccaagagcctggagaaagggagcaagctgccccctccttgcccccaaggatgaggctggactgaggcaaagggctggccacaccacctgagcatgtgtgaggggttggagctaccgtgggactatatactgttaatgattttaatatatatggcttatgacatactctgtatcaatgagatcccctcaccctcaccccatccttccccaccaatacacacaaattttttaatcccatgaccaggccacggtcaaggctgtttttgagtatgagtgcagtcgtgtccatcctccatggcacagccctcctgctgccaggacctgcttgaactaccagggccacaggagggggataatcagagcttgaggctggcactctgactgctggcttttcccagacagcccaagggccggaacagcaggtggcttctcagttcctctgggcctggagtgacacaggaaggatctgcacttcctctgtgctgcttgccagccttgcagttggagttttaagcagaggtgacatctggttgacgcctcaggtgaaaatctggttttaaaatgtaacttctgcacaggctccttcctgctttgtaggctgggaagatgcccctggggtaggggtgctgattacctcagccatgtggaggaaggctggagcttgttcctgccccaggaataggccaggagggaaggccgcagcaggactgccgtggggagcacccctgctgcccccctctcactgaccaggggtggacaatgcccaagcagagggagcccccttgccctgtttggccaccctctggccagccaaaagcactctgaaaccaagaccttcccatttcctcctccccacatggtgctgaggctccctgctgcaatgcaattaaagcaattgattttctagtgctggtatttgttgactaccatgcagaagggctatctttctattcacgtcaaacttttggttgtgtggggttttttgttgttttttgggttttgttttttaatactttagggtcctgatttgtgggaacagaccttcttgtaaataaccactatttgagttgtggcaggaggatgataaagcacgcggcccctcccaaaggagcccttgagctagggaggtggtgcagtcagcctcgctctcaacgtgacccggggaatgaccacccagagggatgagctagcctgtagaggggaactggggtccaaaggtctttggggagggaggcagagctggctggctcagctaagtggcacgatgacgcatgaaggagattatgttgtgctctttattgccaaaaataaacacttttaaaaagacaa

SEQ ID NO: 127842 - DNA, 751 bp, Homo sapiens
  Payload ID: 5026
  Gene Symbol: DOK4
  Gene Name: docking protein 4
  ENST ID: ENST00000566705
  CDS Start-End: 516-751
agacgacactgagatggtgtccaggtagggctgttcctgcagccctgataagatccgatctgtcaggggtggggaggcccagccaggcaggcagccgctcgctcagtcattggttgccagcctcagcgcgtttgttctggagccaaagcctccaggcagaatccatgtgcgagagggagtgctcagcatggctgccctgtggggcaggtgggcagtgagggccctgggagtctccctactccccgccaccccaggacaccagcccttcctggggagaggagcattttggagctggctctccctgcgcggaaacctgtggtggcctggcaccaggcaggcgcggggcgaaggagctgctagaacaatgctgaggcgggtgaggtgaggagcagcccctcgcggcagccccgacagagtgtctggaacaggtgattggaggagccggagacccaggcacctgggcatccttcccctcgcctctgccaggccccgcgcccctaaaaggtgggaaaaccatggcgaccaatttcagtgacatcgtcaagcaaggctacgtgaagatgaagagcaggaagctcgggatctaccggaggtgctggctggtgttccggaaatcctccagcaaggggccccagcggctggagaagtatccagatgagaagtcggtgtgcctccggggctgccccaaggtgactgagatcagcaacgtcaagtgtgttacgcggctccccaaggagaccaagcggcaggc

SEQ ID NO: 127843 - DNA, 1848 bp, Homo sapiens
  Payload ID: 5026
  Gene Symbol: DOK4
  Gene Name: docking protein 4
  Uniprot ID: Q8TEW6
  ENST ID: ENST00000569548
  CDS Start-End: 368-1348
ggttttcctgaatggttctgtcgtcctggggtggggagggaagggaaggaagaagggcgggaggaaggagggagggaagagggagagaggaggagtgtgggaagaggaaggaaaaaagagagcgagacagcgagaggaagagaaagatgtcactgtctctaatctccctgtcatttttatttccagcaggcgcggggcgaaggagctgctagaacaatgctgaggcgggtgaggtgaggagcagcccctcgcggcagccccgacagagtgtctggaacaggtgattggaggagccggagacccaggcacctgggcatccttcccctcgcctctgccaggccccgcgcccctaaaaggtgggaaaaccatggcgaccaatttcagtgacatcgtcaagcaaggctacgtgaagatgaagagcaggaagctcgggatctaccggaggtgctggctggtgttccggaaatcctccagcaaggggccccagcggctggagaagtatccagatgagaagtcggtgtgcctccggggctgccccaaggtgactgagatcagcaacgtcaagtgtgttacgcggctccccaaggagaccaagcggcaggcggtggccatcatattcactgatgactcggcacgtaccttcacctgcgactcagagctagaggcagaggagtggtacaagacactatctgtggagtgtctggggtcccgcctcaacgacatcagtctgggagaacctgacctcctggccccaggggtgcagtgtgaacagacagatcgcttcaatgtcttcctgctgccctgccccaacctggacgtgtatggcgagtgcaagctgcagatcacccacgagaacatctacctctgggacatccacaacccccgtgtgaagctcgtctcgtggcccctctgctcactgcgccgctatggccgggatgccacacgctttaccttcgaggctggccggatgtgtgatgctggggaaggactctataccttccagacacaagagggggagcagatttaccagcgcgtccacagtgccaccctggccatcgcagagcagcacaagcgggtcctgctggaaatggagaagaacgtgaggctgctgaacaagggcacggaacattactcgtatccctgcacacccacgaccatgctgccgcgcagtgcctactggcaccacatcactggttcccagaacatcgccgaagcctccagctatgctggtgaggggtatggggcagcccaggccagctcggaaacagacctcctcaacagattcatcctgctaaagccaaagcccagccagggggacagcagtgaggccaagaccccatcccagtgaccacagtgctggcgagcaccgatgactgctgggggctgcctgctgcggggctggctgcagtgtaccgtggacagcctcagggggctgtcggccaagagcctggagaaagggagcaagctgccccctccttgcccccaaggatgaggctggactgaggcaaagggctggccacaccacctgagcatgtgtgaggggttggagctaccgtgggactatatactgttaatgattttaatatatatggcttatgacatactctgtatcaatgagatcccctcaccctcaccccatccttccccaccaatacacacaaattttttaatcccatgaccaggccacggtcaaggctgtttttgagtatgagtgcagtcgtgtccatcctccatggcacagccctcctgctgccaggacctgcttgaactaccagggccacaggagggggataatcagagcttgaggctggcactctgactgctggcttttcccagacagcccaaggg

SEQ ID NO: 127844 - DNA, 539 bp, Homo sapiens
  Payload ID: 5026
  Gene Symbol: DOK4
  Gene Name: docking protein 4
  ENST ID: ENST00000567175
  CDS Start-End: 379-539
aatttgcatttctaacaagtttcaaggtgatgggaagcttctggtccagggactacactttgagaagccctggtgtaaaaaggtacagacgtgaaaaccagaggggggacagctcctccccagaggaggcactgggcaacttctcttgtccctgcctggcacagctgaggcctgtgactggggattccgacagatcacaggcgcggggcgaaggagctgctagaacaatgctgaggcgggtgaggtgaggagcagcccctcgcggcagccccgacagagtgtctggaacaggtgattggaggagccggagacccaggcacctgggcatccttcccctcgcctctgccaggccccgcgcccctaaaaggtgggaaaaccatggcgaccaatttcagtgacatcgtcaagcaaggctacgtgaagatgaagagcaggaagctcgggatctaccggaggtgctggctggtgttccggaaatcctccagcaaggggccccagcggctggagaagtatccagatgagaagtcggtgtgcctccg

SEQ ID NO: 127845 - DNA, 2851 bp, Homo sapiens
  Payload ID: 5026
  Gene Symbol: DOK4
  Gene Name: docking protein 4
  ENST ID: ENST00000566936
  CDS Start-End: 299-1396
gggagggaagagggagagaggaggagtgtgggaagaggaaggaaaaaagagagcgagacagcgagaggaagagaaagatgtcactgtctctaatctccctgtcatttttatttccagcaggcgcggggcgaaggagctgctagaacaatgctgaggcgggtgaggtgaggagcagcccctcgcggcagccccgacagagtgtctggaacaggtgattggaggagccggagacccaggcacctgggcatccttcccctcgcctctgccaggccccgcgcccctaaaaggtgggaaaaccatggcgaccaatttcagtgacatcgtcaagcaaggctacgtgaagatgaagagcaggaagctcgggatctaccggaggtgctggctggtgttccggaaatcctccagcaaggggccccagcggctggagaagtatccagatgagaagtcggtgtgcctccggggctgccccaaggtgactgagatcagcaacgtcaagtgtgttacgcggctccccaaggagaccaagcggcaggcggtggccatcatattcactgatgactcggcacgtaccttcacctgcgactcagagctagaggcagaggagtggtacaagacactatctgtggagtgtctggggtcccgcctcaacgacatcagtctgggagaacctgacctcctggccccaggggtgcagtgtgaacagacagatcgcttcaatgtcttcctgctgccctgccccaacctggacgtgtatggcgagtgcaagctgcagatcacccacgagaacatctacctctgggacatccacaacccccgtgtgaagctcgtctcgtggcccctctgctcactgcgccgctatggccgggatgccacacgctttaccttcgaggctggccggatgtgtgatgctggggaaggactctataccttccagacacaagagggggagcagatttaccagcgcgtccacagtgccaccctggccatcgcagagcagcacaagcgggtcctgctggaaatggagaagaacgtgaggctgctgaacaagggcacggaacattactcgtatccctgcacacccacgaccatgctgccgcgcagtgcctactggcaccacatcactggttcccagaacatcgccgaagcctccagctatgctggtgagtcgcttccatgccccacacccacctgccaggaggctttgtggaggatgaggcctattgggcaggggtcttttgacctagctctgagttctgagcctgcttctgtgcccacaggtgaggggtatggggcagcccaggccagctcggaaacagacctcctcaacagattcatcctgctaaagccaaagcccagccagggggacagcagtgaggccaagaccccatcccagtgaccacagtgctggcgagcaccgatgactgctgggggctgcctgctgcggggctggctgcagtgtaccgtggacagcctcagggggctgtcggccaagagcctggagaaagggagcaagctgccccctccttgcccccaaggatgaggctggactgaggcaaagggctggccacaccacctgagcatgtgtgaggggttggagctaccgtgggactatatactgttaatgattttaatatatatggcttatgacatactctgtatcaatgagatcccctcaccctcaccccatccttccccaccaatacacacaaattttttaatcccatgaccaggccacggtcaaggctgtttttgagtatgagtgcagtcgtgtccatcctccatggcacagccctcctgctgccaggacctgcttgaactaccagggccacaggagggggataatcagagcttgaggctggcactctgactgctggcttttcccagacagcccaagggccggaacagcaggtggcttctcagttcctctgggcctggagtgacacaggaaggatctgcacttcctctgtgctgcttgccagccttgcagttggagttttaagcagaggtgacatctggttgacgcctcaggtgaaaatctggttttaaaatgtaacttctgcacaggctccttcctgctttgtaggctgggaagatgcccctggggtaggggtgctgattacctcagccatgtggaggaaggctggagcttgttcctgccccaggaataggccaggagggaaggccgcagcaggactgccgtggggagcacccctgctgcccccctctcactgaccaggggtggacaatgcccaagcagagggagcccccttgccctgtttggccaccctctggccagccaaaagcactctgaaaccaagaccttcccatttcctcctccccacatggtgctgaggctccctgctgcaatgcaattaaagcaattgattttctagtgctggtatttgttgactaccatgcagaagggctatctttctattcacgtcaaacttttggttgtgtggggttttttgttgttttttgggttttgttttttaatactttagggtcctgatttgtgggaacagaccttcttgtaaataaccactatttgagttgtggcaggaggatgataaagcacgcggcccctcccaaaggagcccttgagctagggaggtggtgcagtcagcctcgctctcaacgtgacccggggaatgaccacccagagggatgagctagcctgtagaggggaactggggtccaaaggtctttggggagggaggcagagctggctggctcagctaagtggcacgatgacgcatgaaggagattatgttgtgctctttattgccaaaaataaacacttttaaaaagacaacttctgttaatcaataaatatcctttcctttctgta

SEQ ID NO: 127846 - DNA, 586 bp, Homo sapiens
  Payload ID: 5026
  Gene Symbol: DOK4
  Gene Name: docking protein 4
  ENST ID: ENST00000569250
  CDS Start-End: 221-586
ttttcctcactgccgcctccacctcggttttcctgaatgcaggcgcggggcgaaggagctgctagaacaatgctgaggcgggtgaggtgaggagcagcccctcgcggcagccccgacagagtgtctggaacaggtgattggaggagccggagacccaggcacctgggcatccttcccctcgcctctgccaggccccgcgcccctaaaaggtgggaaaaccatggcgaccaatttcagtgacatcgtcaagcaaggctacgtgaagatgaagagcaggaagctcgggatctaccggaggtgctggctggtgttccggaaatcctccagcaaggggccccagcggctggagaagtatccagatgagaagtcggtgtgcctccggggctgccccaaggtgactgagatcagcaacgtcaagtgtgttacgcggctccccaaggagaccaagcggcaggcggtggccatcatattcactgatgactcggcacgtaccttcacctgcgactcagagctagaggcagaggagtggtacaagacactatctgtggagtgtctggggtcccgcctcaacgacatcagtctggga

SEQ ID NO: 127847 - DNA, 558 bp, Homo sapiens
  Payload ID: 5026
  Gene Symbol: DOK4
  Gene Name: docking protein 4
  ENST ID: ENST00000569538
  CDS Start-End: 259-558
gcatttctaacaagtttcaaggtgatgggaagcttctggtccagggactacactttgagaagccctggtgtaaaaagcaggcgcggggcgaaggagctgctagaacaatgctgaggcgggtgaggtgaggagcagcccctcgcggcagccccgacagagtgtctggaacaggtgattggaggagccggagacccaggcacctgggcatccttcccctcgcctctgccaggccccgcgcccctaaaaggtgggaaaaccatggcgaccaatttcagtgacatcgtcaagcaaggctacgtgaagatgaagagcaggaagctcgggatctaccggaggtgctggctggtgttccggaaatcctccagcaaggggccccagcggctggagaagtatccagatgagaagtcggtgtgcctccggggctgccccaaggtgactgagatcagcaacgtcaagtgtgttacgcggctccccaaggagaccaagcggcaggcggtggccatcatattcactgatgactcggcacgtaccttcacctgcgactcagagctagaggca

SEQ ID NO: 127848 - DNA, 814 bp, Homo sapiens
  Payload ID: 5026
  Gene Symbol: DOK4
  Gene Name: docking protein 4
  ENST ID: ENST00000561659
  CDS Start-End: 250-429
agagcgagacagcgagaggaagagaaagatgtcactgtctctaatctccctgtcatttttatttccagcaggcgcggggcgaaggagctgctagaacaatgctgaggcgggtgaggtgaggagcagcccctcgcggcagccccgacagagtgtctggaacaggtgattggaggagccggagacccaggcacctgggcatccttcccctcgcctctgccaggccccgcgcccctaaaaggtgggaaaaccatggcgaccaatttcagtgacatcgtcaagcaaggctacgtgaagatgaagagcaggaagctcgggatctaccggaggtgctggctggtgttccggaaatcctccagcaaggggccccagcggctggagaagtatccagatgagaagtcggtgtgcctccggggctgccccaagagctagaggcagaggagtggtacaagacactatctgtggagtgtctggggtcccgcctcaacgacatcagtctgggagaacctgacctcctggccccaggggtgcagtgtgaacagacagatcgcttcaatgtcttcctgctgccctgccccaacctggacgtgtatggcgagtgcaagctgcagatcacccacgagaacatctacctctgggacatccacaacccccgtgtgaagctcgtctcgtggcccctctgctcactgcgccgctatggccgggatgccacacgctttaccttcgaggctggccggtaggaccctctcgcctcccagccctgtcctactatggtgtgatggtggctgccattcactctgtgttgggcactgtgcta

SEQ ID NO: 127849 - DNA, 495 bp, Homo sapiens
  Payload ID: 5026
  Gene Symbol: DOK4
  Gene Name: docking protein 4
  ENST ID: ENST00000562008
  CDS Start-End: 265-495
gtgcggaagagttgcagggcctgggaacaggccctgcgtgagctcgaggtagtgattcttagcctggggctggagagaaacagcaggcgcggggcgaaggagctgctagaacaatgctgaggcgggtgaggtgaggagcagcccctcgcggcagccccgacagagtgtctggaacaggtgattggaggagccggagacccaggcacctgggcatccttcccctcgcctctgccaggccccgcgcccctaaaaggtgggaaaaccatggcgaccaatttcagtgacatcgtcaagcaaggctacgtgaagatgaagagcaggaagctcgggatctaccggaggtgctggctggtgttccggaaatcctccagcaaggggccccagcggctggagaagtatccagatgagaagtcggtgtgcctccggggctgccccaaggtgactgagatcagcaacgtcaagtgtgttacgcggctccccaaggagaccaagcgg

SEQ ID NO: 127850 - DNA, 549 bp, Homo sapiens
  Payload ID: 5026
  Gene Symbol: DOK4
  Gene Name: docking protein 4
  ENST ID: ENST00000568617
  CDS Start-End: 210-549
ttttcctgaatggttctgtcgtcctgggcaggcgcggggcgaaggagctgctagaacaatgctgaggcgggtgaggtgaggagcagcccctcgcggcagccccgacagagtgtctggaacaggtgattggaggagccggagacccaggcacctgggcatccttcccctcgcctctgccaggccccgcgcccctaaaaggtgggaaaaccatggcgaccaatttcagtgacatcgtcaagcaaggctacgtgaagatgaagagcaggaagctcgggatctaccggaggtgctggctggtgttccggaaatcctccagcaaggggccccagcggctggagaagtatccagatgagaagtcggtgtgcctccggggctgccccaaggtgactgagatcagcaacgtcaagtgtgttacgcggctccccaaggagaccaagcggcaggcggtggccatcatattcactgatgactcggcacgtaccttcacctgcgactcagagctagaggcagaggagtggtacaagacactatctgtggagtgtctggggt

SEQ ID NO: 127851 - DNA, 579 bp, Homo sapiens
  Payload ID: 5026
  Gene Symbol: DOK4
  Gene Name: docking protein 4
  ENST ID: ENST00000567214
  CDS Start-End: 270-579
gactctgccctcccacccaggaagcagcacccagagctgcgtgcggaagagttgcagggcctgggaacaggccctgcgtgagctcgagcaggcgcggggcgaaggagctgctagaacaatgctgaggcgggtgaggtgaggagcagcccctcgcggcagccccgacagagtgtctggaacaggtgattggaggagccggagacccaggcacctgggcatccttcccctcgcctctgccaggccccgcgcccctaaaaggtgggaaaaccatggcgaccaatttcagtgacatcgtcaagcaaggctacgtgaagatgaagagcaggaagctcgggatctaccggaggtgctggctggtgttccggaaatcctccagcaaggggccccagcggctggagaagtatccagatgagaagtcggtgtgcctccggggctgccccaaggtgactgagatcagcaacgtcaagtgtgttacgcggctccccaaggagaccaagcggcaggcggtggccatcatattcactgatgactcggcacgtaccttcacctgcgactcagagctagaggcagaggagtggt

SEQ ID NO: 127852 - DNA, 920 bp, Homo sapiens
  Payload ID: 5026
  Gene Symbol: DOK4
  Gene Name: docking protein 4
  ENST ID: ENST00000562737
  CDS Start-End: 574-920
gaagctctgtgtcccaagtgggcaagcaggtgcctcatgaattcatttcctcatttaaagtaggtagatttattctcatttttttccaatggggaaattaaggcacagggtcttaagcggcttgcccaggaccacacagccagctggattcacactccgggctgtgctatgtctgagctatgttggatgaacctgggggtccagtggcttcctgtaggcgtgttctgactgggggcttccacactgtagacccacagccagtggtcagcctgctaatcatcttggagaggaactcctgagctggtccttgctctgaggagaaggcagccccagaggcaggcggtgaagacagagctgagaaaattgacccatctctggctgccagagcccagcaggcgcggggcgaaggagctgctagaacaatgctgaggcgggtgaggtgaggagcagcccctcgcggcagccccgacagagtgtctggaacaggtgattggaggagccggagacccaggcacctgggcatccttcccctcgcctctgccaggccccgcgcccctaaaaggtgggaaaaccatggcgaccaatttcagtgacatcgtcaagcaaggctacgtgaagatgaagagcaggaagctcgggatctaccggaggtgctggctggtgttccggaaatcctccagcaaggggccccagcggctggagaagtatccagatgagaagtcggtgtgcctccggggctgccccaaggtgactgagatcagcaacgtcaagtgtgttacgcggctccccaaggagaccaagcggcaggcggtggccatcatattcactgatgactcggcacgtaccttcacctgcgactcagagctagaggcagaggagtggtacaagacactatctgtggagtgtctggggtcccgcct

SEQ ID NO: 127853 - DNA, 564 bp, Homo sapiens
  Payload ID: 5026
  Gene Symbol: DOK4
  Gene Name: docking protein 4
  ENST ID: ENST00000566588
  CDS Start-End: 226-564
gacagatcagtgagtcaaccactgcacaggcccgaagggcagagcaggcgcggggcgaaggagctgctagaacaatgctgaggcgggtgaggtgaggagcagcccctcgcggcagccccgacagagtgtctggaacaggtgattggaggagccggagacccaggcacctgggcatccttcccctcgcctctgccaggccccgcgcccctaaaaggtgggaaaaccatggcgaccaatttcagtgacatcgtcaagcaaggctacgtgaagatgaagagcaggaagctcgggatctaccggaggtgctggctggtgttccggaaatcctccagcaaggggccccagcggctggagaagtatccagatgagaagtcggtgtgcctccggggctgccccaaggtgactgagatcagcaacgtcaagtgtgttacgcggctccccaaggagaccaagcggcaggcggtggccatcatattcactgatgactcggcacgtaccttcacctgcgactcagagctagaggcagaggagtggtacaagacactatctgtggagtgtctgggg

SEQ ID NO: 127854 - DNA, 546 bp, Homo sapiens
  Payload ID: 5026
  Gene Symbol: DOK4
  Gene Name: docking protein 4
  ENST ID: ENST00000567276
  CDS Start-End: 207-546
ttttcctgaatggttctgtcgtcctggggcgcggggcgaaggagctgctagaacaatgctgaggcgggtgaggtgaggagcagcccctcgcggcagccccgacagagtgtctggaacaggtgattggaggagccggagacccaggcacctgggcatccttcccctcgcctctgccaggccccgcgcccctaaaaggtgggaaaaccatggcgaccaatttcagtgacatcgtcaagcaaggctacgtgaagatgaagagcaggaagctcgggatctaccggaggtgctggctggtgttccggaaatcctccagcaaggggccccagcggctggagaagtatccagatgagaagtcggtgtgcctccggggctgccccaaggtgactgagatcagcaacgtcaagtgtgttacgcggctccccaaggagaccaagcggcaggcggtggccatcatattcactgatgactcggcacgtaccttcacctgcgactcagagctagaggcagaggagtggtacaagacactatctgtggagtgtctggggt

SEQ ID NO: 127855 - DNA, 1060 bp, Homo sapiens
  Payload ID: 5026
  Gene Symbol: DOK4
  Gene Name: docking protein 4
  ENST ID: ENST00000569010
  CDS Start-End: 323-1060
ctgtggggcaggtgggcagtgagggccctgggagtctccctactccccgccaccccaggacaccagcccttcctggggagaggagcattttggagctggctctccctgcgcggaaacctgtggtggcctggcaccaggcagcaggcgcggggcgaaggagctgctagaacaatgctgaggcgggtgaggtgaggagcagcccctcgcggcagccccgacagagtgtctggaacaggtgattggaggagccggagacccaggcacctgggcatccttcccctcgcctctgccaggccccgcgcccctaaaaggtgggaaaaccatggcgaccaatttcagtgacatcgtcaagcaaggctacgtgaagatgaagagcaggaagctcgggatctaccggaggtgctggctggtgttccggaaatcctccagcaaggggccccagcggctggagaagtatccagatgagaagtcggtgtgcctccggggctgccccaaggtgactgagatcagcaacgtcaagtgtgttacgcggctccccaaggagaccaagcggcaggcggtggccatcatattcactgatgactcggcacgtaccttcacctgcgactcagagctagaggcagaggagtggtacaagacactatctgtggagtgtctggggtcccgcctcaacgacatcagtctgggagaacctgacctcctggccccaggggtgcagtgtgaacagacagatcgcttcaatgtcttcctgctgccctgccccaacctggacgtgtatggcgagtgcaagctgcagatcacccacgagaacatctacctctgggacatccacaacccccgtgtgaagctcgtctcgtggcccctctgctcactgcgccgctatggccgggatgccacacgctttaccttcgaggctggccggatgtgtgatgctggggaaggactctataccttccagacacaagagggggagcagatttaccagcgcgtccacagtgccaccctggccatcgcagagcagcacaagcgggtcctgctggaaatggagaagaacgtgagg

SEQ ID NO: 127856 - DNA, 580 bp, Homo sapiens
  Payload ID: 5026
  Gene Symbol: DOK4
  Gene Name: docking protein 4
  ENST ID: ENST00000564378
  CDS Start-End: 233-580
gactgggctggaccattttcctcactgccgcctccacctcggttttcctgaatggcgcggggcgaaggagctgctagaacaatgctgaggcgggtgaggtgaggagcagcccctcgcggcagccccgacagagtgtctggaacaggtgattggaggagccggagacccaggcacctgggcatccttcccctcgcctctgccaggccccgcgcccctaaaaggtgggaaaaccatggcgaccaatttcagtgacatcgtcaagcaaggctacgtgaagatgaagagcaggaagctcgggatctaccggaggtgctggctggtgttccggaaatcctccagcaaggggccccagcggctggagaagtatccagatgagaagtcggtgtgcctccggggctgccccaaggtgactgagatcagcaacgtcaagtgtgttacgcggctccccaaggagaccaagcggcaggcggtggccatcatattcactgatgactcggcacgtaccttcacctgcgactcagagctagaggcagaggagtggtacaagacactatctgtggagtgtctggggtcccgcctc

SEQ ID NO: 127857 - DNA, 1963 bp, Homo sapiens
  Payload ID: 5027
  Gene Symbol: DOK5
  Gene Name: docking protein 5
  Uniprot ID: Q9P104
  ENST ID: ENST00000262593
  CDS Start-End: 351-1271
ttctcctccttctcggccgggaggaggcagggctggatccctcagccgccgccgctcctcctcctggcaggccggccgcggagtcagctgacgccggcgctccagcctcgcctccccgcgccgcgctctgcgctccccgaaagtggctgcaagccggccgcccactgtcagggttggggggacagagaaagtgatgtgcgccttctaaagcctcgcccagcgccgccgaagcagcttcacctctccaactttctcccaccgactgcttgtcttgaccctgccctccaccctccccagagccacttcgggtgcgcgctcttgggtaaagggggggtcaccggctgtctgggatggcttccaattttaatgacatagtgaagcaagggtacgtgaggatccggagcagacgcctcgggatttatcagcgatgctggttagtattcaagaaagcttcaagcaaaggtccaaaaagactggagaaattttctgatgaacgtgctgcatatttcaggtgttatcataaggttacagaactcaataatgtgaagaacgtagctcgattgccaaaaagcaccaagaaacatgccatagggatttatttcaatgacgatacctccaagacttttgcttgcgaatcagatcttgaggctgatgagtggtgcaaagtactccagatggagtgtgtaggaacacggatcaatgacatcagccttggagagcctgacttactggccactggggttgagagagaacagagtgagagattcaatgtgtatttgatgccatctcctaacttagatgtacatggcgaatgtgccttgcagattacatatgagtatatctgtctttgggacgtccagaatcccagagtcaaactcatctcttggccgctaagcgccctgcggcggtatggacgtgatactacgtggttcacttttgaggcagggaggatgtgtgagactggtgaagggctgtttatctttcagacccgagacggggaggccatctatcagaaagtccactctgctgccttggccatagccgagcagcacgagcgcttgctacagagtgtgaaaaactcgatgctccagatgaagatgagtgagcgggccgcctcgctgagcaccatggtgcccctgcctcgcagcgcctactggcagcacatcacacggcagcacagcacgggacagctctaccgcttgcaagatgtttccagccctctgaagcttcatcgaacagagacttttccagcctacagatctgagcactgacagtaactgccaagaattgttaacacacttgtgatgtgtcagccacagattcacccaggaggtcacagaatgacagcaagggaaatgacgaccaagagaagaagcttaaagtcctggctaattgtgtggtcattggaaaactctgcaatacaataattttctttattttctttttcttttttaaattcttagtgtaattgaaacgtgctctatagatattgactctgtgttccctcttttacagctggacagaaagaagtcaatgtcacgaaatgattttctattgtagatactttgtcccttgcacttctctgaatctgtccttttgtggattcttgtgattttccttccaagtgtttcagttgtatgacagtcagtattgacaataaaatggcttttaattatttgttatttgtttacaccctattcctcagttattattactgtggttctgattaactactggaaattatatttgattatatcaccaattagttaaatcagtgcttcgactcactcttatctgttctgttcaaaactatttgttcaaagaacccgttagtgttgtttacagggttacagtttctctcacatgctttcctcacccctttacccccctttttgaaagcctttattttgttcggagtctcttcataaaacatttgaaaataaaagatcattcttcacccata

SEQ ID NO: 127858 - DNA, 1453 bp, Homo sapiens
  Payload ID: 5027
  Gene Symbol: DOK5
  Gene Name: docking protein 5
  Uniprot ID: Q9P104
  ENST ID: ENST00000395939
  CDS Start-End: 446-1042
cgcgctctgcgctccccgaaagtggctgcaagccggccgcccactgtcagggttggggggacagagaaagtgatgtgcgccttctaaagcctcgcccagcgccgccgaagcagcttcacctctccaactttctcccaccgactgcttgtcttgaccctgccctccaccctccccagagccacttcggatttatcagcgatgctggttagtattcaagaaagcttcaagcaaaggtccaaaaagactggagaaattttctgatgaacgtgctgcatatttcaggtgttatcataaggttacagaactcaataatgtgaagaacgtagctcgattgccaaaaagcaccaagaaacatgccatagggatttatttcaatgacgatacctccaagacttttgcttgcgaatcagatcttgaggctgatgagtggtgcaaagtactccagatggagtgtgtaggaacacggatcaatgacatcagccttggagagcctgacttactggccactggggttgagagagaacagagtgagagattcaatgtgtatttgatgccatctcctaacttagatgtacatggcgaatgtgccttgcagattacatatgagtatatctgtctttgggacgtccagaatcccagagtcaaactcatctcttggccgctaagcgccctgcggcggtatggacgtgatactacgtggttcacttttgaggcagggaggatgtgtgagactggtgaagggctgtttatctttcagacccgagacggggaggccatctatcagaaagtccactctgctgccttggccatagccgagcagcacgagcgcttgctacagagtgtgaaaaactcgatgctccagatgaagatgagtgagcgggccgcctcgctgagcaccatggtgcccctgcctcgcagcgcctactggcagcacatcacacggcagcacagcacgggacagctctaccgcttgcaagatgtttccagccctctgaagcttcatcgaacagagacttttccagcctacagatctgagcactgacagtaactgccaagaattgttaacacacttgtgatgtgtcagccacagattcacccaggaggtcacagaatgacagcaagggaaatgacgaccaagagaagaagcttaaagtcctggctaattgtgtggtcattggaaaactctgcaatacaataattttctttattttctttttcttttttaaattcttagtgtaattgaaacgtgctctatagatattgactctgtgttccctcttttacagctggacagaaagaagtcaatgtcacgaaatgattttctattgtagatactttgtcccttgcacttctctgaatctgtccttttgtggattcttgtgattttccttccaagtgtttcagttgtatgacagtcagtattgacaataaaatggcttttaattatttgtta

SEQ ID NO: 127859 - DNA, 8890 bp, Homo sapiens
  Payload ID: 5028
  Gene Symbol: DOK6
  Gene Name: docking protein 6
  Uniprot ID: Q6PKX4
  ENST ID: ENST00000382713
  CDS Start-End: 191-1186
gttccccgtccgcggcggccctgcaggcgaccccgcgtccccaccggcgggagctcggggaagagcgggcggcggcgctgctgctggcggcggccggctggatgcgagacccgcgcagacccggcggcggacggcggctctcgactccggagagcggatcgcggggcgcaggagcccgatcgcgctggccatggcctccaactttaacgacatagtcaagcagggctacgtgaaaatccgcagcaggaagcttgggattttcagacgatgctggttggttttcaagaaggcttctagcaaaggacccagaaggttagaaaaatttccagatgaaaaggcagcttatttcagaaactttcataaggtaactgaactgcacaatatcaaaaatataaccagactgccccgagagacaaagaagcatgcggtggcaatcatctttcacgatgaaacatcgaagacatttgcctgtgagtcagagctggaggccgaggagtggtgcaagcacctctgcatggagtgtctggggaccaggctcaatgatatcagccttggggagcccgaccttctggccgcaggagtgcagcgggaacagaatgagagattcaacgtgtatcttatgcctacaccaaacctggatatttatggtgaatgcacaatgcagatcactcatgaaaatatctatctctgggatatccacaatgccaaggtcaaactggtgatgtggcctctcagctcactgaggagatacggtcgggactcaacgtggttcacgtttgagtcaggaagaatgtgtgacacaggagaaggactattcacttttcaaacaagggaaggagaaatgatctatcagaaggttcattctgcgacactggccatagctgagcaacatgaaagattaatgctagaaatggaacagaaggcccggcttcagacaagcttgactgaaccaatgacattatccaaatcaatatctcttcctcgcagcgcgtactggcatcacatcactcgtcagaacagcgttggtgaaatctacagtttgcaaggtcatgggtttggttcgtcaaagatgtctcgtgcacagacatttcccagctacgccccagaacagagtgaagaggcccagcagccgttgtcgcggtccagcagctatggattcagctacagctccagcctcatccaatgacacacagagagccgctgttgactagagagacagtctgtcctggacccgtctgtggggtcattaccctctgcctcctggaagaccaattgcagtacaaattgaaatgggtcggctctagccccagtcccattggaaggttaaaaactggagttctgcttccttgattcagtggctaagtcctttatttattgaatttctttgggggaatctatgttttacataaatagaatccaaatcgtatgaacagttatttaaataaacaaaattctttgggtctgacagtaacagaaacctcagcactgggaaaagttgcccacactggggtatgcctgggtgatgggcacctctcactgacctcacagcgcagtccgcccatctgagcacagggtctgtccttagacataatggtgaccctccacaagctctgtggcttttaaagttctgacagggataaatacagtaagctctgcaaatgacatcgtagctgcatataaataaacccagtgacaattaaaggaacatgaaattcagaacacactattaagcagggccctgtagctctactcgtgtgtgtgtgtgcgtgtgtgtgtgtgtgtgtagacaaatggatattgctatatccatctatatataacaagtatatatcaaacatgtgctgagggtgacaggatatgctcacttaaattgttgaaaaccataatttggtgcattaaagttaagattgttatgttgaatagctatttttaaaatagtgctgtaaaaaaaaaaaaaaaaaaggcttcttattagcaaaagtatatgtaatccagtctgttcctaacaagtgtaagcaaaaatgtgagaaggggaacattcagaagcaaaagaaccagtctagctgtcctacacatcatgtcataccctgtctttctggtgagcgtttccttgttgctgacaatgttgctccctgtggccatccatctgagctacgtgaggaggattccatgtgaacgccgatcagcttccatttaaccttgagagaaaagagaggttctaaatgaagaactctttaagaaagaaagaatacacccataaagaactcagctattttgcagtaaagagaagaacaaaatgggtacaggattgtggatatcatagatgctgttctcacacaaccactgggggcttgtaatttactgtgtaaccagaacttgcagggctttattttttcttttactggacacaggttgtctgagattataagaaataaaatagatcaataattttcatcatccctgacactgattacaaacctacagtgtttaaagggaggtagtgaattccacggaaactgagtttggctaattcaggtcaacaaagatatatttgcccttaattctggagttaagtaaaaataaaaattatcctgcctgaatcatctgatgctttgtgcctaagatggttatctctcaaatactctagggtgggtttaaagaacagtgagctcaggtcacgcaagatgaaaacccaggttttttttttcttaataggaaaattttttaaactatccaaattagtctgttgaaagggtaccttttttgctgatctctgatgagttgtcttttcatccctatctgtagcttgagtgcagattgacaattcatttcagtgaattactaccgaataaaagtggttccggatccctcctagataaatgtgcacttacagcaactacctaggctctccaaatcactccactcggtatgaaaaccccatcaagatactaatcgtaagagttaatgtggctgcaaaaaataattatcctaagctttcagggataaaaagaaaattacccaggttctctgcactgtgaattttgctgacacagcggaggagcagatgactggttcctacaactgtacagccttccttgaaatcatagcttttggggttaaacacttgtgaatttcttttgcacatggcatttgcttttgaaatgcctttagtcaaatacaccagagcaactcccagctgagaccatttgagcacagttcctagtggggccacattcagagcaagcctctcgccggctcactcagttgagctgttgcttagacaccacaagtttctacaagggacttatggggaacggccctcaggggtcctggttcacatctcagctttattcatgtgctggaagcacaaacagcgagtccagggagggattctgctaatcagatgagtctgctcttgtgtctctttcttaggagacaaatacctgtatgtaattgcttcaagaactccatttggttctgatcattaccaatgaatataactgaaggagcaccaaagatcaggcataacctcgggccagttcattctgaaaatgatgtcgtaaaaagagtatgtgtgagagaaatctccttcccaagtttttaaccagatctcgtcacaatgaggagaatgctataatctatctcatggtacatttttggagcttaattctagcatactcctccaagtacactcacaattgtagctgagtcaagactgctaaatgaacagataggagaacttatattagactaatatccttgacacgaagcagggttcattgtaataaaaacggcaaacagataaatcttctaccaaaaccaaagatggaaagtcactgcaccagtctcctggaacttcataaaatcaatttcactggagcaaccagaagggtcatggagatgtataccactcgcttgggctcgtaggtttttgactggggatgcctctacactttgtaagtcatttctcccttcaaaaattgtattatatctttaatatatgtgtatttttcaatgcgagggaggaattactatgaaccaaagatatcttttggctccttctgaaagtgactcagtttgaattccattcagatttgtacagataaatagatggtcaccatttctgcatcaggttggaagagaccaatgataaaggaacccaacgtaaggaatagcagttctgaaaatagacaaagcctagaggaggtatctatttcactgagagattacacgaggggacttattttttatgttcccaattttttcttctgataatattaatcaatgtacacatgattgatgcatgatattacacttaaaatgcaggagagtacaaaacaaccttgatccaatagtttcctattctggggggtgggggcagaggcggaaaagaaaacacatctttcacttacttattgaacaaacaataagcactcagaactaatttatttatgcaggttgcaaatatgtatgaagcaataggttctggccactgccacaatttgaaatcaataaaataagaaatatatatttatatatgagggaagatgctgtttgatagagcatgtgaaatcaatggaaacatatttattaaaagtaaacctcacctttttcaccaaatagtaactagagaactagtcctagtatcttgcgtaattcttctctgtcttcattgggaaattatgtttgaaaatctttcatcacctataaaatggtgagcctcttgtactttctattcagtgtagaaagagtggactgataaataactttacattgttggtagtagtttctacagatccagtttattgcatgtcgtatctttattgtagatattaaaaacacatgataaaaattgatgtgtgcccctccttgtttggccagtatcacagaaaactttgtaaaaaagcatggggaccctactccctagattatttgagccatttactaaaattggccattagtgatacagtgaaaacaagctaaggaaatgatattctcctaaaaagttatattccagttttgattattataacacagcacaataaatgggcagtatacgtctaatggaactgagatttaaggctttaacaattcgtgttttaaaatattatattgaagactgcacaaagagaaaattatacatgtttctccaatcctgtgatcatgtctgtaaataccttgcaatttcaaattacttcatccgtcattaactatatgatctcccaaacacagccttctcaaaatcgataaaaatttgccactgaatatgcattaatagctataacaatgggtgacatgccacacaaatttagcttatgcaatttatggggtgtgtgtttgcagactatgaaatgtatgaagtgcagtctcccatggagagaatagagaggcaggatggcaactagtcatgaacgcaacaatttaggttaaatgataaagaatacaatgaaatgtccagagtaacacttggtctctacctttctaacattctaacccaaggccagtgtcatgggcttggctttcttccctgtcgcctcatactgagtatgcaatttacagaggacatctgttgctttatgtcttaaggccactagaggaagtcactacattcccaacaaagatgtgtctttcggcttagtgaaaaacatttaacaagaaacaatgtgtaaccaagtccccacagtaaaatgtgtcttcagaaacatgagaatcacttttatatagccaacctcatttgaattttatcatgaacataaattatcggtgagactggtgtgcggggctggatctgtgagacaagctcacactctcatgtgtgcattctctattaacatatttggaagattgcccacattttctctgcagacctgccacaaatccttaccttcttactgaagaatgtgactattgtagcattcgtgcaattatgccagcagaggaggcactagacagtttatagactcttatggaagttgggcacatttcccaggcaggtggaatgctagctagatctagaagcacccttaaaggtcatgtagaatcaaggtcccactttatgtttcccttgggagaaaactgaaacccatggatgctgtaatttgtttaacggcaaagaaagagccaagaattgtttctcgtagttccagggtcctgatctaggaatgtttccttggctccatggcatctcccagtttgacatagtgggagctgagaaatgccatatggcctcaaaataaataaacccttgtacatttaagtgttttcccagattttcagatgcctctactcttgctgaactcatcaccagctgtatcagtagagaggtgttatggggcaattcattagatttctggtaggtcatgaatggttggtataagctttatttactcatatattgtcatccagttctttgaaattcaatcttatcctaaagtggtagtcaaagtaaaacacattaagtaggtgtttgtgtttagcagtcctactaattcatcacaatcacatagtaattgtgattataatttttggaatctttatcactttctagcactttacggtgtcattatttatggcatttttaacaactttgttgcataattgataacatcagggctacatttttttcatgtgagcctcaagaagcttccattatcaacaagaattggggaaatgacttttttacattataataccttatatattaggtttttcctgataatcttcagtagacaatgatttaaattaactgaagtttaaataagaaatatgttaaaattactaaataatatgaaaaccacattatacttgtaattttcagacacttttctcctaccttaagattttaacatcttgtaaatattaatatttgaaggggagaggaaaaatacatttgtagtagaaatattccctctaacaattctgtttaactagtaagttttttttaagttatcttccatgcctgcttccctagtctgaactccacattccagttgtcagaagaatgaatggatttaaattttctaatcattattttgggcccatgttagcagttgaaacaattaagttcctcactctttcctgcttttaggatgattttagactgtgagcataaaatcaaccctttctgtcagcacagaattgaacatcgaatggagcaaggtctacactctcagcctgtagctgtgctaatgttaggattgaattgttctattaattccctcaagagacccacagcctcaaaagagttgcttattatcagatgtccgaaattcagaaacccaaagtcaggcaaagaaggaaactgagataatgatttaatttttttaagtcactgcaggatttctctcaaagaaaacatctgaaaatggttgagaaagtagttccagatcattaactattttacagagggactgaaagccagggaaaataaagaacagaatgatagtagtatcttgatattaaatttgcatcagaaatgagcaaaatatgtcaatatgaaataatttgaaatcaaattcagattcacatgtatagtgcatagttcaagaaataatgcttactcttgtaaaaaaaaaaaatatatatatatgtatcagcaggtagagtgtgggagctccaactttgttgtgaaagctgataacagagtatgattctttccagttacaaaatactgtattactttagttatagcaagcagtacataaatgacatcaacaactcaggctgctccctgacataaaagccagttccatctttactgcagatgacaggagactttccaagacctgcagaggccccctccaccccaaccttagtgcatgctcacacacacacacacacacacacacacacacacacacacacacatttttggcttttgacccactctgtgtgttccactgaagttatcttttccttaatagattcacacagaattaccccatcctgcaaaatccttatccctatgaatctctaaaatatattaaataatgtgttatatatttgctttttgtaaatctttatttaattaatttatatatactttgtgaagtcttatactgtacatcataaagcgatgtcatctgtagttggttcaatataatgtttatgatcattttgataagaaataactttggacattaggcccttgttaagaaataaaacacccattataaatttgcttctgttggaaaatacatgatttggcatacttcatttttagtaacaatctattctagataaatgataatttggggacatctgtacttaaaaactagctgaactacgttttgggatgagatgcaaagcaacagctgtccctggaactgaaatgtgaatttctagcagaacagaaaatattataataatgaggcaataataaaattaggaaattaaattatttttaaatctgtctgtgtgatttttccccttggtaaaaatacatgaaatacataattgaaaaattaccttcttctgaagtcgtagtttttaatcttaaccatcaataaataaacctattgttaacaatgtcttattcataattctaaaaaatttacaaatgatattgctatgaggttgtgcactattaaagtttgctccatcacttaaaggtaaagcagttcaaaaatactactttacatcacaactttgcatggctgagattttgaacaactaaattgatggttttacccacaagttatttcataaagctaacactgtaatattacttggttttcttatacttttgttatcatgtgatgaaatgtaactatgtaattaaacaaaattctgacaatcatattctgctaatgtttaaaatgttacttattccttcacttattagcttgctattttgaaaataaagtgaaagaaggccctttattaaatgaaa

SEQ ID NO: 127860 - DNA, 506 bp, Homo sapiens
  Payload ID: 5028
  Gene Symbol: DOK6
  Gene Name: docking protein 6
  ENST ID: ENST00000582992
  CDS Start-End: 1-470
agctggaggccgaggagtggtgcaagcacctctgcatggagtgtctggggaccaggctcaatgatatcagccttggggagcccgaccttctggccgcaggagtgcagcgggaacagaatgagagattcaacgtgtatcttatgcctacaccaaacctggatatttatggtgaatgcacaatgcagatcactcatgaaaatatctatctctgggatatccacaatgccaaggtcaaactggtgatgtggcctctcagctcactgaggagatacggtcgggactcaacgtggttcacgtttgagtcaggaagaatgtgtgacacaggagaaggactattcacttttcaaacaagggaaggagaaatgatctatcagaaggttcattctgcgacactggccatagctgagcaacatgaaagattaatgctagaaatggaacagaaggcccgggtaaggccccttccttggtaacctatcagcttggaaatgaatgtcactgggatctga

SEQ ID NO: 127861 - DNA, 2562 bp, Homo sapiens
  Payload ID: 5029
  Gene Symbol: DOK7
  Gene Name: docking protein 7
  Uniprot ID: Q18PE1
  ENST ID: ENST00000340083
  CDS Start-End: 66-1580
attttgaaagtgaccctgggctggggcgccggggcgagcgcggcggcgcggaaccatgacagaagatgaccgaggcggcgctggtggagggccaggtcaagctgcgggacggcaagaagtggaagagtaggtggctggtgctgcggaagccgtcgcccgtggcagactgcctgctgatgctggtctacaaggacaagtcggagcgtatcaagggcctgcgggagcgcagcagcctgacgctagaggacatctgcgggctggagcccggcctgccctacgagggcctggtccacacgctggccattgtctgcctgtcccaggccatcatgctgggctttgacagccacgaggccatgtgtgcgtgggatgcccggatccgctatgcgctcggcgaggtgcataggttccatgtgacagtggctccaggcaccaagttggagagcggcccggctaccctgcacctctgcaatgatgtcctcgtcttggccagggacatccccccggctgtcacggggcagtggaagctgtctgacctccggcgctacggggccgtgccaagcggattcatctttgaaggcgggaccaggtgtgggtactgggctggcgtcttcttcctgtcctcggccgagggggagcagatcagcttcctgttcgactgcatcgtccgaggcatctcccccaccaagggcccctttgggctgcggccggttctaccagacccaagtcccccgggaccctcgactgtggaggagcgtgtggcccaggaagccctggaaaccctacagctggagaagcggctgagcctcctctcacatgcgggcaggccgggcagtggaggggatgaccgcagcctgtccagctcatcctcagaggccagtcacttggacgtcagcgccagcagccggctcaccgcatggccagagcaatcctcgtcgtcagccagcacgtcacaggaggggcctagaccagcagctgcccaggccgccggggaagccatggtgggtgcctcaaggccaccccccaagccgctgcgtccgcggcagctgcaggaggttggccgccagagctcctcggacagcggcatcgccactggcagccactcctcttactccagcagcctctcgtcctacgcgggcagcagcctggacgtgtggcgggccacagatgaactgggctcactgctcagcctgccagcagcgggggcccccgagcccagcctgtgcacctgcctgcccgggacagtcgagtaccaggtgcccacctccctgcgggcccactatgacacaccacgcagcctttgcctggctcctagagaccacagccccccctcacagggcagccccggcaacagtgcggccagggactcaggcggccagacgtccgccgggtgtccctctggctggctgggcacgagacggcggggcctggtgatggaggccccccagggcagcgaggccacactgcctggccctgcccctggcgagccctgggaagcaggcggcccccacgcggggccacccccggctttcttttcggcatgtccagtctgtggaggactcaaggtaaacccccctccttgagagccgcagatcccgccccgcggctgcaaaggggctgaatttgcccccagatggcagaggaagtggcgccagcctccttgcagactggtgctctgtgttctgtgggagggaccgggggtctcccggagaggggagctggagggcgcgccctgtggctgccaccggaggaaggggctgacttggggaggtgagttctggaaggcaggggctctgggtccggcaggtcggggtcaccagagccccaatgctcagctgcttcactccgtgtcccccacccctgaggatcaggtgagtgctgcacctctgttggctcgtgccttgcactggggtgccaagggctggaggccctgccgctggccttgtcctccttgggcctcacgcccccttcgggggtggccggttctccccatcacctctctggggcagtcacaccacctgttaagcatcaagctaccacagaggctccggccacctgggctccaccagcccagcccccctgggctccgtgtgcgctgggcctcatccccatctatgggaggaaactgaagctcaggaggctgtgtggcttgcggggtctctgggttctgggccccactgttccccagtgaagcccttgtgggaaggttccgggagcaggtggtgtcctcagagcagcctcgcctgctgaccccactgggagaggcgccgtgcctcgggcccctggtgggagctctgctggctcctgtctgaacctcctcgcagggccaaaggctggcttggcctgtgtttcccctggcccaggcctcagcccctgcgtcggaggtggggctgtgttgggcccattgtcccccgccctgggtggcttcctcttgcacagcctggagcctgccctgaccacagcccagcagctccctgtgaacacctctttgtcccttcactgtcagctgtttctaaacccagacactgtttgtaatagactggaaataaaatgttctttccttac

SEQ ID NO: 127862 - DNA, 2551 bp, Homo sapiens
  Payload ID: 5029
  Gene Symbol: DOK7
  Gene Name: docking protein 7
  Uniprot ID: Q18PE1
  ENST ID: ENST00000507039
  CDS Start-End: 66-833
attttgaaagtgaccctgggctggggcgccggggcgagcgcggcggcgcggaaccatgacagaagatgaccgaggcggcgctggtggagggccaggtcaagctgcgggacggcaagaagtggaagagtaggtggctggtgctgcggaagccgtcgcccgtggcagactgcctgctgatgctggtctacaaggacaagtcggagcgtatcaagggcctgcgggagcgcagcagcctgacgctagaggacatctgcgggctggagcccggcctgccctacgagggcctggtccacacgctggccattgtctgcctgtcccaggccatcatgctgggctttgacagccacgaggccatgtgtgcgtgggatgcccggatccgctatgcgctcggcgaggtgcataggttccatgtgacagtggctccaggcaccaagttggagagcggcccggctaccctgcacctctgcaatgatgtcctcgtcttggccagggacatccccccggctgtcacggggcagtggaagctgtctgacctccggcgctacggggccgtgccaagcggattcatctttgaaggcgggaccaggggctggcgtcttcttcctgtcctcggccgagggggagcagatcagcttcctgttcgactgcatcgtccgaggcatctcccccaccaagggcccctttgggctgcggccggttctaccagacccaagtcccccgggaccctcgactgtggaggagcgtgtggcccaggaagccctggaaaccctacagctggagaagcggctgagcctcctctcacatgcgggcaggccgggcagtggaggggatgaccgcagcctgtccagctcatcctcagaggccagtcacttggacgtcagcgccagcagccggctcaccgcatggccagagcaatcctcgtcgtcagccagcacgtcacaggaggggcctagaccagcagctgcccaggccgccggggaagccatggtgggtgcctcaaggccaccccccaagccgctgcgtccgcggcagctgcaggaggttggccgccagagctcctcggacagcggcatcgccactggcagccactcctcttactccagcagcctctcgtcctacgcgggcagcagcctggacgtgtggcgggccacagatgaactgggctcactgctcagcctgccagcagcgggggcccccgagcccagcctgtgcacctgcctgcccgggacagtcgagtaccaggtgcccacctccctgcgggcccactatgacacaccacgcagcctttgcctggctcctagagaccacagccccccctcacagggcagccccggcaacagtgcggccagggactcaggcggccagacgtccgccgggtgtccctctggctggctgggcacgagacggcggggcctggtgatggaggccccccagggcagcgaggccacactgcctggccctgcccctggcgagccctgggaagcaggcggcccccacgcggggccacccccggctttcttttcggcatgtccagtctgtggaggactcaaggtaaacccccctccttgagagccgcagatcccgccccgcggctgcaaaggggctgaatttgcccccagatggcagaggaagtggcgccagcctccttgcagactggtgctctgtgttctgtgggagggaccgggggtctcccggagaggggagctggagggcgcgccctgtggctgccaccggaggaaggggctgacttggggaggtgagttctggaaggcaggggctctgggtccggcaggtcggggtcaccagagccccaatgctcagctgcttcactccgtgtcccccacccctgaggatcaggtgagtgctgcacctctgttggctcgtgccttgcactggggtgccaagggctggaggccctgccgctggccttgtcctccttgggcctcacgcccccttcgggggtggccggttctccccatcacctctctggggcagtcacaccacctgttaagcatcaagctaccacagaggctccggccacctgggctccaccagcccagcccccctgggctccgtgtgcgctgggcctcatccccatctatgggaggaaactgaagctcaggaggctgtgtggcttgcggggtctctgggttctgggccccactgttccccagtgaagcccttgtgggaaggttccgggagcaggtggtgtcctcagagcagcctcgcctgctgaccccactgggagaggcgccgtgcctcgggcccctggtgggagctctgctggctcctgtctgaacctcctcgcagggccaaaggctggcttggcctgtgtttcccctggcccaggcctcagcccctgcgtcggaggtggggctgtgttgggcccattgtcccccgccctgggtggcttcctcttgcacagcctggagcctgccctgaccacagcccagcagctccctgtgaacacctctttgtcccttcactgtcagctgtttctaaacccagacactgtttgtaatagactggaaataaaatgttctttccttac

SEQ ID NO: 127863 - DNA, 2090 bp, Homo sapiens
  Payload ID: 5030
  Gene Symbol: DOLK
  Gene Name: dolichol kinase
  Uniprot ID: Q9UPQ8
  ENST ID: ENST00000372586
  CDS Start-End: 317-1933
gttgccgcggggcggtgccaagatggcgaggcccaaagaggtgaggagccggcagcgggggcggctgtaactgtgaggaaggctgcagagtggcgacgtctacgccgtaggttggaggctgtggggggtggccgggcgccagctcccaggccgcagaagtgacctgcggtggagttccctcctcgctgctggagaacggagggagaaggttgctggccgggtgaaagtgcctccctctgcttgacggggctgaggggcccgaagtctagggcgtccgtagtcgccccggcctccgtgaagccccaggtctagagatatgacccgagagtgcccatctccggccccggggcctggggctccgctgagtggatcggtgctggcagaggcggcagtagtgtttgcagtggtgctgagcatccacgcaaccgtatgggaccgatactcgtggtgcgccgtggccctcgcagtgcaggccttctacgtccaatacaagtgggaccggctgctacagcagggaagcgccgtcttccagttccgaatgtccgcaaacagtggcctattgcccgcctccatggtcatgcctttgcttggactagtcatgaaggagcggtgccagactgctgggaacccgttctttgagcgttttggcattgtggtggcagccactggcatggcagtggccctcttctcatcagtgttggcgctcggcatcactcgcccagtgccaaccaacacttgtgtcatcttgggcttggctggaggtgttatcatttatatcatgaagcactcgttgagcgtgggggaggtgatcgaagtcctggaagtccttctgatcttcgtttatctcaacatgatcctgctgtacctgctgccccgctgcttcacccctggtgaggcactgctggtattgggtggcattagctttgtcctcaaccagctcatcaagcgctctctgacactggtggaaagtcagggggacccagtggacttcttcctgctggtggtggtagtagggatggtactcatgggcattttcttcagcactctgtttgtcttcatggactcaggcacctgggcctcctccatcttcttccacctcatgacctgtgtgctgagccttggtgtggtcctaccctggctgcaccggctcatccgcaggaatcccctgctctggcttcttcagtttctcttccagacagacacccgcatctacctcctagcctattggtctctgctggccaccttggcctgcctggtggtgctgtaccagaatgccaagcggtcatcttccgagtccaagaagcaccaggcccccaccatcgcccgaaagtatttccacctcattgtggtagccacctacatcccaggtatcatctttgaccggccactgctctatgtagccgccactgtatgcctggcggtcttcatcttcctggagtatgtgcgctacttccgcatcaagcctttgggtcacactctacggagcttcctgtccctttttctggatgaacgagacagtggaccactcattctgacacacatctacctgctcctgggcatgtctcttcccatctggctgatccccagaccctgcacacagaagggtagcctgggaggagccagggccctcgtcccctatgccggtgtcctggctgtgggtgtgggtgatactgtggcctccatcttcggtagcaccatgggggagatccgctggcctggaaccaaaaagacttttgaggggaccatgacatctatatttgcgcagatcatttctgtagctctgatcttaatctttgacagtggagtggacctaaactacagttatgcttggattttggggtccatcagcactgtgtccctcctggaagcatacactacacagatagacaatctccttctgcctctctacctcctgatattgctgatggcctagctgttacagtgcagcagcagtgacggaggaaacagacatggggagggtgaacagtccccacagcagacagctacttgggcatgaagagccaaggtgtgaaaagcagatttgatttttcagttgattcagatttaaaataaaaagcaaagctctccta

SEQ ID NO: 127864 - DNA, 1932 bp, Homo sapiens
  Payload ID: 5031
  Gene Symbol: DOLPP1
  Gene Name: dolichyldiphosphatase 1
  ENST ID: ENST00000327812
  CDS Start-End: 1-274
ggcagcggacggacagtgctcgctccccgcttcatggcggccggtgaccctcacccacgtcgaatatcctgcaggtgatctctctggccacctccttgcctacctgagcctcagccctgtatttgtcatcgtcggtttcgtgaccctcatcatatttaagcgggagctgcacacggcccccacacagcagtgggcaccaagtacgggatgccctccagccattcccagtttatgtggttcttctccgtctattccttccttttcctgtatttaagaatgcaccaaacaaacaacgccaggttcctggacttgctgtggaggcacgtgctctccctgggactcctcgctgtggccttcctagtctcctacagcaggcctgtctccgagttcttcctaatccgagacacaagcctcattcccaacgtactctggtttgagtacacggtaacccgggcagaagccaggaacagacaacgcaagctggggacgaaactgcagtgaccagtgggtgtggctgggtccagcctccagatctggcccgcacgatgccttgcaggatggacaggatgacagacagggacgaagcagagacctctacagacccaagtcaccaagtggagcctttttttttcttattttaattttaatgaacaaggtggaccaaagggctgaaccagcccctcaaccaggaccctggggggcctgctgcctgggggccgtggccagagaccctcgctgtgctgctgccagcccctggctgggcagaaagtgccctcggcatgggcacctgggtgtggggtggaggaggagggctcgcgcctctggtctcggggccaggaattccaggtggcgtgagaagtacacactatttattttttggttttgtcagaggcaggcaggattttggagctggaagaatctgctctccggtggctgccctgtgaacagagggctcccggtcagcttcccaggcccttcgccctatgcccagagggcagactgcctctccctgggccggggtggcctgggtgccaggaggaggggagcataccccacaccctccctgccaccgttgccgttccagaacctcggtcagtgtttccctgtctgggggcagggcccagagcgagcacgcgtctggcggctgctgtcgttgtgttctaccccgtactgacccaacaccacaagggctttctctggtcccctgtccctaagacaataatcgctttctgacaaaggagcctgcacatttgggtgagcagacccaagctgtttacagctctttcttgtcctgccatccagtagcagttagtcttcatccccacgtgaacaaaatgggaaggagccgtgaggagaggagtgaggcaacaggcacccgaagtccctcgtccttccctctgtgtgctctgaatatgtccttgtccttcctgacccatctctgaccagctgggaacctgcttggggtccccctcaaacctgtgtctggggtgtgggctcacagatccctatcagcctggttcgtgggagggctcttcctaaagggacccccatctctaagtcactctgaaagggagttgtggagaggagacgcctccagactctcagaagttttgaggactgaactgggtcactcgggatctgtgttcgaatcctccccacccctttctttgtggagtttcctaacctgctgctgaagcacaatgttttggtgctttcttttctcatttgttaaaggcagtgtccaaaagccattccagatgccaagaccaggggcttatttctagggaaggtaggtcggtttccatgtttccctcccgttatttttattttttactttttgcctgagacaagccgagtatgaggtggtttgatttaagaaaaatcaatgaaattgtttactactgttttaaaataaaaccgtaaactctggca

SEQ ID NO: 127865 - DNA, 2177 bp, Homo sapiens
  Payload ID: 5031
  Gene Symbol: DOLPP1
  Gene Name: dolichyldiphosphatase 1
  Uniprot ID: Q86YN1
  ENST ID: ENST00000372546
  CDS Start-End: 33-749
ggctgctcgaagaagcccggtctccgggtaagatggcagcggacggacagtgctcgctccccgcttcatggcggccggtgaccctcacccacgtcgaatatcctgcaggtgatctctctggccacctccttgcctacctgagcctcagccctgtatttgtcatcgtcggtttcgtgaccctcatcatatttaagcgggagctgcacacgatctccttccttgggggcctggcactgaacgagggggtcaactggctgatcaaaaacgtcatccaggagccacggccctgtggaggcccccacacagcagtgggcaccaagtacgggatgccctccagccattcccagtttatgtggttcttctccgtctattccttccttttcctgtatttaagaatgcaccaaacaaacaacgccaggttcctggacttgctgtggaggcacgtgctctccctgggactcctcgctgtggccttcctagtctcctacagcagggtctacctgctgtaccacacctggagccaggtgctctatggaggcatcgctggaggcctcatggccatcgcctggttcatcttcacccaggaggtcctcaccccgctgttccccaggatagcagcctggcctgtctccgagttcttcctaatccgagacacaagcctcattcccaacgtactctggtttgagtacacggtaacccgggcagaagccaggaacagacaacgcaagctggggacgaaactgcagtgaccagtgggtgtggctgggtccagcctccagatctggcccgcacgatgccttgcaggatggacaggatgacagacagggacgaagcagagacctctacagacccaagtcaccaagtggagcctttttttttcttattttaattttaatgaacaaggtggaccaaagggctgaaccagcccctcaaccaggaccctggggggcctgctgcctgggggccgtggccagagaccctcgctgtgctgctgccagcccctggctgggcagaaagtgccctcggcatgggcacctgggtgtggggtggaggaggagggctcgcgcctctggtctcggggccaggaattccaggtggcgtgagaagtacacactatttattttttggttttgtcagaggcaggcaggattttggagctggaagaatctgctctccggtggctgccctgtgaacagagggctcccggtcagcttcccaggcccttcgccctatgcccagagggcagactgcctctccctgggccggggtggcctgggtgccaggaggaggggagcataccccacaccctccctgccaccgttgccgttccagaacctcggtcagtgtttccctgtctgggggcagggcccagagcgagcacgcgtctggcggctgctgtcgttgtgttctaccccgtactgacccaacaccacaagggctttctctggtcccctgtccctaagacaataatcgctttctgacaaaggagcctgcacatttgggtgagcagacccaagctgtttacagctctttcttgtcctgccatccagtagcagttagtcttcatccccacgtgaacaaaatgggaaggagccgtgaggagaggagtgaggcaacaggcacccgaagtccctcgtccttccctctgtgtgctctgaatatgtccttgtccttcctgacccatctctgaccagctgggaacctgcttggggtccccctcaaacctgtgtctggggtgtgggctcacagatccctatcagcctggttcgtgggagggctcttcctaaagggacccccatctctaagtcactctgaaagggagttgtggagaggagacgcctccagactctcagaagttttgaggactgaactgggtcactcgggatctgtgttcgaatcctccccacccctttctttgtggagtttcctaacctgctgctgaagcacaatgttttggtgctttcttttctcatttgttaaaggcagtgtccaaaagccattccagatgccaagaccaggggcttatttctagggaaggtaggtcggtttccatgtttccctcccgttatttttattttttactttttgcctgagacaagccgagtatgaggtggtttgatttaagaaaaatcaatgaaattgtttactactgttttaaaataaaaccgtaaactctg

SEQ ID NO: 127866 - DNA, 2037 bp, Homo sapiens
  Payload ID: 5031
  Gene Symbol: DOLPP1
  Gene Name: dolichyldiphosphatase 1
  Uniprot ID: Q86YN1
  ENST ID: ENST00000406974
  CDS Start-End: 22-609
gaagcccggtctccgggtaagatggcagcggacggacagtgctcgctccccgcttcatggcggccggtgaccctcacccacgtcgaatatcctgcaggtgatctctctggccacctccttgcctacctgagcctcagccctgtatttgtcatcgtcggtttcgtgaccctcatcatatttaagcgggagctgcacacgatctccttccttgggggcctggcactgaacgagggggtcaactggctgatcaaaaacgtcatccaggagccacggccctgtggaggcccccacacagcagtgggcaccaagtacgggatgccctccagccattcccagtttatgtggttcttctccgtctattccttccttttcctgtatttaagaatgcaccaaacaaacaacgccaggttcctggacttgctgtggaggcacgtgctctccctgggactcctcgctgtggccttcctagtctcctacagcaggcctgtctccgagttcttcctaatccgagacacaagcctcattcccaacgtactctggtttgagtacacggtaacccgggcagaagccaggaacagacaacgcaagctggggacgaaactgcagtgaccagtgggtgtggctgggtccagcctccagatctggcccgcacgatgccttgcaggatggacaggatgacagacagggacgaagcagagacctctacagacccaagtcaccaagtggagcctttttttttcttattttaattttaatgaacaaggtggaccaaagggctgaaccagcccctcaaccaggaccctggggggcctgctgcctgggggccgtggccagagaccctcgctgtgctgctgccagcccctggctgggcagaaagtgccctcggcatgggcacctgggtgtggggtggaggaggagggctcgcgcctctggtctcggggccaggaattccaggtggcgtgagaagtacacactatttattttttggttttgtcagaggcaggcaggattttggagctggaagaatctgctctccggtggctgccctgtgaacagagggctcccggtcagcttcccaggcccttcgccctatgcccagagggcagactgcctctccctgggccggggtggcctgggtgccaggaggaggggagcataccccacaccctccctgccaccgttgccgttccagaacctcggtcagtgtttccctgtctgggggcagggcccagagcgagcacgcgtctggcggctgctgtcgttgtgttctaccccgtactgacccaacaccacaagggctttctctggtcccctgtccctaagacaataatcgctttctgacaaaggagcctgcacatttgggtgagcagacccaagctgtttacagctctttcttgtcctgccatccagtagcagttagtcttcatccccacgtgaacaaaatgggaaggagccgtgaggagaggagtgaggcaacaggcacccgaagtccctcgtccttccctctgtgtgctctgaatatgtccttgtccttcctgacccatctctgaccagctgggaacctgcttggggtccccctcaaacctgtgtctggggtgtgggctcacagatccctatcagcctggttcgtgggagggctcttcctaaagggacccccatctctaagtcactctgaaagggagttgtggagaggagacgcctccagactctcagaagttttgaggactgaactgggtcactcgggatctgtgttcgaatcctccccacccctttctttgtggagtttcctaacctgctgctgaagcacaatgttttggtgctttcttttctcatttgttaaaggcagtgtccaaaagccattccagatgccaagaccaggggcttatttctagggaaggtaggtcggtttccatgtttccctcccgttatttttattttttactttttgcctgagacaagccgagtatgaggtggtttgatttaagaaaaatcaatgaaattgtttactactgttttaaaataaaaccgtaaactctg

SEQ ID NO: 127867 - DNA, 911 bp, Homo sapiens
  Payload ID: 5031
  Gene Symbol: DOLPP1
  Gene Name: dolichyldiphosphatase 1
  ENST ID: ENST00000412363
  CDS Start-End: 1-268
ggacggacagtgctcgctccccgcttcatggcggccggtgaccctcacccacgtcgaatatcctgcaggtgatctctctggccacctccttgcctacctgagcctcagccctgtatttgtcatcgtcggtttcgtgaccctcatcatatttaagcgggagctgcacacggcccccacacagcagtgggcaccaagtacgggatgccctccagccattcccagtttatgtggttcttctccgtctattccttccttttcctgtatttaaggcctgtctccgagttcttcctaatccgagacacaagcctcattcccaacgtactctggtttgagtacacggtaacccgggcagaagccaggaacagacaacgcaagctggggacgaaactgcagtgaccagtgggtgtggctgggtccagcctccagatctggcccgcacgatgccttgcaggatggacaggatgacagacagggacgaagcagagacctctacagacccaagtcaccaagtggagcctttttttttcttattttaattttaatgaacaaggtggaccaaagggctgaaccagcccctcaaccaggaccctggggggcctgctgcctgggggccgtggccagagaccctcgctgtgctgctgccagcccctggctgggcagaaagtgccctcggcatgggcacctgggtgtggggtggaggaggagggctcgcgcctctggtctcggggccaggaattccaggtggcgtgagaagtacacactatttattttttggttttgtcagaggcaggcaggattttggagctggaagaatctgctctccggtggctgccctgtgaacagagggctcccggtcagcttcccaggcccttcgccctatgcccagagggcagactgcctctccctgggcc

SEQ ID NO: 127868 - DNA, 2079 bp, Homo sapiens
  Payload ID: 5032
  Gene Symbol: DDOST
  Gene Name: dolichyl-diphosphooligosaccharide--protein glycosyltransferase subunit (non-catalytic)
  Uniprot ID: P39656
  ENST ID: ENST00000375048
  CDS Start-End: 107-1477
ccgcgccttatcgccaaagctgcggctctggacgcccagccgcggcgtatcccgatcacttccgggtagtgctccacgggcacgagccgcgattgggctaccgtagatggggtacttccggtgtgcacgtgctgggtccttcggcaggaggaggaagatggagcccagcaccgcggcccgggcttgggccctcttttggttgctgctgcccttgcttggcgcggtttgcgccagcggaccccgcaccttagtgctgctggacaacctcaacgtgcgggagactcattcgcttttcttccggagcctgaaggaccggggctttgagctcacattcaagaccgctgatgaccccagcctgtctctcataaagtatggggaattcctctatgacaatctcatcattttctccccttcggtagaagattttggaggcaacatcaacgtggagaccatcagtgcctttattgacggcggaggcagtgtgctggtagctgccagctccgacattggtgaccctcttcgagagctgggcagtgagtgcgggattgagtttgacgaggagaaaacggctgtcattgaccatcacaactatgacatctcagaccttggccagcatacgctcatcgtggctgacactgagaacctgctgaaggccccaaccatcgttgggaaatcatctctaaatcccatcctctttcgaggtgttgggatggtggccgatcctgataaccctttggtgctggacatcctgacgggctcttccacctcttactccttcttcccggacaagcctatcacccagtatccacatgcggtggggaagaacaccctcctcattgctgggctccaggccaggaacaatgcccgcgtcatcttcagcggctccctcgacttcttcagcgactccttcttcaactcagcagtgcagaaggcggcgcccggctcccagaggtattcccagacaggcaactatgaactagctgtggccctctcccgctgggtgttcaaggaggagggtgtcctccgtgtggggcctgtgtcccatcatcgggtgggcgagacagccccacccaatgcctacactgtcactgacctagtggagtatagcatcgtgatccagcagctctcaaatggcaaatgggtcccctttgatggcgatgacattcagctggagtttgtccgcattgatccttttgtgaggaccttcctgaagaagaaaggtggcaaatacagtgttcagttcaagttgcccgacgtgtatggtgtattccagtttaaagtggattacaaccggctaggctacacacacctgtactcttccactcaggtatccgtgcggccactccagcacacgcagtatgagcgcttcatcccctcggcctacccctactacgccagcgccttctccatgatgctggggctcttcatcttcagcatcgtcttcttgcacatgaaggagaaggagaagtccgactgaggggctagagccctctccgcacagcgtggagacggggcaaggaggggggttattaggattggtggttttgttttgctttgtttaaagccgtgggaaaatggcacaactttacctctgtgggagatgcaacactgagagccaaggggtgggagttgggataatttttatataaaagaagtttttccactttgaattgctaaaagtggcatttttcctatgtgcagtcactcctctcatttctaaaatagggacgtggccaggcacggtggctcatgcctgtaatcccagcactttgggaggccgaggcaggcggctcacgaggtcaggagatcgagactatcctggctaacacggtaaaaccctgtctctactaaaagtacaaaaaattagctgggcgtggtggtgggcacctgtagtcccagctactcgggaggctgaggcaggagaaaggcatgaatccaagaggcagagcttgcagtgagctgagatcacgccattgcactccagcctgggcaacagtgttaagactctgtctcaaatataaataaataaataaataaataaataaataaataaaaataaagcgagatgttgccctcaaa

SEQ ID NO: 127869 - DNA, 2126 bp, Homo sapiens
  Payload ID: 5032
  Gene Symbol: DDOST
  Gene Name: dolichyl-diphosphooligosaccharide--protein glycosyltransferase subunit (non-catalytic)
  Uniprot ID: P39656
  ENST ID: ENST00000415136
  CDS Start-End: 144-1514
aatccacctcccaccagggcacttccggcggcgctctccgcgccttatcgccaaagctgcggctctggacgcccagccgcggcgtatcccgatcacttccgggtagtgctccacgggcacgagccgcgattgggctaccgtagatggggtacttccggtgtgcacgtgctgggtccttcggcaggaggaggaagatggagcccagcaccgcggcccgggcttgggccctcttttggttgctgctgcccttgcttggcgcggtttgcgccagcggaccccgcaccttagtgctgctggacaacctcaacgtgcgggagactcattcgcttttcttccggagcctgaaggaccggggctttgagctcacattcaagaccgctgatgaccccagcctgtctctcataaagtatggggaattcctctatgacaatctcatcattttctccccttcggtagaagattttggaggcaacatcaacgtggagaccatcagtgcctttattgacggcggaggcagtgtgctggtagctgccagctccgacattggtgaccctcttcgagagctgggcagtgagtgcgggattgagtttgacgaggagaaaacggctgtcattgaccatcacaactatgacatctcagaccttggccagcatacgctcatcgtggctgacactgagaacctgctgaaggccccaaccatcgttgggaaatcatctctaaatcccatcctctttcgaggtgttgggatggtggccgatcctgataaccctttggtgctggacatcctgacgggctcttccacctcttactccttcttcccggacaagcctatcacccagtatccacatgcggtggggaagaacaccctcctcattgctgggctccaggccaggaacaatgcccgcgtcatcttcagcggctccctcgacttcttcagcgactccttcttcaactcagcagtgcagaaggcggcgcccggctcccagaggtattcccagacaggcaactatgaactagctgtggccctctcccgctgggtgttcaaggaggagggtgtcctccgtgtggggcctgtgtcccatcatcgggtgggcgagacagccccacccaatgcctacactgtcactgacctagtggagtatagcatcgtgatccagcagctctcaaatggcaaatgggtcccctttgatggcgatgacattcagctggagtttgtccgcattgatccttttgtgaggaccttcctgaagaagaaaggtggcaaatacagtgttcagttcaagttgcccgacgtgtatggtgtattccagtttaaagtggattacaaccggctaggctacacacacctgtactcttccactcaggtatccgtgcggccactccagcacacgcagtatgagcgcttcatcccctcggcctacccctactacgccagcgccttctccatgatgctggggctcttcatcttcagcatcgtcttcttgcacatgaaggagaaggagaagtccgactgaggggctagagccctctccgcacagcgtggagacggggcaaggaggggggttattaggattggtggttttgttttgctttgtttaaagccgtgggaaaatggcacaactttacctctgtgggagatgcaacactgagagccaaggggtgggagttgggataatttttatataaaagaagtttttccactttgaattgctaaaagtggcatttttcctatgtgcagtcactcctctcatttctaaaatagggacgtggccaggcacggtggctcatgcctgtaatcccagcactttgggaggccgaggcaggcggctcacgaggtcaggagatcgagactatcctggctaacacggtaaaaccctgtctctactaaaagtacaaaaaattagctgggcgtggtggtgggcacctgtagtcccagctactcgggaggctgaggcaggagaaaggcatgaatccaagaggcagagcttgcagtgagctgagatcacgccattgcactccagcctgggcaacagtgttaagactctgtctcaaatataaataaataaataaataaataaataaataaataaaaataaagcgagatgttgccctcaaacttcacctgg

SEQ ID NO: 127870 - DNA, 1963 bp, Homo sapiens
  Payload ID: 5032
  Gene Symbol: DDOST
  Gene Name: dolichyl-diphosphooligosaccharide--protein glycosyltransferase subunit (non-catalytic)
  ENST ID: ENST00000602624
  CDS Start-End: 42-1361
tccggtgtgcacgtgctgggtccttcggcaggaggaggaagatggagcccagcaccgcggcccgggcttgggccctcttttggttgctgctgcccttgcttggcgcggtttgcgccagcggaccccgcaccttagtgctgctggacaacctcaacgtgcgggagactcattcgcttttcttccggagcctgaaggaccggggctttgagctcacattcaagaccgctgatgaccccagcctgtctctcataaagtatggggaattcctctatgacaatctcatcattttctccccttcggtagaagattttggaggcaacatcaacgtggagaccatcagtgcctttattgacggcggaggcagtgtgctggtagctgccagctccgacattggtgaccctcttcgagagctgggcagtgagtgcgggattgagtttgacgaggagaaaacggctgtcattgaccatcacaactatgacatctcagaccttggccagcatacgctcatcgtggctgacactgagaacctgctgaaggccccaaccatcgttgggaaatcatctctaaatcccatcctctttcgaggtgttgggatggtggccgatcctgataaccctttggtgctggacatcctgacgggctcttccacctcttactccttcttcccggacaagcctatcacccagtatccacatgcggtggggaagaacaccctcctcattgctgggctccaggccaggaacaatgcccgcgtcatcttcagcggctccctcgacttcttcagcgactccttcttcaactcagcagtgcagaaggcggcgcccggctcccagaggtattcccagacaggcaactatgaactagctgtggccctctcccgctgggtgttcaaggaggagggtgtcctccgtgtggggcctgtgtcccatcatcgggtgggcgagacagccccacccaatgcctacactgtcactgacctagtggagtatagcatcgtgatccagcagctctcaaatggcaaatgggtcccctttgatggcgatgacattcagctggagtttgtccgcattgatccttttgtgaggaccttcctgaagaagaaaggtggcaaatacagtgttcagttcaagttgcccgacgtgtatggtgtattccagtttaaagtggattacaaccggctaggctacacacacctgtactcttccactcaggtatccgtgcggccactccagcacacgcagtatgagcgcttcatcccctcggcctacccctactacgccagcgccttctccatgatgctggggctcttcatcttcagcatcgtcttcttgcacatgaaggagaaggagaagtccgactgaggggctagagccctctccgcacagcgtggagacggggcaaggaggggggttattaggattggtggttttgttttgctttgtttaaagccgtgggaaaatggcacaactttacctctgtgggagatgcaacactgagagccaaggggtgggagttgggataatttttatataaaagaagtttttccactttgaattgctaaaagtggcatttttcctatgtgcagtcactcctctcatttctaaaatagggacgtggccaggcacggtggctcatgcctgtaatcccagcactttgggaggccgaggcaggcggctcacgaggtcaggagatcgagactatcctggctaacacggtaaaaccctgtctctactaaaagtacaaaaaattagctgggcgtggtggtgggcacctgtagtcccagctactcgggaggctgaggcaggagaaaggcatgaatccaagaggcagagcttgcagtgagctgagatcacgccattgcactccagcctgggcaacagtgttaagactctgtctcaaatataaataaataaataaataaataaataaataaataaaaataaagcgagatgttgccctcaaa

SEQ ID NO: 127871 - DNA, 502 bp, Homo sapiens
  Payload ID: 5032
  Gene Symbol: DDOST
  Gene Name: dolichyl-diphosphooligosaccharide--protein glycosyltransferase subunit (non-catalytic)
  ENST ID: ENST00000464364
  CDS Start-End: 39-502
ggtgtgcacgtgctgggtccttcggcaggaggaggaagatggagcccagcaccgcggcccgggcttgggccctcttttggttgctgctgcccttgcttggcgcggtttgcgccagcggaccccgcaccttagtgctgctggacaacctcaacgtgcgggagactcattcgcttttcttccggagcctgaaggaccggggctttgagctcacattcaagaccgctgatgaccccagcctgtctctcataaagtatggggaattcctctatgacaatctcatcattttctccccttcggtagaaggtgaccctcttcgagagctgggcagtgagtgcgggattgagtttgacgaggagaaaacggctgtcattgaccatcacaactatgacatctcagaccttggccagcatacgctcatcgtggctgacactgagaacctgctgaaggccccaaccatcgttgggaaatcatctctaaatcccatcctctttcgaggtgttgg

SEQ ID NO: 127872 - DNA, 2205 bp, Homo sapiens
  Payload ID: 5033
  Gene Symbol: DPAGT1
  Gene Name: dolichyl-phosphate (UDP-N-acetylglucosamine) N-acetylglucosaminephosphotransferase 1 (GlcNAc-1-P transferase)
  Uniprot ID: Q9H3H5
  ENST ID: ENST00000354202
  CDS Start-End: 488-1714
attcatcttggaaccgggcaattggcatttccgctctgggtagtacatctttaacataatgttagggaagtatccgttcttggctgcctttctttaattgcgtttccagtactctctcggtgattctactcttgaacataggatgaaatttggaatcacacttctcttccacttccatccccaccctctaatgcccatattaaaaatggcggccgccgccttccgcagtaatggttgttcagcgaacaagatccgggcggaaacagtagataggcgggtgcagcggggcagaacataggttgccttagagaggttccccggtgtcccgacggcggctcaagtcagagttgctgggttttgctcagattggtgtgggaagagcctgcctgtggggagcggccactccatactgctgaggcctcaggactgctgctcagcttgcccgttacctgaagaggcggcggagccgggcccctgaccggtcaccatgtgggccttctcggaattgcccatgccgctgctgatcaatttgatcgtctcgctgctgggatttgtggccacagtcaccctcatcccggccttccggggccacttcattgctgcgcgcctctgtggtcaggacctcaacaaaaccagccgacagcagatcccagaatcccagggagtgatcagcggtgctgttttccttatcatcctcttctgcttcatccctttccccttcctgaactgctttgtgaaggagcagtgtaaggcattcccccaccatgaatttgtggccctgataggtgccctccttgccatctgctgcatgatcttcctgggctttgcggatgatgtactgaatctgcgctggcgccataagctgctgctacctacagctgcctcactacctctcctcatggtctatttcaccaactttggcaacacgaccattgtggtgcccaagcccttccgcccgatacttggcctgcatctggacttgggaatcctgtactatgtctacatggggctgctggcagtgttctgtaccaatgccatcaatatcctagcaggaattaacggcctagaggctggccagtcactagtcatttctgcttccatcattgtcttcaacctggtagagttggaaggtgattgtcgggatgatcatgtcttttccctctacttcatgatacccttttttttcaccactttgggattgctctaccacaactggtacccatcacgggtgtttgtgggagataccttctgttactttgctggcatgacctttgccgtggtgggcatcttgggacacttcagcaagaccatgctactattcttcatgccccaggtgttcaacttcctctactcactgcctcagctcctgcatatcatcccctgccctcgccaccgcatacccagactcaatatcaagacaggcaaactggagatgagctattccaagttcaagaccaagagcctctctttcttgggcacctttattttaaaggtggcagagagcctccagctggtgacagtacaccagagtgagactgaagatggtgaattcactgaatgtaacaacatgaccctcatcaacttgctacttaaagtccttgggcccatacatgagagaaacctcacattgctcctgctgctgctgcagatcctgggcagtgccatcaccttctccattcgatatcagctcgttcgactcttctatgatgtctgagtcccttgatcattgtcctttacctcacagtctctaggattcctgactcaggctgacctctctctctggtcccagactgcctccttgcccaggcctctctcactcttcatactcctccagattttgttctcagcattttcctttctctgtgatcattggcatcctgggcgtttcttgccctctgctgactactgattggattttacctatggctttctgcaacttgctactctctccctctccatcccatctttgcagcctcatagggtgggatacagcagctttttttgcagttatccacactcacatttcagagtcctgactctcaaggaaccactggtttttgggatagaacttgggccagggctaggaacacaggctccacggtgacatgtcatttgattgtaaattaagtgttctgattagtaagaactaagcagggggccacatgctctcaatggagacaataaagtgttgtctttttcttattg

SEQ ID NO: 127873 - DNA, 1817 bp, Homo sapiens
  Payload ID: 5033
  Gene Symbol: DPAGT1
  Gene Name: dolichyl-phosphate (UDP-N-acetylglucosamine) N-acetylglucosaminephosphotransferase 1 (GlcNAc-1-P transferase)
  ENST ID: ENST00000392834
  CDS Start-End: 224-397
agtagataggcgggtgcagcggggcagaacataggttgccttagagaggttccccggtgtcccgacggcggctcaagtcagagttgctgggttttgctcagattggtgtgggaagagcctgcctgtggggagcggccactccatactgctgaggcctcaggactgctgctcagcttgcccgttacctgaagaggcggcggagccgggcccctgaccggtcaccatgtgggccttctcggaattgcccatgccgctgctgatcaatttgatcgtctcgctgctgggatttgtggccacagtcaccctcatcccggccttccggggccacttcattgctgcgcgcctctgtggtcaggacctcaacaaaaccagccgacagcagattttgtggccctgataggtgccctccttgccatctgctgcatgatcttcctgggctttgcggatgatgtactgaatctgcgctggcgccataagctgctgctacctacagctgcctcactacctctcctcatggtctatttcaccaactttggcaacacgaccattgtggtgcccaagcccttccgcccgatacttggcctgcatctggacttgggaatcctgtactatgtctacatggggctgctggcagtgttctgtaccaatgccatcaatatcctagcaggaattaacggcctagaggctggccagtcactagtcatttctgcttccatcattgtcttcaacctggtagagttggaaggtgattgtcgggatgatcatgtcttttccctctacttcatgatacccttttttttcaccactttgggattgctctaccacaactggtacccatcacgggtgtttgtgggagataccttctgttactttgctggcatgacctttgccgtggtgggcatcttgggacacttcagcaagaccatgctactattcttcatgccccaggtgttcaacttcctctactcactgcctcagctcctgcatatcatcccctgccctcgccaccgcatacccagactcaatatcaagacaggcaaactggagatgagctattccaagttcaagaccaagagcctctctttcttgggcacctttattttaaaggtggcagagagcctccagctggtgacagtacaccagagtgagactgaagatggtgaattcactgaatgtaacaacatgaccctcatcaacttgctacttaaagtccttgggcccatacatgagagaaacctcacattgctcctgctgctgctgcagatcctgggcagtgccatcaccttctccattcgatatcagctcgttcgactcttctatgatgtctgagtcccttgatcattgtcctttacctcacagtctctaggattcctgactcaggctgacctctctctctggtcccagactgcctccttgcccaggcctctctcactcttcatactcctccagattttgttctcagcattttcctttctctgtgatcattggcatcctgggcgtttcttgccctctgctgactactgattggattttacctatggctttctgcaacttgctactctctccctctccatcccatctttgcagcctcatagggtgggatacagcagctttttttgcagttatccacactcacatttcagagtcctgactctcaaggaaccactggtttttgggatagaacttgggccagggctaggaacacaggctccacggtgacatgtcatttgattgtaaattaagtgttctgattagtaagaactaagcagggggccacatgctctcaatggagacaataaagtgttgtctttttctta

SEQ ID NO: 127874 - DNA, 3274 bp, Homo sapiens
  Payload ID: 5033
  Gene Symbol: DPAGT1
  Gene Name: dolichyl-phosphate (UDP-N-acetylglucosamine) N-acetylglucosaminephosphotransferase 1 (GlcNAc-1-P transferase)
  Uniprot ID: Q9H3H5
  ENST ID: ENST00000409993
  CDS Start-End: 1553-2779
gtgcatgggtttggaaccagagtaccttgcccacagaaatggaagtctggggacccagttggatttctacaacctccagccttagcggcacccttttctctgatccgggaggggaagagaagccatagggttccccagtttatgcccaccctcgtctggcctcctagcacgagcagtcagtccctcccctggaaggaaaggctgaagggaccacccaagcgcttggtccaactcaccccgtttctgcaggcctgctcgttcagcgctcgcacccaagcccgctgccagttctcccggaaagacttgaaggcgaagagtgacgccaggaggccccggactcctggctcctcggcggcgccagcccgagtcgcccgcagccgcagcagcgagcgccacacgcccagctcccgcagggaacccgcgggttccccggctaaggcgggtcccgggccccggtccccgcgggcccgcgccagccacaagccccgggcatattgcagcagccaggcgaacaccgtgagcagcgaggcggcgaagaggatcagcaaggccgcccagcccacgtcccgctgcccccagcccggatccatgctccgcgcgggctccgatcccggtcccggctggggctcacccgctgccccgggggagcatggcccgggcgggccgcggggaggaggtgggctcccccggggctgggcgcgcggggtcgggggctctccgcggctgagtgcccaggactagtgggtgccacagggcgaggagaggaggtcctcgggggtcgcgatgccggggtctctgtctccgtggtccgggtctctcctagcttggtcagcagtcggacccgttagtcgccggccagtgcccgactcctcccaccgcgcgggccccgccggaccctggaggggactggtctgcagagacgctggggctcgcgggccggcaccggctccgggagggctgcgtgcgcagagctgacactgacaacaccgccggcgccccgcccccacccgcccttaaaggagccgcacccgcgccgggcggggccaggacagcctggcgctccctcgctggaggagggcgggagggctagcagcgagcggaggaggttccggggttgaaaataggcgggatctttgatcacctcgccccatcttgcaatcgcggtgctcccacactcagctcaaggtttcctgcaagaaacaggcgcgtctccacaccctcgtccctcctccccaccccctgcctttcaatagccatcttcctggagccggaggcatcccagattaagggagaggtacgggccctttaagcttgacctatggaggcggacggagctaaaactgacgtggaaccggaatgtgagcggtgtcagacacgtggtacaaggaggcattcatcttggaaccgggcaattggcatttccgctctggattggtgtgggaagagcctgcctgtggggagcggccactccatactgctgaggcctcaggactgctgctcagcttgcccgttacctgaagaggcggcggagccgggcccctgaccggtcaccatgtgggccttctcggaattgcccatgccgctgctgatcaatttgatcgtctcgctgctgggatttgtggccacagtcaccctcatcccggccttccggggccacttcattgctgcgcgcctctgtggtcaggacctcaacaaaaccagccgacagcagatcccagaatcccagggagtgatcagcggtgctgttttccttatcatcctcttctgcttcatccctttccccttcctgaactgctttgtgaaggagcagtgtaaggcattcccccaccatgaatttgtggccctgataggtgccctccttgccatctgctgcatgatcttcctgggctttgcggatgatgtactgaatctgcgctggcgccataagctgctgctacctacagctgcctcactacctctcctcatggtctatttcaccaactttggcaacacgaccattgtggtgcccaagcccttccgcccgatacttggcctgcatctggacttgggaatcctgtactatgtctacatggggctgctggcagtgttctgtaccaatgccatcaatatcctagcaggaattaacggcctagaggctggccagtcactagtcatttctgcttccatcattgtcttcaacctggtagagttggaaggtgattgtcgggatgatcatgtcttttccctctacttcatgatacccttttttttcaccactttgggattgctctaccacaactggtacccatcacgggtgtttgtgggagataccttctgttactttgctggcatgacctttgccgtggtgggcatcttgggacacttcagcaagaccatgctactattcttcatgccccaggtgttcaacttcctctactcactgcctcagctcctgcatatcatcccctgccctcgccaccgcatacccagactcaatatcaagacaggcaaactggagatgagctattccaagttcaagaccaagagcctctctttcttgggcacctttattttaaaggtggcagagagcctccagctggtgacagtacaccagagtgagactgaagatggtgaattcactgaatgtaacaacatgaccctcatcaacttgctacttaaagtccttgggcccatacatgagagaaacctcacattgctcctgctgctgctgcagatcctgggcagtgccatcaccttctccattcgatatcagctcgttcgactcttctatgatgtctgagtcccttgatcattgtcctttacctcacagtctctaggattcctgactcaggctgacctctctctctggtcccagactgcctccttgcccaggcctctctcactcttcatactcctccagattttgttctcagcattttcctttctctgtgatcattggcatcctgggcgtttcttgccctctgctgactactgattggattttacctatggctttctgcaacttgctactctctccctctccatcccatctttgcagcctcatagggtgggatacagcagctttttttgcagttatccacactcacatttcagagtcctgactctcaaggaaccactggtttttgggatagaacttgggccagggctaggaacacaggctccacggtgacatgtcatttgattgtaaattaagtgttctgattagtaagaactaagcagggggccacatgctctcaatggagacaataaagtgttgtctttttcttattgttta

SEQ ID NO: 127875 - DNA, 1638 bp, Homo sapiens
  Payload ID: 5033
  Gene Symbol: DPAGT1
  Gene Name: dolichyl-phosphate (UDP-N-acetylglucosamine) N-acetylglucosaminephosphotransferase 1 (GlcNAc-1-P transferase)
  ENST ID: ENST00000414373
  CDS Start-End: 206-493
gcggggcagaacataggttgccttagagaggttccccggtgtcccgacggcggctcaagtcagagttgctgggttttgctcagattggtgtgggaagagcctgcctgtggggagcggccactccatactgctgaggcctcaggactgctgctcagcttgcccgttacctgaagaggcggcggagccgggcccctgaccggtcaccatgtgggccttctcggaattgcccatgccgctgctgatcaatttgatcgtctcgctgctgggatttgtggccacagtcaccctcatcccggccttccggggccacttcattgctgcgcgcctctgtggtcaggacctcaacaaaaccagccgacagcagatcccagaatcccagggagtgatcagcggtgctgttttccttatcatcctcttctgcttcatccctttccccttcctgaactgctttgtgaaggagcagtgtaaggcattcccccaccatgaagcttgagtcatggacctgcccgagcctcccccagtttgtggccctgataggtgccctccttgccatctgctgcatgatcttcctgggctttgcggatgatgtactgaatctgcgctggcgccataagctgctgctacctacagctgcctcactacctctcctcatggtctatttcaccaactttggcaacacgaccattgtggtgcccaagcccttccgcccgatacttggcctgcatctggacttgggaatcctgtactatgtctacatggggctgctggcagtgttctgtaccaatgccatcaatatcctagcaggaattaacggcctagaggctggccagtcactagtcatttctgcttccatcattgtcttcaacctggtagagttggaaggtgattgtcgggatgatcatgtcttttccctctacttcatgatacccttttttttcaccactttgggattgctctaccacaactggtggcagagagcctccagctggtgacagtacaccagagtgagactgaagatggtgaattcactgaatgtaacaacatgaccctcatcaacttgctacttaaagtccttgggcccatacatgagagaaacctcacattgctcctgctgctgctgcagatcctgggcagtgccatcaccttctccattcgatatcagctcgttcgactcttctatgatgtctgagtcccttgatcattgtcctttacctcacagtctctaggattcctgactcaggctgacctctctctctggtcccagactgcctccttgcccaggcctctctcactcttcatactcctccagattttgttctcagcattttcctttctctgtgatcattggcatcctgggcgtttcttgccctctgctgactactgattggattttacctatggctttctgcaacttgctactctctccctctccatcccatctttgcagcctcatagggtgggatacagcagctttttttgcagttatccacactcacatttcagagtcctgactctcaaggaaccactggtttttgggatagaacttgggccagggctaggaacacaggctccacggtgacatgtcatttgattgtaaattaagtgttctgattagtaagaactaagcagggggccaca

SEQ ID NO: 127876 - DNA, 999 bp, Homo sapiens
  Payload ID: 5033
  Gene Symbol: DPAGT1
  Gene Name: dolichyl-phosphate (UDP-N-acetylglucosamine) N-acetylglucosaminephosphotransferase 1 (GlcNAc-1-P transferase)
  ENST ID: ENST00000442480
  CDS Start-End: 1-681
gcttccgactatgttggcaacaggtttcctgcaagaaacaggcgcgtctccacaccctcgtccctcctccccaccccctgcctttcaatagccatcttcctggagccggaggcatcccagattaagggagagtttgtggccctgataggtgccctccttgccatctgctgcatgatcttcctgggctttgcggatgatgtactgaatctgcgctggcgccataagctgctgctacctacagctgcctcactacctctcctcatggtctatttcaccaactttggcaacacgaccattgtggtgcccaagcccttccgcccgatacttggcctgcatctggacttgggaatcctgtactatgtctacatggggctgctggcagtgttctgtaccaatgccatcaatatcctagcaggaattaacggcctagaggctggccagtcactagtcatttctgcttccatcattgtcttcaacctggtagagttggaaggtgattgtcgggatgatcatgtcttttccctctacttcatgatacccttttttttcaccactttgggattgctctaccacaactggtgttcaacttcctctactcactgcctcagctcctgcatatcatcccctgccctcgccaccgcatacccagactcaatatcaagacaggcaaactggagatgagctattccaagttcaagaccaagagcctctctttcttgggcacctttattttaaaggtggcagagagcctccagctggtgacagtacaccagagtgagactgaagatggtgaattcactgaatgtaacaacatgaccctcatcaacttgctacttaaagtccttgggcccatacatgagagaaacctcacattgctcctgctgctgctgcagatcctgggcagtgccatcaccttctccattcgatatcagctcgttcgactcttctatgatgtctgagtcccttgatcattgtcctttacctcacagtctctaggat

SEQ ID NO: 127877 - DNA, 1161 bp, Homo sapiens
  Payload ID: 5034
  Gene Symbol: DPM1
  Gene Name: dolichyl-phosphate mannosyltransferase polypeptide 1, catalytic subunit
  ENST ID: ENST00000371582
  CDS Start-End: 33-896
attccgcttccggcatctggctcagttccgccatggcctccttggaagtcagtcgtagtcctcgcaggtctcggcgggagctggaagtgcgcagtccacgacagaacaaatattcggtgcttttacctacctacaacgagcgcgagaacctgccgctcatcgtgtggctgctggtgaaaagcttctccgagagtggaatcaactatgaaattataatcatagatgatggaagcccagatggaacaagggatgttgctgaacagttggagaagatctatgggtcagacagaattcttctaagaccacgagagaaaaagttgggactaggaactgcatatattcatggaatgaaacatgccacaggaaactacatcattattatggatgctgatctctcacaccatccaaaatttattcctgaatttattaggaagcaaaaggagggtaattttgatattgtctctggaactcgctacaaaggaaatggaggtgtatatggctgggatttgaaaagaaaaataatcagtgatggagttttgccatgttgcccaggctggtcactcctgggctcaagtgatccagccatcttggcctcctgggattacagccgtggggccaattttttaactcagatcttgctgagaccaggagcatctgatttaacaggaagtttcagattataccgaaaagaagttctagagaaattaatagaaaaatgtgtttctaaaggctacgtcttccagatggagatgattgttcgggcaagacagttgaattatactattggcgaggttccaatatcatttgtggatcgtgtttatggtgaatccaagttgggaggaaatgaaatagtatctttcttgaaaggattattgactctttttgctactacataaaagaaagatactcatttatagttacgttcatttcaggttaaacatgaaagaagcctggttactgatttgtataaaatgtactcttaaagtataaaatataaggtaaggtaaatttcatgcatctttttatgaagaccacctattttatatttcaaattaaataattttaaagttgctggcctaatgagcaatgttctcaattttcgttttcattttgctgtattgagacctataaataaatgtatatttttttttgcataaagta

SEQ ID NO: 127878 - DNA, 1073 bp, Homo sapiens
  Payload ID: 5034
  Gene Symbol: DPM1
  Gene Name: dolichyl-phosphate mannosyltransferase polypeptide 1, catalytic subunit
  ENST ID: ENST00000371584
  CDS Start-End: 1-886
ggcctccttggaagtcagtcgtagtcctcgcaggtctcggcgggagctggaagtgcgcagtccacgacagaacaaatattcggtgcttttacctacctacaacgagcgcgagaacctgccgctcatcgtgtggctgctggtgaaaagcttctccgagagtggaatcaactatgaaattataatcatagatgatggaagcccagatggaacaagggatgttgctgaacagttggagaagatctatgggtcagacagaattcttctaagaccacgagagaaaaagttgggactaggaactgcatatattcatggaatgaaacatgccacaggaaactacatcattattatggatgctgatctctcacaccatccaaaatttattcctgaatttattaggaagcaaaaggagggtaattttgatattgtctctggaactcgctacaaaggaaatggaggtgtatatggctgggatttgaaaagaaaaataatcagtgatggagttttgccatgttgcccaggctggtcactcctgggctcaagtgatccagccatcttggcctcctgggattacaggtgtgagccaccgcgcctagccagccgtggggccaattttttaactcagatcttgctgagaccaggagcatctgatttaacaggaagtttcagattataccgaaaagaagttctagagaaattaatagaaaaatgtgtttctaaaggctacgtcttccagatggagatgattgttcgggcaagacagttgaattatactattggcgaggttccaatatcatttgtggatcgtgtttatggtgaatccaagttgggaggaaatgaaatagtatctttcttgaaaggattattgactctttttgctactacataaaagaaagatactcatttatagttacgttcatttcaggttaaacatgaaagaagcctggttactgatttgtataaaatgtactcttaaagtataaaatataaggtaaggtaaatttcatgcatctttttatgaagaccacctattttatatttcaaattaaataattttaaagttgctggcctaatga

SEQ ID NO: 127879 - DNA, 1075 bp, Homo sapiens
  Payload ID: 5034
  Gene Symbol: DPM1
  Gene Name: dolichyl-phosphate mannosyltransferase polypeptide 1, catalytic subunit
  Uniprot ID: O60762
  ENST ID: ENST00000371588
  CDS Start-End: 28-810
gcttccggcatctggctcagttccgccatggcctccttggaagtcagtcgtagtcctcgcaggtctcggcgggagctggaagtgcgcagtccacgacagaacaaatattcggtgcttttacctacctacaacgagcgcgagaacctgccgctcatcgtgtggctgctggtgaaaagcttctccgagagtggaatcaactatgaaattataatcatagatgatggaagcccagatggaacaagggatgttgctgaacagttggagaagatctatgggtcagacagaattcttctaagaccacgagagaaaaagttgggactaggaactgcatatattcatggaatgaaacatgccacaggaaactacatcattattatggatgctgatctctcacaccatccaaaatttattcctgaatttattaggaagcaaaaggagggtaattttgatattgtctctggaactcgctacaaaggaaatggaggtgtatatggctgggatttgaaaagaaaaataatcagccgtggggccaattttttaactcagatcttgctgagaccaggagcatctgatttaacaggaagtttcagattataccgaaaagaagttctagagaaattaatagaaaaatgtgtttctaaaggctacgtcttccagatggagatgattgttcgggcaagacagttgaattatactattggcgaggttccaatatcatttgtggatcgtgtttatggtgaatccaagttgggaggaaatgaaatagtatctttcttgaaaggattattgactctttttgctactacataaaagaaagatactcatttatagttacgttcatttcaggttaaacatgaaagaagcctggttactgatttgtataaaatgtactcttaaagtataaaatataaggtaaggtaaatttcatgcatctttttatgaagaccacctattttatatttcaaattaaataattttaaagttgctggcctaatgagcaatgttctcaattttcgttttcattttgctgtattgagacctataaataaatgtatatttttttttgcataaagta

SEQ ID NO: 127880 - DNA, 672 bp, Homo sapiens
  Payload ID: 5034
  Gene Symbol: DPM1
  Gene Name: dolichyl-phosphate mannosyltransferase polypeptide 1, catalytic subunit
  ENST ID: ENST00000413082
  CDS Start-End: 10-672
agttccgccatggcctccttggaagtcagtcgtagtcctcgcaggtctcggcgggagctggaagtgcgcagtccacgacagaacaaatattcggtgcttttacctacctacaacgagcgcgagaacctgccgctcatcgtgtggctgctggtgaaaagcttctccgagagtggaatcaactatgaaattataatcatagatgatggaagcccagatggaacaagggatgttgctgaacagttggagaagatctatgggtcagacagaattcttctaagaccacgagagaaaaagttgggactaggaactgcatatattcatggaatgaaacatgccacaggaaactacatcattattatggatgctgatctctcacaccatccaaaatttattcctgaatttattagtgatggagttttgccatgttgcccaggctggtcactcctgggctcaagtgatccagccatcttggcctcctgggattacagccgtggggccaattttttaactcagatcttgctgagaccaggagcatctgatttaacaggaagtttcagattataccgaaaagaagttctagagaaattaatagaaaaatgtgtttctaaaggctacgtcttccagatggagatgattgttcgggcaagacagttgaattatactattggcgag

SEQ ID NO: 127881 - DNA, 1542 bp, Homo sapiens
  Payload ID: 5035
  Gene Symbol: DPM2
  Gene Name: dolichyl-phosphate mannosyltransferase polypeptide 2, regulatory subunit
  Uniprot ID: O94777
  ENST ID: ENST00000314392
  CDS Start-End: 665-919
gtcccggtccgaaacgtgtctgggctgctgcgagagacagtcggtgaaggaagggaggggacatccgaagggtggcccgggaggccgggcgatggtgaggagggcgcctcctctccaccaaatcctccccatccatgcgggctagggacagaccctcccccgcccaccctaggctggaaagtgaacgttctctgcacctctcccacctacagactaagtagggcacccggtttccgtgtcggcttcaccactgactcggaatgggatctacctttctctgagcctcacttttcccatctgaaaaatggaacttccgatcccgcactcccatcccactctggccccgggactctgggatacttagagattggcttttggtggggcggcgacaggactgtggccatgaaggccagggagtctgggtccccaactcggtcccattccctagagagattcgggcagcaaccggccccacaatgctcttgagaactacacttcgccgatatgcaaagaagaggaggcggttcctgctcgtctccgacgaggtgggcccgagcaggcctggggactacgactcccggcgtgctccgcagtccaaagccggaagagcgtggacccggaaccggatgtggcttgcggctcgggtggctgagcgcgcggggaaatggccacggggacagaccaggtggtgggactcggcctcgtcgccgttagcctgatcatcttcacctactacaccgcctgggtgattctcttgccattcatcgacagtcagcatgtcatccacaagtatttcctgccccgagcctatgctgtcgccatcccactggctgcaggcctcctgctgctcctgtttgtgggactgttcatctcctatgtgatgctgaagaccaagagagtgaccaagaaggctcagtgaaggtcccgcagggatgaggctgccagccccttctctgcttcccctccagcacagggaccaagtgggggagcctgcagaacctgtccaggcacagtggctcctcaagcctgcctgtcctgcagagtccccatggcatggagcttacacctgactgactggagccccctccccgactcccacttccagaagctaggagggagggatacctggaagactccggtcacctccttcttgctcagggcctaaaagatgctggtcctcccaacctcactctcagactccctgccaccttttcccctgggttctgccgtcttgcctcacttcccctcctgtcacatgctgacgttggacttagcaggttctaaggccacatgtgtgacctctctgacttctcttcctccaccaaggcagctttccttaccctgacacagccccagaccccacaaagccttctggacctggaaagcctggggaaggactgacagaccccaggaccagccctggggctcagggcagccaccccgggccgctgaccgactgacctctcctcacggaggcccagccccaaagccccagggctggcccgtttgggacagctgaccaataaacactgatggtgtgtt

SEQ ID NO: 127882 - DNA, 738 bp, Homo sapiens
  Payload ID: 5035
  Gene Symbol: DPM2
  Gene Name: dolichyl-phosphate mannosyltransferase polypeptide 2, regulatory subunit
  ENST ID: ENST00000373110
  CDS Start-End: 24-416
cgggtggctgagcgcgcggggaaatggccacggggacagaccaggtggtgggactcggcctcgtcgccgttagcctgatcatcttcacctactacaccgcctgggtgattctcttgccattcatcgacagtcagcatgtcatccacaagtatttcctgccccgagcctatgctgtcgccatcccactggctgcaggcctcctgctgctcctgtttgtgggtaagtcatcacctcctccccttgaccctgggcagggtttcgggaagaccccacctctgaacatgcttccacactttggcggtgctggaagctgcttgccccgaactcacccgtggggttttcctgttcatccttcgaggctgccagtcagtaacctctgggtttcctggtgccccaggctttttggactccaatgacctgtctacctctttcctgccccaaccccatcatcactctgctcacacctcagtcaccctcttgtcaccctggcttctaattcctgcacctctctctctcatggcttcctagggatggggactgtgtctccatcattactgcacatctagaacaggctgtggcactgaggctgtgctcagaaagtcatttggatgagtcagtcaacagccgggtgcctggatgatgggtggatggatgggtgggtgggtgaggtgtaggaggaggtgggtaggtatgtaggtggacagacaagtggttgaccgggtgatcgatagatgggtg

SEQ ID NO: 127883 - DNA, 486 bp, Homo sapiens
  Payload ID: 5036
  Gene Symbol: DPM3
  Gene Name: dolichyl-phosphate mannosyltransferase polypeptide 3
  Uniprot ID: Q9P2X0
  ENST ID: ENST00000341298
  CDS Start-End: 137-415
gaactacaactcccagaaggccgcgcggaagcggaacgtgaaccagggaggacttccggacgccaacatccgggccgcgcggggaaggggagacgtggggtagaggggagcattgcttccttctctcgcagtgaccatgacgaaattagcgcagtggctttggggactagcgatcctgggctccacctgggtggccctgaccacgggagccttgggcctggagctgcccttgtcctgccaggaagtcctgtggccactgcccgcctacttgctggtgtccgccggctgctatgccctgggcactgtgggctatcgtgtggccacttttcatgactgcgaggacgccgcacgcgagctgcagagccagatacaggaggcccgagccgacttagcccgcagggggctgcgcttctgacagcctaaccccattcctgtgcggacagcccttcctcccatttcccattaaagagccagtttattttctaa

SEQ ID NO: 127884 - DNA, 517 bp, Homo sapiens
  Payload ID: 5036
  Gene Symbol: DPM3
  Gene Name: dolichyl-phosphate mannosyltransferase polypeptide 3
  Uniprot ID: Q9P2X0
  ENST ID: ENST00000368399
  CDS Start-End: 78-446
ggcccttccaccttttgtgggcactcaagttcggacctctgggatcggcgattcccctctggccagggctggttttaatgctctccgtgggcgggcttcggttgagtttggtccgcttttcctttctgctcctcaggggagcattgcttccttctctcgcagtgaccatgacgaaattagcgcagtggctttggggactagcgatcctgggctccacctgggtggccctgaccacgggagccttgggcctggagctgcccttgtcctgccaggaagtcctgtggccactgcccgcctacttgctggtgtccgccggctgctatgccctgggcactgtgggctatcgtgtggccacttttcatgactgcgaggacgccgcacgcgagctgcagagccagatacaggaggcccgagccgacttagcccgcagggggctgcgcttctgacagcctaaccccattcctgtgcggacagcccttcctcccatttcccattaaagagccagtttattttctaa

SEQ ID NO: 127885 - DNA, 409 bp, Homo sapiens
  Payload ID: 5036
  Gene Symbol: DPM3
  Gene Name: dolichyl-phosphate mannosyltransferase polypeptide 3
  Uniprot ID: Q9P2X0
  ENST ID: ENST00000368400
  CDS Start-End: 60-338
acttccggacgccaacatccgggccgcgcggggaaggggagacgtggggtagagtgaccatgacgaaattagcgcagtggctttggggactagcgatcctgggctccacctgggtggccctgaccacgggagccttgggcctggagctgcccttgtcctgccaggaagtcctgtggccactgcccgcctacttgctggtgtccgccggctgctatgccctgggcactgtgggctatcgtgtggccacttttcatgactgcgaggacgccgcacgcgagctgcagagccagatacaggaggcccgagccgacttagcccgcagggggctgcgcttctgacagcctaaccccattcctgtgcggacagcccttcctcccatttcccattaaagagccagtttattttctaa

SEQ ID NO: 127886 - DNA, 1938 bp, Homo sapiens
  Payload ID: 5037
  Gene Symbol: DDC
  Gene Name: dopa decarboxylase (aromatic L-amino acid decarboxylase)
  Uniprot ID: P20711
  ENST ID: ENST00000357936
  CDS Start-End: 70-1512
ggagagagagaggacagagagcaagtcactcccggctgcctttttcacctctgacagagcccagacaccatgaacgcaagtgaattccgaaggagagggaaggagatggtggattacatggccaactacatggaaggcattgagggacgccaggtctaccctgacgtggagcccgggtacctgcggccgctgatccctgccgctgcccctcaggagccagacacgtttgaggacatcatcaacgacgttgagaagataatcatgcctggggtgacgcactggcacagcccctacttcttcgcctacttccccactgccagctcgtacccggccatgcttgcggacatgctgtgcggggccattggctgcatcggcttctcctgggcggcaagcccagcatgcacagagctggagactgtgatgatggactggctcgggaagatgctggaactaccaaaggcatttttgaatgagaaagctggagaagggggaggagtgatccagggaagtgccagtgaagccaccctggtggccctgctggccgctcggaccaaagtgatccatcggctgcaggcagcgtccccagagctcacacaggccgctatcatggagaagctggtggcttactcatccgatcaggcacactcctcagtggaaagagctgggttaattggtggagtgaaattaaaagccatcccctcagatggcaacttcgccatgcgtgcgtctgccctgcaggaagccctggagagagacaaagcggctggcctgattcctttctttatggttgccaccctggggaccacaacatgctgctcctttgacaatctcttagaagtcggtcctatctgcaacaaggaagacatatggctgcacgttgatgcagcctacgcaggcagtgcattcatctgccctgagttccggcaccttctgaatggagtggagtttgcagattcattcaactttaatccccacaaatggctattggtgaattttgactgttctgccatgtgggtgaaaaagagaacagacttaacgggagcctttagactggaccccacttacctgaagcacagccatcaggattcagggcttatcactgactaccggcattggcagataccactgggcagaagatttcgctctttgaaaatgtggtttgtatttaggatgtatggagtcaaaggactgcaggcttatatccgcaagcatgtccagctgtcccatgagtttgagtcactggtgcgccaggatccccgctttgaaatctgtgtggaagtcattctggggcttgtctgctttcggctaaagggttccaacaaagtgaatgaagctcttctgcaaagaataaacagtgccaaaaaaatccacttggttccatgtcacctcagggacaagtttgtcctgcgctttgccatctgttctcgcacggtggaatctgcccatgtgcagcgggcctgggaacacatcaaagagctggcggccgacgtgctgcgagcagagagggagtaggagtgaagccagctgcaggaatcaaaaattgaagagagatatatctgaaaactggaataagaagcaaataaatatcatcctgccttcatggaactcagctgtctgtggcttcccatgtctttctccaaagttatccagagggttgtgattttgtctgcttagtatctcatcaacaaagaaatattatttgctaattaaaaagttaatcttcatggccatagcttttattcattagctgtgatttttgttgattaaaacattatagattttcatgttcttgcagtcatcagaagtggtaggaaagcctcactgatatattttccagggcaatcaatgttcacgcaacttgaaattatatctgtggtcttcaaattgtcttttgtcatgtggctaaatgcctaataaacaattcaagtgaaatactaa

SEQ ID NO: 127887 - DNA, 1366 bp, Homo sapiens
  Payload ID: 5037
  Gene Symbol: DDC
  Gene Name: dopa decarboxylase (aromatic L-amino acid decarboxylase)
  Uniprot ID: P20711
  ENST ID: ENST00000380984
  CDS Start-End: 64-1080
agagaggacagagagcaagtcactcccggctgcctttttcacctctgacagagcccagacaccatgaacgcaagtgaattccgaaggagagggaaggagatggtggattacatggccaactacatggaaggcattgagggacgccaggtctaccctgacgtggagcccgggtacctgcggccgctgatccctgccgctgcccctcaggagccagacacgtttgaggacatcatcaacgacgttgagaagataatcatgcctggggtgacgcactggcacagcccctacttcttcgcctacttccccactgccagctcgtacccggccatgcttgcggacatgctgtgcggggccattggctgcatcggcttctcctgggcggcaagcccagcatgcacagagctggagactgtgatgatggactggctcgggaagatgctggaactaccaaaggcatttttgaatgagaaagctggagaagggggaggagtgatccagggaagtgccagtgaagccaccctggtggccctgctggccgctcggaccaaagtgatccatcggctgcaggcagcgtccccagagctcacacaggccgctatcatggagaagctggtggcttactcatccgatcaggcacactcctcagtggaaagagctgggttaattggtggagtgaaattaaaagccatcccctcagatggcaacttcgccatgcgtgcgtctgccctgcaggaagccctggagagagacaaagcggctggcctgattcctttctttatggttgccaccctggggaccacaacatgctgctcctttgacaatctcttagaagtcggtcctatctgcaacaaggaagacatatggctgcacgttgatgcagcctacgcaggcagtgcattcatctgccctgagttccggcaccttctgaatggagtggagtttgcagattcattcaactttaatccccacaaatggctattggtgaattttgactgttctgccatgtggtccagacaaccagtgcgtatgttaaggctgaagaaaacctgcttagtcagtgcggtggtgagaaggagttgagcctttcgggacgtggagtgcctgccgcagagctgatgccccgaggctgccgcagacgctgcagagctgatgccagcaagttggcggctgtgcgctcatctctcccggacaactcttccccggcgctcggggttcagttcagccaccagcctgtgaggggaaatttgacaaagtggaggtgatgtagggaagagacacaggacacacagggatgaggccaggccatttggaaaaggccatttggaaaatttccttgtagaaggaattaaacgtaagccctaagaca

SEQ ID NO: 127888 - DNA, 1470 bp, Homo sapiens
  Payload ID: 5037
  Gene Symbol: DDC
  Gene Name: dopa decarboxylase (aromatic L-amino acid decarboxylase)
  ENST ID: ENST00000430300
  CDS Start-End: 1-1085
ccgggtacctgcggccgctgatccctgccgctgcccctcaggagccagacacgtttgaggacatcatcaacgacgttgagaagataatcatgcctggggtgacgcactggcacagcccctacttcttcgcctacttccccactgccagctcgtacccggccatgcttgcggacatgctgtgcggggccattggctgcatcggcttctcctgggcacactcctcagtggaaagagctgggttaattggtggagtgaaattaaaagccatcccctcagatggcaacttcgccatgcgtgcgtctgccctgcaggaagccctggagagagacaaagcggctggcctgattcctttctttatggttgccaccctggggaccacaacatgctgctcctttgacaatctcttagaagtcggtcctatctgcaacaaggaagacatatggctgcacgttgatgcagcctacgcaggcagtgcattcatctgccctgagttccggcaccttctgaatggagtggagtttgcagattcattcaactttaatccccacaaatggctattggtgaattttgactgttctgccatgtgggtgaaaaagagaacagacttaacgggagcctttagactggaccccacttacctgaagcacagccatcaggattcagggcttatcactgactaccggcattggcagataccactgggcagaagatttcgctctttgaaaatgtggtttgtatttaggatgtatggagtcaaaggactgcaggcttatatccgcaagcatgtccagctgtcccatgagtttgagtcactggtgcgccaggatccccgctttgaaatctgtgtggaagtcattctggggcttgtctgctttcggctaaagggttccaacaaagtgaatgaagctcttctgcaaagaataaacagtgccaaaaaaatccacttggttccatgtcacctcagggacaagtttgtcctgcgctttgccatctgttctcgcacggtggaatctgcccatgtgcagcgggcctgggaacacatcaaagagctggcggccgacgtgctgcgagcagagagggagtaggagtgaagccagctgcaggaatcaaaaattgaagagagatatatctgaaaactggaataagaagcaaataaatatcatcctgccttcatggaactcagctgtctgtggcttcccatgtctttctccaaagttatccagagggttgtgattttgtctgcttagtatctcatcaacaaagaaatattatttgctaattaaaaagttaatcttcatggccatagcttttattcattagctgtgatttttgttgattaaaacattatagattttcatgttcttgcagtcatcagaagtggtaggaaagcctcactgatatattttccagggcaatcaatgttcacgcaacttgaaattatatctgtggtcttcaaattgtcttttgtca

SEQ ID NO: 127889 - DNA, 1725 bp, Homo sapiens
  Payload ID: 5037
  Gene Symbol: DDC
  Gene Name: dopa decarboxylase (aromatic L-amino acid decarboxylase)
  ENST ID: ENST00000444733
  CDS Start-End: 70-759
ggagagagagaggacagagagcaagtcactcccggctgcctttttcacctctgacagagcccagacaccatgaacgcaagtgaattccgaaggagagggaaggagatggtggattacatggccaactacatggaaggcattgagggacgccaggtctaccctgacgtggagcccgggtacctgcggccgctgatccctgccgctgcccctcaggagccagacacgtttgaggacatcatcaacgacgttgagaagataatcatgcctggggcggcaagcccagcatgcacagagctggagactgtgatgatggactggctcgggaagatgctggaactaccaaaggcatttttgaatgagaaagctggagaagggggaggagtgatccagggaagtgccagtgaagccaccctggtggccctgctggccgctcggaccaaagtgatccatcggctgcaggcagcgtccccagagctcacacaggccgctatcatggagaagctggtggcttactcatccgatcaggcacactcctcagtggaaagagctgggttaattggtggagtgaaattaaaagccatcccctcagatggcaacttcgccatgcgtgcgtctgccctgcaggaagccctggagagagacaaagcggctggcctgattcctttctttatggttgccaccctggggaccacaacatgctgctcctttgacaatctcttagaagtcggtcctatcttttgcagattcattcaactttaatccccacaaatggctattggtgaattttgactgttctgccatgtgggtgaaaaagagaacagacttaacgggagcctttagactggaccccacttacctgaagcacagccatcaggattcagggcttatcactgactaccggcattggcagataccactgggcagaagatttcgctctttgaaaatgtggtttgtatttaggatgtatggagtcaaaggactgcaggcttatatccgcaagcatgtccagctgtcccatgagtttgagtcactggtgcgccaggatccccgctttgaaatctgtgtggaagtcattctggggcttgtctgctttcggctaaagggttccaacaaagtgaatgaagctcttctgcaaagaataaacagtgccaaaaaaatccacttggttccatgtcacctcagggacaagtttgtcctgcgctttgccatctgttctcgcacggtggaatctgcccatgtgcagcgggcctgggaacacatcaaagagctggcggccgacgtgctgcgagcagagagggagtaggagtgaagccagctgcaggaatcaaaaattgaagagagatatatctgaaaactggaataagaagcaaataaatatcatcctgccttcatggaactcagctgtctgtggcttcccatgtctttctccaaagttatccagagggttgtgattttgtctgcttagtatctcatcaacaaagaaatattatttgctaattaaaaagttaatcttcatggccatagcttttattcattagctgtgatttttgttgattaaaacattatagattttcatgttcttgcagtcatcagaagtggtaggaaagcctcactgatatattttccagggcaatcaatgttcacgcaacttgaaattatatctgtggtcttcaaattgtcttttgtcatgtggctaaatgcctaataaacaattcaagtgaaata

SEQ ID NO: 127890 - DNA, 1700 bp, Homo sapiens
  Payload ID: 5037
  Gene Symbol: DDC
  Gene Name: dopa decarboxylase (aromatic L-amino acid decarboxylase)
  Uniprot ID: P20711
  ENST ID: ENST00000426377
  CDS Start-End: 70-1278
ggagagagagaggacagagagcaagtcactcccggctgcctttttcacctctgacagagcccagacaccatgaacgcaagtgaattccgaaggagagggaaggagatggtggattacatggccaactacatggaaggcattgagggacgccaggtctaccctgacgtggagcccgggtacctgcggccgctgatccctgccgctgcccctcaggagccagacacgtttgaggacatcatcaacgacgttgagaagataatcatgcctgggggaagtgccagtgaagccaccctggtggccctgctggccgctcggaccaaagtgatccatcggctgcaggcagcgtccccagagctcacacaggccgctatcatggagaagctggtggcttactcatccgatcaggcacactcctcagtggaaagagctgggttaattggtggagtgaaattaaaagccatcccctcagatggcaacttcgccatgcgtgcgtctgccctgcaggaagccctggagagagacaaagcggctggcctgattcctttctttatggttgccaccctggggaccacaacatgctgctcctttgacaatctcttagaagtcggtcctatctgcaacaaggaagacatatggctgcacgttgatgcagcctacgcaggcagtgcattcatctgccctgagttccggcaccttctgaatggagtggagtttgcagattcattcaactttaatccccacaaatggctattggtgaattttgactgttctgccatgtgggtgaaaaagagaacagacttaacgggagcctttagactggaccccacttacctgaagcacagccatcaggattcagggcttatcactgactaccggcattggcagataccactgggcagaagatttcgctctttgaaaatgtggtttgtatttaggatgtatggagtcaaaggactgcaggcttatatccgcaagcatgtccagctgtcccatgagtttgagtcactggtgcgccaggatccccgctttgaaatctgtgtggaagtcattctggggcttgtctgctttcggctaaagggttccaacaaagtgaatgaagctcttctgcaaagaataaacagtgccaaaaaaatccacttggttccatgtcacctcagggacaagtttgtcctgcgctttgccatctgttctcgcacggtggaatctgcccatgtgcagcgggcctgggaacacatcaaagagctggcggccgacgtgctgcgagcagagagggagtaggagtgaagccagctgcaggaatcaaaaattgaagagagatatatctgaaaactggaataagaagcaaataaatatcatcctgccttcatggaactcagctgtctgtggcttcccatgtctttctccaaagttatccagagggttgtgattttgtctgcttagtatctcatcaacaaagaaatattatttgctaattaaaaagttaatcttcatggccatagcttttattcattagctgtgatttttgttgattaaaacattatagattttcatgttcttgcagtcatcagaagtggtaggaaagcctcactgatatattttccagggcaatcaatgttcacgcaacttgaaattatatctgtggtcttcaaattgtcttttgtcatgtggctaaatgcctaataaacaattcaagtgaaata

SEQ ID NO: 127891 - DNA, 1620 bp, Homo sapiens
  Payload ID: 5037
  Gene Symbol: DDC
  Gene Name: dopa decarboxylase (aromatic L-amino acid decarboxylase)
  Uniprot ID: P20711
  ENST ID: ENST00000431062
  CDS Start-End: 35-1198
ctgcagttttcacctctgacagagcccagacaccatgaacgcaagtgaattccgaaggagagggaaggagatggtggattacatggccaactacatggaaggcattgagggacgccaggtctaccctgacgtggagcccgggtacctgcggccgctgatccctgccgctgcccctcaggagccagacacgtttgaggacatcatcaacgacgttgagaagataatcatgcctggggtgacgcactggcacagcccctacttcttcgcctacttccccactgccagctcgtacccggccatgcttgcggacatgctgtgcggggccattggctgcatcggcttctcctgggcggcaagcccagcatgcacagagctggagactgtgatgatggactggctcgggaagatgctggaactaccaaaggcatttttgaatgagaaagctggagaagggggaggagtgatccagatggttgccaccctggggaccacaacatgctgctcctttgacaatctcttagaagtcggtcctatctgcaacaaggaagacatatggctgcacgttgatgcagcctacgcaggcagtgcattcatctgccctgagttccggcaccttctgaatggagtggagtttgcagattcattcaactttaatccccacaaatggctattggtgaattttgactgttctgccatgtgggtgaaaaagagaacagacttaacgggagcctttagactggaccccacttacctgaagcacagccatcaggattcagggcttatcactgactaccggcattggcagataccactgggcagaagatttcgctctttgaaaatgtggtttgtatttaggatgtatggagtcaaaggactgcaggcttatatccgcaagcatgtccagctgtcccatgagtttgagtcactggtgcgccaggatccccgctttgaaatctgtgtggaagtcattctggggcttgtctgctttcggctaaagggttccaacaaagtgaatgaagctcttctgcaaagaataaacagtgccaaaaaaatccacttggttccatgtcacctcagggacaagtttgtcctgcgctttgccatctgttctcgcacggtggaatctgcccatgtgcagcgggcctgggaacacatcaaagagctggcggccgacgtgctgcgagcagagagggagtaggagtgaagccagctgcaggaatcaaaaattgaagagagatatatctgaaaactggaataagaagcaaataaatatcatcctgccttcatggaactcagctgtctgtggcttcccatgtctttctccaaagttatccagagggttgtgattttgtctgcttagtatctcatcaacaaagaaatattatttgctaattaaaaagttaatcttcatggccatagcttttattcattagctgtgatttttgttgattaaaacattatagattttcatgttcttgcagtcatcagaagtggtaggaaagcctcactgatatattttccagggcaatcaatgttcacgcaacttgaaattatatctgtggtcttcaaattgtcttttgtcatgtggctaaatgcctaataaacaattcaagtgaaata

SEQ ID NO: 127892 - DNA, 2041 bp, Homo sapiens
  Payload ID: 5037
  Gene Symbol: DDC
  Gene Name: dopa decarboxylase (aromatic L-amino acid decarboxylase)
  Uniprot ID: P20711
  ENST ID: ENST00000444124
  CDS Start-End: 202-1644
ggcacatgtggctggaaatgcaagaagagggaaacgtgtggcttggagtttcaagaagagtgactgtctcagtgccgagtgcctcagcagcttctccacatgctcttcagtccccaaagttggagaatcccatcaaggagagtagccctgtaaggaattcgaatttccagcatttttcacctctgacagagcccagacaccatgaacgcaagtgaattccgaaggagagggaaggagatggtggattacatggccaactacatggaaggcattgagggacgccaggtctaccctgacgtggagcccgggtacctgcggccgctgatccctgccgctgcccctcaggagccagacacgtttgaggacatcatcaacgacgttgagaagataatcatgcctggggtgacgcactggcacagcccctacttcttcgcctacttccccactgccagctcgtacccggccatgcttgcggacatgctgtgcggggccattggctgcatcggcttctcctgggcggcaagcccagcatgcacagagctggagactgtgatgatggactggctcgggaagatgctggaactaccaaaggcatttttgaatgagaaagctggagaagggggaggagtgatccagggaagtgccagtgaagccaccctggtggccctgctggccgctcggaccaaagtgatccatcggctgcaggcagcgtccccagagctcacacaggccgctatcatggagaagctggtggcttactcatccgatcaggcacactcctcagtggaaagagctgggttaattggtggagtgaaattaaaagccatcccctcagatggcaacttcgccatgcgtgcgtctgccctgcaggaagccctggagagagacaaagcggctggcctgattcctttctttatggttgccaccctggggaccacaacatgctgctcctttgacaatctcttagaagtcggtcctatctgcaacaaggaagacatatggctgcacgttgatgcagcctacgcaggcagtgcattcatctgccctgagttccggcaccttctgaatggagtggagtttgcagattcattcaactttaatccccacaaatggctattggtgaattttgactgttctgccatgtgggtgaaaaagagaacagacttaacgggagcctttagactggaccccacttacctgaagcacagccatcaggattcagggcttatcactgactaccggcattggcagataccactgggcagaagatttcgctctttgaaaatgtggtttgtatttaggatgtatggagtcaaaggactgcaggcttatatccgcaagcatgtccagctgtcccatgagtttgagtcactggtgcgccaggatccccgctttgaaatctgtgtggaagtcattctggggcttgtctgctttcggctaaagggttccaacaaagtgaatgaagctcttctgcaaagaataaacagtgccaaaaaaatccacttggttccatgtcacctcagggacaagtttgtcctgcgctttgccatctgttctcgcacggtggaatctgcccatgtgcagcgggcctgggaacacatcaaagagctggcggccgacgtgctgcgagcagagagggagtaggagtgaagccagctgcaggaatcaaaaattgaagagagatatatctgaaaactggaataagaagcaaataaatatcatcctgccttcatggaactcagctgtctgtggcttcccatgtctttctccaaagttatccagagggttgtgattttgtctgcttagtatctcatcaacaaagaaatattatttgctaattaaaaagttaatcttcatggccatagcttttattcattagctgtgatttttgttgattaaaacattatagattttcatgttcttgcagtcatcagaagtggtaggaaagcctcactgatatattttccagggcaatcaatgttcacgcaacttgaaattatatctgtggtcttcaaattgtcttttgtcatgtggctaaatg

SEQ ID NO: 127893 - DNA, 460 bp, Homo sapiens
  Payload ID: 5037
  Gene Symbol: DDC
  Gene Name: dopa decarboxylase (aromatic L-amino acid decarboxylase)
  ENST ID: ENST00000420203
  CDS Start-End: 369-460
gcaatccagtgtgtaggtccagggcgacaagcgctgctcccatggctggggtaagtccctccagcattcagccttgctccctgtgcttatctggatgcggtgtaggatgaagatgaccctatagaactctaccctggaagtcctggcaaagtggatatgtgacatttttgaaaccagggacatgttggtgctgcttaatatttaaatcataattttcagactcttaaaaattactaaataagtttgaagagacacagccatctgcctacagtgccacccctgagcttcacgccaccctggtctccaggaaaggggagagtctcaggaatattgaatgcagttttcacctctgacagagcccagacaccatgaacgcaagtgaattccgaaggagagggaaggagatggtggattacatggccaactacatggaaggcattgagggacgccaggtctaccc

SEQ ID NO: 127894 - DNA, 1809 bp, Homo sapiens
  Payload ID: 5037
  Gene Symbol: DDC
  Gene Name: dopa decarboxylase (aromatic L-amino acid decarboxylase)
  ENST ID: ENST00000617822
  CDS Start-End: 87-1385
aactgtcactgtggagaggagagagagaggacagagagcaagtcactcccggctgcctttttcacctctgacagagcccagacaccatgaacgcaagtgaattccgaaggagagggaaggagatggtggattacatggccaactacatggaaggcattgagggacgccaggtctaccctgacgtggagcccgggtacctgcggccgctgatccctgccgctgcccctcaggagccagacacgtttgaggacatcatcaacgacgttgagaagataatcatgcctggggtgacgcactggcacagcccctacttcttcgcctacttccccactgccagctcgtacccggccatgcttgcggacatgctgtgcggggccattggctgcatcggcttctcctgggcggcaagcccagcatgcacagagctggagactgtgatgatggactggctcgggaagatgctggaactaccaaaggcatttttgaatgagaaagctggagaagggggaggagtgatccagggaagtgccagtgaagccaccctggtggccctgctggccgctcggaccaaagtgatccatcggctgcaggcagcgtccccagagctcacacaggccgctatcatggagaagctggtggcttactcatccgatcagatggttgccaccctggggaccacaacatgctgctcctttgacaatctcttagaagtcggtcctatctgcaacaaggaagacatatggctgcacgttgatgcagcctacgcaggcagtgcattcatctgccctgagttccggcaccttctgaatggagtggagtttgcagattcattcaactttaatccccacaaatggctattggtgaattttgactgttctgccatgtgggtgaaaaagagaacagacttaacgggagcctttagactggaccccacttacctgaagcacagccatcaggattcagggcttatcactgactaccggcattggcagataccactgggcagaagatttcgctctttgaaaatgtggtttgtatttaggatgtatggagtcaaaggactgcaggcttatatccgcaagcatgtccagctgtcccatgagtttgagtcactggtgcgccaggatccccgctttgaaatctgtgtggaagtcattctggggcttgtctgctttcggctaaagggttccaacaaagtgaatgaagctcttctgcaaagaataaacagtgccaaaaaaatccacttggttccatgtcacctcagggacaagtttgtcctgcgctttgccatctgttctcgcacggtggaatctgcccatgtgcagcgggcctgggaacacatcaaagagctggcggccgacgtgctgcgagcagagagggagtaggagtgaagccagctgcaggaatcaaaaattgaagagagatatatctgaaaactggaataagaagcaaataaatatcatcctgccttcatggaactcagctgtctgtggcttcccatgtctttctccaaagttatccagagggttgtgattttgtctgcttagtatctcatcaacaaagaaatattatttgctaattaaaaagttaatcttcatggccatagcttttattcattagctgtgatttttgttgattaaaacattatagattttcatgttcttgcagtcatcagaagtggtaggaaagcctcactgatatattttccagggcaatcaatgttcacgcaacttgaaattatatctgtggtcttcaaattgtcttttgtcatgtggctaaatgcctaataaacaattcaagtgaaatact

SEQ ID NO: 127895 - DNA, 1839 bp, Homo sapiens
  Payload ID: 5037
  Gene Symbol: DDC
  Gene Name: dopa decarboxylase (aromatic L-amino acid decarboxylase)
  ENST ID: ENST00000622873
  CDS Start-End: 87-1415
aactgtcactgtggagaggagagagagaggacagagagcaagtcactcccggctgcctttttcacctctgacagagcccagacaccatgaacgcaagtgaattccgaaggagagggaaggagatggtggattacatggccaactacatggaaggcattgagggacgccaggtctaccctgacgtggagcccgggtacctgcggccgctgatccctgccgctgcccctcaggagccagacacgtttgaggacatcatcaacgacgttgagaagataatcatgcctggggcggcaagcccagcatgcacagagctggagactgtgatgatggactggctcgggaagatgctggaactaccaaaggcatttttgaatgagaaagctggagaagggggaggagtgatccagggaagtgccagtgaagccaccctggtggccctgctggccgctcggaccaaagtgatccatcggctgcaggcagcgtccccagagctcacacaggccgctatcatggagaagctggtggcttactcatccgatcaggcacactcctcagtggaaagagctgggttaattggtggagtgaaattaaaagccatcccctcagatggcaacttcgccatgcgtgcgtctgccctgcaggaagccctggagagagacaaagcggctggcctgattcctttctttatggttgccaccctggggaccacaacatgctgctcctttgacaatctcttagaagtcggtcctatctgcaacaaggaagacatatggctgcacgttgatgcagcctacgcaggcagtgcattcatctgccctgagttccggcaccttctgaatggagtggagtttgcagattcattcaactttaatccccacaaatggctattggtgaattttgactgttctgccatgtgggtgaaaaagagaacagacttaacgggagcctttagactggaccccacttacctgaagcacagccatcaggattcagggcttatcactgactaccggcattggcagataccactgggcagaagatttcgctctttgaaaatgtggtttgtatttaggatgtatggagtcaaaggactgcaggcttatatccgcaagcatgtccagctgtcccatgagtttgagtcactggtgcgccaggatccccgctttgaaatctgtgtggaagtcattctggggcttgtctgctttcggctaaagggttccaacaaagtgaatgaagctcttctgcaaagaataaacagtgccaaaaaaatccacttggttccatgtcacctcagggacaagtttgtcctgcgctttgccatctgttctcgcacggtggaatctgcccatgtgcagcgggcctgggaacacatcaaagagctggcggccgacgtgctgcgagcagagagggagtaggagtgaagccagctgcaggaatcaaaaattgaagagagatatatctgaaaactggaataagaagcaaataaatatcatcctgccttcatggaactcagctgtctgtggcttcccatgtctttctccaaagttatccagagggttgtgattttgtctgcttagtatctcatcaacaaagaaatattatttgctaattaaaaagttaatcttcatggccatagcttttattcattagctgtgatttttgttgattaaaacattatagattttcatgttcttgcagtcatcagaagtggtaggaaagcctcactgatatattttccagggcaatcaatgttcacgcaacttgaaattatatctgtggtcttcaaattgtcttttgtcatgtggctaaatgcctaataaacaattcaagtgaaatact

SEQ ID NO: 127896 - DNA, 1674 bp, Homo sapiens
  Payload ID: 5037
  Gene Symbol: DDC
  Gene Name: dopa decarboxylase (aromatic L-amino acid decarboxylase)
  Uniprot ID: P20711
  ENST ID: ENST00000615193
  CDS Start-End: 87-1250
aactgtcactgtggagaggagagagagaggacagagagcaagtcactcccggctgcctttttcacctctgacagagcccagacaccatgaacgcaagtgaattccgaaggagagggaaggagatggtggattacatggccaactacatggaaggcattgagggacgccaggtctaccctgacgtggagcccgggtacctgcggccgctgatccctgccgctgcccctcaggagccagacacgtttgaggacatcatcaacgacgttgagaagataatcatgcctggggtgacgcactggcacagcccctacttcttcgcctacttccccactgccagctcgtacccggccatgcttgcggacatgctgtgcggggccattggctgcatcggcttctcctgggcggcaagcccagcatgcacagagctggagactgtgatgatggactggctcgggaagatgctggaactaccaaaggcatttttgaatgagaaagctggagaagggggaggagtgatccagatggttgccaccctggggaccacaacatgctgctcctttgacaatctcttagaagtcggtcctatctgcaacaaggaagacatatggctgcacgttgatgcagcctacgcaggcagtgcattcatctgccctgagttccggcaccttctgaatggagtggagtttgcagattcattcaactttaatccccacaaatggctattggtgaattttgactgttctgccatgtgggtgaaaaagagaacagacttaacgggagcctttagactggaccccacttacctgaagcacagccatcaggattcagggcttatcactgactaccggcattggcagataccactgggcagaagatttcgctctttgaaaatgtggtttgtatttaggatgtatggagtcaaaggactgcaggcttatatccgcaagcatgtccagctgtcccatgagtttgagtcactggtgcgccaggatccccgctttgaaatctgtgtggaagtcattctggggcttgtctgctttcggctaaagggttccaacaaagtgaatgaagctcttctgcaaagaataaacagtgccaaaaaaatccacttggttccatgtcacctcagggacaagtttgtcctgcgctttgccatctgttctcgcacggtggaatctgcccatgtgcagcgggcctgggaacacatcaaagagctggcggccgacgtgctgcgagcagagagggagtaggagtgaagccagctgcaggaatcaaaaattgaagagagatatatctgaaaactggaataagaagcaaataaatatcatcctgccttcatggaactcagctgtctgtggcttcccatgtctttctccaaagttatccagagggttgtgattttgtctgcttagtatctcatcaacaaagaaatattatttgctaattaaaaagttaatcttcatggccatagcttttattcattagctgtgatttttgttgattaaaacattatagattttcatgttcttgcagtcatcagaagtggtaggaaagcctcactgatatattttccagggcaatcaatgttcacgcaacttgaaattatatctgtggtcttcaaattgtcttttgtcatgtggctaaatgcctaataaacaattcaagtgaaatact

SEQ ID NO: 127897 - DNA, 5064 bp, Homo sapiens
  Payload ID: 5038
  Gene Symbol: DCT
  Gene Name: dopachrome tautomerase
  Uniprot ID: P40126
  ENST ID: ENST00000377028
  CDS Start-End: 415-1974
gcaattaaagtcaagagctaaggagggagggagagggtttagaaataccagcataataagtagtatgactgggtgctctgtaaattaactcaattagacaaagcctgacttaacgggggaagatggtgagaagcgctaccctcattaaatttggttgttagaggcgcttctaaggaaattaagtctgttagttgtttgaatcacataaaattgtgtgtgcacgttcatgtacacatgtgcacacatgtaacctctgtgattcttgtgggtatttttttaagaagaaaggaatagaaagcaaagaaaaataaaaaatactgaaaagaaaagactgaaagagtagaagataaggagaaaagtacgacagagacaaggaaagtaagagagagagagagctctcccaattataaagccatgagccccctttggtgggggtttctgctcagttgcttgggctgcaaaatcctgccaggagcccagggtcagttcccccgagtctgcatgacggtggacagcctagtgaacaaggagtgctgcccacgcctgggtgcagagtcggccaatgtctgtggctctcagcaaggccgggggcagtgcacagaggtgcgagccgacacaaggccctggagtggtccctacatcctacgaaaccaggatgaccgtgagctgtggccaagaaaattcttccaccggacctgcaagtgcacaggaaactttgccggctataattgtggagactgcaagtttggctggaccggtcccaactgcgagcggaagaaaccaccagtgattcggcagaacatccattccttgagtcctcaggaaagagagcagttcttgggcgccttagatctcgcgaagaagagagtacaccccgactacgtgatcaccacacaacactggctgggcctgcttgggcccaatggaacccagccgcagtttgccaactgcagtgtttatgatttttttgtgtggctccattattattctgttagagatacattattaggaccaggacgcccctacagggccatagatttctcacatcaaggacctgcatttgttacctggcaccggtaccatttgttgtgtctggaaagagatctccagcgactcattggcaatgagtcttttgctttgccctactggaactttgccactgggaggaacgagtgtgatgtgtgtacagaccagctgtttggggcagcgagaccagacgatccgactctgattagtcggaactcaagattctccagctgggaaactgtctgtgatagcttggatgactacaaccacctggtcaccttgtgcaatggaacctatgaaggtttgctgagaagaaatcaaatgggaagaaacagcatgaaattgccaaccttaaaagacatacgagattgcctgtctctccagaagtttgacaatcctcccttcttccagaactctaccttcagtttcaggaatgctttggaagggtttgataaagcagatgggactctggattctcaagtgatgagccttcataatttggttcattccttcctgaacgggacaaacgctttgccacattcagccgccaatgatcccatttttgtggttcttcattcctttactgatgccatctttgatgagtggatgaaaagatttaatcctcctgcagatgcctggcctcaggagctggcccctattggtcacaatcggatgtacaacatggttcctttcttccctccagtgactaatgaagaactctttttaacctcagaccaacttggctacagctatgccatcgatctgccagtttcagttgaagaaactccaggttggcccacaactctcttagtagtcatgggaacactggtggctttggttggtctttttgtgctgttggcttttcttcaatatagaagacttcgaaaaggatatacacccctaatggagacacatttaagcagcaagagatacacagaagaagcctagggtgctcatgccttacctaagagaagaggctggccaagccacagttctgacgctgacaataaaggaactaatcctcactgttccttcttgagttgaagatctttgacataggttcttctatagtgatgatgatctcattcagaagatgcttagctgtagtttccgctttgcttgcttgtttaacaaacccaactaaagtgcttgaggctacctctaccttcaaataaagatagacctgacaatttgtgatatctaataataaccccccccccaatattgattaagcctcctccttttctgaaagcatttaaaaaaaaacaaaaaaaatcccaaaacattgatccaggggagtcatttaaatttgcaggtcagtgcaatgtgagacctggccaagaccatacatcaatctttcttagccccagtgtctttattggtaatgccatggaggtgggagttggtaggtgctagatgagtctccaagatcccttttagctataaacatctctgcttctaggcaccctcctgattatcttccttgggcttctttttcttcttttctctatatttttcctctccagcttagaagatgagaataagccttgttttctttacaggatggaaaatgactaaatgaaggatcaattccactctattgtgtaaactagattttacggattttacttaaaatctgcagttttaaacagtagacctatattacaggattcaatagctggatacacattgattctatagtgataaatagagaagataataaaattatagagtttcctggttagttgatatgctactgtaaacctattaacaaatacagaattactctttccaaggaaggctgactgaaggctggtgaggctgtaaacctgaacatgagacaatttgacttgagtcccattactctgaggtctctttggctgatcctctaccaatttctttactaggtagcctcagatgaaaaattattcccacataatgcactgggcttatttttaagcattgatgttagattgattaatgttgccgaatactcacagttacttatgaatgctgatcaattaagtcttatcatttgaaagcaaaccatctgtacaaaacatgacaattcagaattaagtggttatattctgctatgcaatcatcagatcatgaggaataagaatgagacaatctttactacgatgttcagacttatcatgatggaccccacttcagagaagttaatggctcttgagatttccaggcaaatttcatctgctcatatctggtttctgtgcatcaggagtgagactgaagttctagggcgtggcttgtctgtcgaggcccctctctactggaatgaatgaatgtaaagaatgggtgttaagaggtccctggagctgccttcaacataaggggtcctagagggtgcaagactcatcaagaaccagtttaccccatgcaaaaggactgctaaagccagagaaatggacaaagcccagttggaactgaatttgaatctcataaagctacaggtgcatctgagagcaggctcagtggtgaagatcaagatagcccggtaaagccctgcttgggctttttagcctcagccacatggatacctctcagttcctgccattaacaatattcatggaaaatacagcactgtgtctttcacatgctccactctggaaggtttatgctctgagctcaggatagttggggaacacatttttaaatcttggttttaaacaaaaagagaaatttattaaaatggagatataattgtgcatggtacatatatttctgaaaagttatgtataaatcaattatgttaaaagcgccagaagttactttttataagtgaactattacgaataatttcataaagcaaataaccacctctagcttatctgtcaggtatatcagaattctcatatatcatagtctcataagacttggttaaagcagatctatcttaggtaggaaaaaatagtaatcgattatacttagctgcttttatctgtagtgtgggtgactttttataactattatgttttataatgtcttcctgagagaatttcctaattttgtagttcatataagagaaatacaattttctagcattttctgaccttacaataaatcaattatgaatgcattttaacaaatattaaggtaggataaaccaacagaataaaaagttggtatttacttacattgaatatcatgcaaataaactcagaaaatgtcaccaaatactgtgggctatatttctcaatgatagggggaagaattcaaccttggagaaaatgaccagatcactttactgcttatatcttcagtattagaaaaactgcatgtatgattttaatagaaatgctttttataaagctaacattcagaaatgggataaaatgcaataacatctttcctttgtgcattaaattcccttctaattctaaaattgacatttgtatcttgcttaggatttaacattgttaattataatacttttaatgactagttttaatctcattattaagaagtagaaaacttactaaaaaggaaactaaaaataaatgttgttttgcagattattgtttgtcttttgaggattattgttttttaagtagtgtgcatcaattcccatcttttgggcactcagcatgtatattgaaatatatatacatgtaaaatatataataacaacctcagtctgaaaaataatctcttaaactgatatgctattttctggtgagtttccaaacaattgctattttctgaatctgtttgaacaggtaggaaaaggagagccagcctttcctcaggtgaagttacttttgatattccccacagtttagtgactaatcctggggtggaagcaggtggctgcttcaagtgactgaccagggaagagaggtcctgcagtagctaacttggtgatctcccagataagccttcaagatgggtcaatttgttggagactctaaggttgaagctcttcctatttctatagtgccttacttatcctgagtattttataaatattctttgaatgaataagtgaatgaataaactaatttcaaagtagaa

SEQ ID NO: 127898 - DNA, 2395 bp, Homo sapiens
  Payload ID: 5038
  Gene Symbol: DCT
  Gene Name: dopachrome tautomerase
  Uniprot ID: P40126
  ENST ID: ENST00000446125
  CDS Start-End: 428-2086
aactgagttcaaggcaattaaagtcaagagctaaggagggagggagagggtttagaaataccagcataataagtagtatgactgggtgctctgtaaattaactcaattagacaaagcctgacttaacgggggaagatggtgagaagcgctaccctcattaaatttggttgttagaggcgcttctaaggaaattaagtctgttagttgtttgaatcacataaaattgtgtgtgcacgttcatgtacacatgtgcacacatgtaacctctgtgattcttgtgggtatttttttaagaagaaaggaatagaaagcaaagaaaaataaaaaatactgaaaagaaaagactgaaagagtagaagataaggagaaaagtacgacagagacaaggaaagtaagagagagagagagctctcccaattataaagccatgagccccctttggtgggggtttctgctcagttgcttgggctgcaaaatcctgccaggagcccagggtcagttcccccgagtctgcatgacggtggacagcctagtgaacaaggagtgctgcccacgcctgggtgcagagtcggccaatgtctgtggctctcagcaaggccgggggcagtgcacagaggtgcgagccgacacaaggccctggagtggtccctacatcctacgaaaccaggatgaccgtgagctgtggccaagaaaattcttccaccggacctgcaagtgcacaggaaactttgccggctataattgtggagactgcaagtttggctggaccggtcccaactgcgagcggaagaaaccaccagtgattcggcagaacatccattccttgagtcctcaggaaagagagcagttcttgggcgccttagatctcgcgaagaagagagtacaccccgactacgtgatcaccacacaacactggctgggcctgcttgggcccaatggaacccagccgcagtttgccaactgcagtgtttatgatttttttgtgtggctccattattattctgttagagatacattattaggaccaggacgcccctacagggccatagatttctcacatcaaggacctgcatttgttacctggcaccggtaccatttgttgtgtctggaaagagatctccagcgactcattggcaatgagtcttttgctttgccctactggaactttgccactgggaggaacgagtgtgatgtgtgtacagaccagctgtttggggcagcgagaccagacgatccgactctgattagtcggaactcaagattctccagctgggaaactgtctgtgatagcttggatgactacaaccacctggtcaccttgtgcaatggaacctatgaaggtttgctgagaagaaatcaaatgggaagaaacagcatgaaattgccaaccttaaaagacatacgagattgcctgtctctccagaagtttgacaatcctcccttcttccagaactctaccttcagtttcaggaatgctttggaagggtttgataaagcagatgggactctggattctcaagtgatgagccttcataatttggttcattccttcctgaacgggacaaacgctttgccacattcagccgccaatgatcccatttttgtggtgatttctaatcgtttgctttacaatgctacaacaaacatccttgaacatgtaagaaaagagaaagcgaccaaggaactcccttccctgcatgtgctggttcttcattcctttactgatgccatctttgatgagtggatgaaaagatttaatcctcctgcagatgcctggcctcaggagctggcccctattggtcacaatcggatgtacaacatggttcctttcttccctccagtgactaatgaagaactctttttaacctcagaccaacttggctacagctatgccatcgatctgccagtttcagttgaagaaactccaggttggcccacaactctcttagtagtcatgggaacactggtggctttggttggtctttttgtgctgttggcttttcttcaatatagaagacttcgaaaaggatatacacccctaatggagacacatttaagcagcaagagatacacagaagaagcctagggtgctcatgccttacctaagagaagaggctggccaagccacagttctgacgctgacaataaaggaactaatcctcactgttccttcttgagttgaagatctttgacataggttcttctatagtgatgatgatctcattcagaagatgcttagctgtagtttccgctttgcttgcttgtttaacaaacccaactaaagtgcttgaggctacctctaccttcaaataaagatagacctgacaatttgtgatatctaataataaccccccccccaatattgattaagcctcctccttttctgaaagcattt

SEQ ID NO: 127899 - DNA, 1548 bp, Homo sapiens
  Payload ID: 5038
  Gene Symbol: DCT
  Gene Name: dopachrome tautomerase
  ENST ID: ENST00000483392
  CDS Start-End: 1-702
tattctgttagagatacattattaggaccaggacgcccctacagggccatagatttctcacatcaaggacctgcatttgttacctggcaccggtaccatttgttgtgtctggaaagagatctccagcgactcattggcaatgagtcttttgctttgccctactggaactttgccactgggaggaacgagtgtgatgtgtgtacagaccagctgtttggggcagcgagaccagacgatccgactctgattagtcggaactcaagattctccagctgggaaactgtctgtgatagcttggatgactacaaccacctggtcaccttgtgcaatggaacctatgaaggtttgctgagaagaaatcaaatgggaagaaacagcatgaaattgccaaccttaaaagacatacgagattgcctgtctctccagaagtttgacaatcctcccttcttccagaactctaccttcagtttcaggaatgctttggaagggtttgataaagcagatgggactctggattctcaagtgatgagccttcataatttggttcattccttcctgaacgggacaaacgctttgccacattcagccgccaatgatcccatttttgtgaaaagagaaagcgaccaaggaactcccttccctgcatgtgctggtaaccatgagcctgggaggctctactcagactttcttttgctggcataacagcaagaattcaagtgagagtttatgaaatgagtagacagaagagtattcctggttcttcattcctttactgatgccatctttgatgagtggatgaaaagatttaatcctcctgcagatgcctggcctcaggagctggcccctattggtcacaatcggatgtacaacatggttcctttcttccctccagtgactaatgaagaactctttttaacctcagaccaacttggctacagctatgccatcgatctgccagtttcagttgaagaaactccaggttggcccacaactctcttagtagtcatgggaacactggtggctttggttggtctttttgtgctgttggcttttcttcaatatagaagacttcgaaaaggatatacacccctaatggagacacatttaagcagcaagagatacacagaagaagcctagggtgctcatgccttacctaagagaagaggctggccaagccacagttctgacgctgacaataaaggaactaatcctcactgttccttcttgagttgaagatctttgacataggttcttctatagtgatgatgatctcattcagaagatgcttagctgtagtttccgctttgcttgcttgtttaacaaacccaactaaagtgcttgaggctacctctaccttcaaataaagatagacctgacaatttgtgatatctaataataaccccccccccaatattgattaagcctcctccttttctgaaagcatttaaaaaaaaacaaaaaaaatcccaaaacattgatccaggggagtcatttaaatttgcaggtcagtgcaatgtgagacctggccaagaccatacatcaatcttt

SEQ ID NO: 127900 - DNA, 769 bp, Homo sapiens
  Payload ID: 5039
  Gene Symbol: DBH
  Gene Name: dopamine beta-hydroxylase (dopamine beta-monooxygenase)
  ENST ID: ENST00000263611
  CDS Start-End: 37-769
gccctcagtcgctgggccagcctgcccggccccagcatgcgggaggcagccttcatgtacagcacagcagtggccatcttcctggtcatcctggtggccgcactgcagggctcggctccccgtgagagccccctcccctatcacatccccctggacccggaggggtccctggagctctcatggaatgtcagctacacccaggaggccatccatttccagctcctggtgcggaggctcaaggctggcgtcctgtttgggatgtccgaccgtggcgagcttgagaacgcagatctcgtggtgctctggaccgatggggacactgcctattttgcggacggcactgtccacttggtctacgggatcctggaggagccgttccggtcactggaggccatcaacggctcgggcctgcagatggggctgcagagggtgcagctcctgaagcccaatatccccgaaccggagttgccctcagacgcgtgcaccatggaggtccaagctcccaatatccagatccccagccaggagaccacgtactggtgctacattaaggagcttccaaagggcttctctcggcaccacattatcaagtacgagcccatcgtcaccaagggcaatgaggcccttgtccaccacatggaagtcttccagtgcgcccccgagatggacagcgtcccccacttcagcgggccctgcgactccaagatgaaacccgaccgcctcaactactgccgccacgtgctggccgcctgggccctgggtgccaagg

SEQ ID NO: 127901 - DNA, 2763 bp, Homo sapiens
  Payload ID: 5039
  Gene Symbol: DBH
  Gene Name: dopamine beta-hydroxylase (dopamine beta-monooxygenase)
  Uniprot ID: P09172
  ENST ID: ENST00000393056
  CDS Start-End: 13-1866
ctcaccccagccatgcccgccctcagtcgctgggccagcctgcccggccccagcatgcgggaggcagccttcatgtacagcacagcagtggccatcttcctggtcatcctggtggccgcactgcagggctcggctccccgtgagagccccctcccctatcacatccccctggacccggaggggtccctggagctctcatggaatgtcagctacacccaggaggccatccatttccagctcctggtgcggaggctcaaggctggcgtcctgtttgggatgtccgaccgtggcgagcttgagaacgcagatctcgtggtgctctggaccgatggggacactgcctattttgcggacgcctggagtgaccagaaggggcagatccacctggatccccagcaggactaccagctgctgcaggtgcagaggaccccagaaggcctgaccctgcttttcaagaggccctttggcacctgcgaccccaaggattacctcattgaagacggcactgtccacttggtctacgggatcctggaggagccgttccggtcactggaggccatcaacggctcgggcctgcagatggggctgcagagggtgcagctcctgaagcccaatatccccgaaccggagttgccctcagacgcgtgcaccatggaggtccaagctcccaatatccagatccccagccaggagaccacgtactggtgctacattaaggagcttccaaagggcttctctcggcaccacattatcaagtacgagcccatcgtcaccaagggcaatgaggcccttgtccaccacatggaagtcttccagtgcgcccccgagatggacagcgtcccccacttcagcgggccctgcgactccaagatgaaacccgaccgcctcaactactgccgccacgtgctggccgcctgggccctgggtgccaaggcattttactacccagaggaagccggccttgccttcgggggtccagggtcctccagatatctccgcctggaagttcactaccacaacccactggtgatagaaggacgaaacgactcctcaggcatccgcttgtactacacagccaagctgcggcgcttcaacgcggggatcatggagctgggactggtgtacacgccagtgatggccattccaccacgggagaccgccttcatcctcactggctactgcacggacaagtgcacccagctggcactgcctccctccgggatccacatcttcgcctctcagctccacacacacctgactgggagaaaggtggtcacagtgctggtccgggacggccgggagtgggagatcgtgaaccaggacaatcactacagccctcacttccaggagatccgcatgttgaagaaggtcgtgtcggtccatccgggagatgtgctcatcacctcctgcacgtacaacacagaagaccgggagctggccacagtggggggcttcgggatcctggaggagatgtgtgtcaactacgtgcactactacccccagacgcagctggagctctgcaagagcgctgtggacgccggcttcctgcagaagtacttccacctcatcaacaggttcaacaacgaggatgtctgcacctgccctcaggcgtccgtgtctcagcagttcacctctgttccctggaactccttcaaccgcgacgtactgaaggccctgtacagcttcgcgcccatctccatgcactgcaacaagtcctcagccgtccgcttccagggtgaatggaacctgcagcccctgcccaaggtcatctccacactggaagagcccaccccacagtgccccaccagccagggccgaagccctgctggccccaccgttgtcagcattggtgggggcaaaggctgaggggggacctactcctccccctcctccatgctgtccctgtgggctcacaccggcactgtgcactctactctgcgacgatccccatggaacagccctgcacgcccaggatgaaggggccagaccacgcccctgcctgagaccacggtccaatccagccttcttcccccagggtcccctgcatggctgagagggtgtgggtgccctgttgacctaccctggaccgagtggaccacgacctcgtccatttaaacccggctgactcagtgcagggacagcctgcacagtggtccagggtccagccctccgccagccctgttccgcctcactgggtgtggcctggcttctgggacaggcaccatgctgggccggggtgtggaatcaccgggaacgcccccgcccccgccccgctgctcccggtgtgcagcgggtgcgggtgccgcttaaacatttccctgctgagtggctcgtgtttcacagtgggcggcttccctgcgacggaggcaggaccaggcatttagctagttagagactcgcctgggaaattgctccattcctgagtaaacagatattttcgcccacctaaagggaagccctgacaacaactatcaccaaaagacgaggcggcaaagatccagcggggcttctgggcgccggttccacgtggggtggaattattagcaccagcttgcttctctgccggtggggccagcgctgaacagaccggggtggagtcagggctgtgctttccgcgtggttctgccacttagggagtgtgccttgggcgggccatttcacattcctgaccctcacttttctcatctgtaaaaccaggctgatgccgtgcgggctaatgagccaataaagctcacacttgggctggcacccactggaggtggg

SEQ ID NO: 127902 - DNA, 4054 bp, Homo sapiens
  Payload ID: 5040
  Gene Symbol: DRD1
  Gene Name: dopamine receptor D1
  Uniprot ID: P21728
  ENST ID: ENST00000393752
  CDS Start-End: 994-2334
gtgccccgcgggaaccccgccggcctgtgcgcttgctggtgccagctcggctcgctgcctcgcattgccacaggctcctgagaggtcgcgggcagtgcctgcggggaggcgcggggccctgctctgtagggctgaaggccgcccgaggttcgccaaggctctgggctctcgaaaggaagccaagaaaagaagctgcccaggtgaccagtcctgggagtgctctctcccaaggaagctccgagcgcccaggagcccttagccggggtctagtgccctttgaacaatctccagctcttcaaggaagtgggctgccgccgcctctcttgggacctggcctgggatcctttccccaaacgcaccccggcgatttttgcgcaccgggagccgaacccctgctgcgcgcagctggctgggctcaggcgcgcttcctcaacgtttcggagccgctgcccccagcgaagtccacattccaagctccaggggctttgagagagacgaccccaaggcaaggcgtttggagagctgctgaggagccaggggcttggaggagcgagaagacatgtattttcagctgagtctcagaaggggagaatctcctgtcaccaccagaaaagcaacagccccgaaatgtgattgcaactgactagcagagcagaggcccaggagtcactggattgatgatttagaatatgctaaaaagccagtgctttatttggggaattcaggggctttctggtgcccaagacagtgacctgcagcaagggagtcagaagacagatgtagaaatcaagagtgaccatccacgggattgacttggattgccactcaagcggtcctctcatggaatgttggtgaggccctctgccagggaagcaatctggctgtgcaaagtgctgcctggtggggaggactcctggaaatctgactgacccctattccctgcttgggaacttgaggggtgtcagagcccctgatgtgctttctcttaggaagatgaggactctgaacacctctgccatggacgggactgggctggtggtggagagggacttctctgttcgtatcctcactgcctgtttcctgtcgctgctcatcctgtccacgctcctggggaacacgctggtctgtgctgccgttatcaggttccgacacctgcggtccaaggtgaccaacttctttgtcatctccttggctgtgtcagatctcttggtggccgtcctggtcatgccctggaaggcagtggctgagattgctggcttctggccctttgggtccttctgtaacatctgggtggcctttgacatcatgtgctccactgcatccatcctcaacctctgtgtgatcagcgtggacaggtattgggctatctccagccctttccggtatgagagaaagatgacccccaaggcagccttcatcctgatcagtgtggcatggaccttgtctgtactcatctccttcatcccagtgcagctcagctggcacaaggcaaaacccacaagcccctctgatggaaatgccacttccctggctgagaccatagacaactgtgactccagcctcagcaggacatatgccatctcatcctctgtaataagcttttacatccctgtggccatcatgattgtcacctacaccaggatctacaggattgctcagaaacaaatacggcgcattgcggccttggagagggcagcagtccacgccaagaattgccagaccaccacaggtaatggaaagcctgtcgaatgttctcaaccggaaagttcttttaagatgtccttcaaaagagaaactaaagtcctgaagactctgtcggtgatcatgggtgtgtttgtgtgctgttggctacctttcttcatcttgaactgcattttgcccttctgtgggtctggggagacgcagcccttctgcattgattccaacacctttgacgtgtttgtgtggtttgggtgggctaattcatccttgaaccccatcatttatgcctttaatgctgattttcggaaggcattttcaaccctcttaggatgctacagactttgccctgcgacgaataatgccatagagacggtgagtatcaataacaatggggccgcgatgttttccagccatcatgagccacgaggctccatctccaaggagtgcaatctggtttacctgatcccacatgctgtgggctcctctgaggacctgaaaaaggaggaggcagctggcatcgccagacccttggagaagctgtccccagccctatcagtcatattggactatgacactgacgtctctctggagaagatccaacccatcacacaaaacggtcagcacccaacctgaactcgcagatgaatcctgccacacatgctcatcccaaaagctagaggagattgctctggggcttgctattaagaaactaaggtacggtgagactctgaggtgtcaggagagccctctgctgctttccaacacacaattaactccgtttccaaatacattccagtgtattttctgtgttgttcatagtcaatcaaacagggacactacaaacatggggagccataagggacatgtctttggcttcagaattgtttttagaaatttattcttatcttaggatttaccaaatagggcaaagaatcaacagtgaacagcttcacttaaaatcaaatttttctgggaagaaaatgagatgggttgagtttgctgtatacaaacaggtgctaacactgttcccagcaaagttttcagattgtaaaggtaggtgcatgccttcataaattatttctaaaacattaattgaggcttacagtaggagtgagaaatttttttccagaattgagagatgttttgttgatattggttctatttatttattgtatatatggatatttttaatttatgatataataaatatatatttatcatatttaataggataaattaatgagttttatccaagaccttacaaccacatttctggccatttaactagcactttataagccaatgaagcaaacacacagactctgtgagattctaaatgttcatgtgtaacttctagaaacacagcagaaactgatagataagggaataaagttgaaatgattccttaaaattcatggacacagataaatgcaaggtgagaattgacaaatgctataaatgctttctttttctgaaaagattttgaaaaatttaaaaaagtatagctactactgtgttcaaaacgttttaaatgacaaatgactttcccaggggaatttgcagttctgtaaatatcttaaataaaagccaacttaagaagagcccagcattaaatttacgatcttaggtggtaatgaaaagtatatgctgctttgtatttatgtaaaataattggccctctccatcttttctcatttcatgtgtcaggtagtttttctgaaccacacaaatggctttcctggagagagatctgtagcacagacagtgggttacagcagccccactgagggaccaaactcaaaccctgcatttccatcttaccaggtcaaaccaaaccagtcagtggggctactttttatagtgctttaatctgaatttagagctgatttttaaaggagtctttaaatgttaatggtatactaactaacgaatagtgcctcattatcattcttgagtcagatacttctgttgatgggagaaacagaagaatccttccctttgggtgtgttgagctcccccaaagccatcagcatctcttttgacaaatgctagtcctttctctgtgctttggaatcaggttcctgcatcatcacccggactgtaaaaagtatcataagcctcccttgccagatgccaactcgtggggcatttcaacagagtttctttgaaatgtttacaacgtattcttcttgataagcaatgaacttaacatttagatgcaatccgtgaaaagaaaaaaaaatctgaaaaatatctcctgcatcaggtctgtgttatttatgtattgtgaatgttttcttaattttattggctgtatgctttcttacacataataaaaatattttgtgaactc

SEQ ID NO: 127903 - DNA, 2433 bp, Homo sapiens
  Payload ID: 5041
  Gene Symbol: DRD2
  Gene Name: dopamine receptor D2
  Uniprot ID: P14416
  ENST ID: ENST00000346454
  CDS Start-End: 77-1321
agcagccggcgccgtctctgcccccgggcgccctatggcttgaagagcctggccacccagtggctccaccgccctgatggatccactgaatctgtcctggtatgatgatgatctggagaggcagaactggagccggcccttcaacgggtcagacgggaaggcggacagaccccactacaactactatgccacactgctcaccctgctcatcgctgtcatcgtcttcggcaacgtgctggtgtgcatggctgtgtcccgcgagaaggcgctgcagaccaccaccaactacctgatcgtcagcctcgcagtggccgacctcctcgtcgccacactggtcatgccctgggttgtctacctggaggtggtaggtgagtggaaattcagcaggattcactgtgacatcttcgtcactctggacgtcatgatgtgcacggcgagcatcctgaacttgtgtgccatcagcatcgacaggtacacagctgtggccatgcccatgctgtacaatacgcgctacagctccaagcgccgggtcaccgtcatgatctccatcgtctgggtcctgtccttcaccatctcctgcccactcctcttcggactcaataacgcagaccagaacgagtgcatcattgccaacccggccttcgtggtctactcctccatcgtctccttctacgtgcccttcattgtcaccctgctggtctacatcaagatctacattgtcctccgcagacgccgcaagcgagtcaacaccaaacgcagcagccgagctttcagggcccacctgagggctccactaaaggaggctgcccggcgagcccaggagctggagatggagatgctctccagcaccagcccacccgagaggacccggtacagccccatcccacccagccaccaccagctgactctccccgacccgtcccaccatggtctccacagcactcccgacagccccgccaaaccagagaagaatgggcatgccaaagaccaccccaagattgccaagatctttgagatccagaccatgcccaatggcaaaacccggacctccctcaagaccatgagccgtaggaagctctcccagcagaaggagaagaaagccactcagatgctcgccattgttctcggcgtgttcatcatctgctggctgcccttcttcatcacacacatcctgaacatacactgtgactgcaacatcccgcctgtcctgtacagcgccttcacgtggctgggctatgtcaacagcgccgtgaaccccatcatctacaccaccttcaacattgagttccgcaaggccttcctgaagatcctccactgctgactctgctgcctgcccgcacagcagcctgcttcccacctccctgcccaggccggccagcctcacccttgcgaaccgtgagcaggaaggcctgggtggatcggcctcctcttcaccccggcaggccctgcagtgttcgcttggctccatgctcctcactgcccgcacaccctcactctgccagggcagtgctagtgagctgggcatggtaccagccctggggctgggccccccagctcaggggcagctcatagagtcccccctcccacctccagtccccctatccttggcaccaaagatgcagccgccttccttgaccttcctctggggctctagggttgctggagcctgagtcagggcccagaggctgagttttctctttgtggggcttggcgtggagcaggcggtggggagagatggacagttcacaccctgcaaggcccacaggaggcaagcaagctctcttgccgaggagccaggcaacttcagtcctgggagacccatgtaaataccagactgcaggttggaccccagagattcccaagccaaaaaccttagctccctcccgcaccccgatgtggacctctactttccaggctagtccggacccacctcaccccgttacagctccccaagtggtttccacatgctctgagaagaggagccctcatcttgaagggcccaggagggtctatggggagaggaactccttggcctagcccaccctgctgccttctgacggccctgcaatgtatcccttctcacagcacatgctggccagcctggggcctggcagggaggtcaggccctggaactctatctgggcctgggctaggggacatcagaggttctttgagggactgcctctgccacactctgacgcaaaaccactttccttttctattccttctggcctttcctctctcctgtttcccttcccttccactgcctctgccttagaggagcccacggctaagaggctgctgaaaaccatctggcctggcctggccctgccctgaggaaggaggggaagctgcagcttgggagagcccctggggcctagactctgtaacatcactatccatgcaccaaactaataaaactttgacgagtca

SEQ ID NO: 127904 - DNA, 2789 bp, Homo sapiens
  Payload ID: 5041
  Gene Symbol: DRD2
  Gene Name: dopamine receptor D2
  Uniprot ID: P14416
  ENST ID: ENST00000362072
  CDS Start-End: 346-1677
ccggcagcctcacgcgcgcaccgcgccgcctccgccccgtccccgcgctccctcctgcccgcccgccccgcgcccggccccgccccgccccgccccgccgcggcccgtccactgctccccgcgggccagagccggccgagctgctgcccgccggggctctgaacggcgcggcggggccgggagccagggaccggccgaggagagtggcggccccggacggctgccggaggggcggccgcgcgtggatgcggcgggagctggaagcctcaagcagccggcgccgtctctgcccccgggcgccctatggcttgaagagcctggccacccagtggctccaccgccctgatggatccactgaatctgtcctggtatgatgatgatctggagaggcagaactggagccggcccttcaacgggtcagacgggaaggcggacagaccccactacaactactatgccacactgctcaccctgctcatcgctgtcatcgtcttcggcaacgtgctggtgtgcatggctgtgtcccgcgagaaggcgctgcagaccaccaccaactacctgatcgtcagcctcgcagtggccgacctcctcgtcgccacactggtcatgccctgggttgtctacctggaggtggtaggtgagtggaaattcagcaggattcactgtgacatcttcgtcactctggacgtcatgatgtgcacggcgagcatcctgaacttgtgtgccatcagcatcgacaggtacacagctgtggccatgcccatgctgtacaatacgcgctacagctccaagcgccgggtcaccgtcatgatctccatcgtctgggtcctgtccttcaccatctcctgcccactcctcttcggactcaataacgcagaccagaacgagtgcatcattgccaacccggccttcgtggtctactcctccatcgtctccttctacgtgcccttcattgtcaccctgctggtctacatcaagatctacattgtcctccgcagacgccgcaagcgagtcaacaccaaacgcagcagccgagctttcagggcccacctgagggctccactaaagggcaactgtactcaccccgaggacatgaaactctgcaccgttatcatgaagtctaatgggagtttcccagtgaacaggcggagagtggaggctgcccggcgagcccaggagctggagatggagatgctctccagcaccagcccacccgagaggacccggtacagccccatcccacccagccaccaccagctgactctccccgacccgtcccaccatggtctccacagcactcccgacagccccgccaaaccagagaagaatgggcatgccaaagaccaccccaagattgccaagatctttgagatccagaccatgcccaatggcaaaacccggacctccctcaagaccatgagccgtaggaagctctcccagcagaaggagaagaaagccactcagatgctcgccattgttctcggcgtgttcatcatctgctggctgcccttcttcatcacacacatcctgaacatacactgtgactgcaacatcccgcctgtcctgtacagcgccttcacgtggctgggctatgtcaacagcgccgtgaaccccatcatctacaccaccttcaacattgagttccgcaaggccttcctgaagatcctccactgctgactctgctgcctgcccgcacagcagcctgcttcccacctccctgcccaggccggccagcctcacccttgcgaaccgtgagcaggaaggcctgggtggatcggcctcctcttcaccccggcaggccctgcagtgttcgcttggctccatgctcctcactgcccgcacaccctcactctgccagggcagtgctagtgagctgggcatggtaccagccctggggctgggccccccagctcaggggcagctcatagagtcccccctcccacctccagtccccctatccttggcaccaaagatgcagccgccttccttgaccttcctctggggctctagggttgctggagcctgagtcagggcccagaggctgagttttctctttgtggggcttggcgtggagcaggcggtggggagagatggacagttcacaccctgcaaggcccacaggaggcaagcaagctctcttgccgaggagccaggcaacttcagtcctgggagacccatgtaaataccagactgcaggttggaccccagagattcccaagccaaaaaccttagctccctcccgcaccccgatgtggacctctactttccaggctagtccggacccacctcaccccgttacagctccccaagtggtttccacatgctctgagaagaggagccctcatcttgaagggcccaggagggtctatggggagaggaactccttggcctagcccaccctgctgccttctgacggccctgcaatgtatcccttctcacagcacatgctggccagcctggggcctggcagggaggtcaggccctggaactctatctgggcctgggctaggggacatcagaggttctttgagggactgcctctgccacactctgacgcaaaaccactttccttttctattccttctggcctttcctctctcctgtttcccttcccttccactgcctctgccttagaggagcccacggctaagaggctgctgaaaaccatctggcctggcctggccctgccctgaggaaggaggggaagctgcagcttgggagagcccctggggcctagactctgtaacatcactatccatgcaccaaactaataaaactttgacgagtca

SEQ ID NO: 127905 - DNA, 1493 bp, Homo sapiens
  Payload ID: 5041
  Gene Symbol: DRD2
  Gene Name: dopamine receptor D2
  Uniprot ID: P14416
  ENST ID: ENST00000538967
  CDS Start-End: 1-1338
atggatccactgaatctgtcctggtatgatgatgatctggagaggcagaactggagccggcccttcaacgggtcagacgggaaggcggacagaccccactacaactactatgccacactgctcaccctgctcatcgctgtcatcgtcttcggcaacgtgctggtgtgcatggctgtgtcccgcgagaaggcgctgcagaccaccaccaactacctgatcgtcagcctcgcagtggccgacctcctcgtcgccacactggtcatgccctgggttgtctacctggaggtggtaggtgagtggaaattcagcaggattcactgtgacatcttcgtcactctggacgtcatgatgtgcacggcgagcatcctgaacttgtgtgccatcagcatcgacaggtacacagctgtggccatgcccatgctgtacaatacgcgctacagctccaagcgccgggtcaccgtcatgatctccatcgtctgggtcctgtccttcaccatctcctgcccactcctcttcggactcaataacgcagaccagaacgagtgcatcattgccaacccggccttcgtggtctactcctccatcgtctccttctacgtgcccttcattgtcaccctgctggtctacatcaagatctacattgtcctccgcagacgccgcaagcgagtcaacaccaaacgcagcagccgagctttcagggcccacctgagggctccactaaagggcaactgtactcaccccgaggacatgaaactctgcaccgttatcatgaagtctaatgggagtttcccagtgaacaggcggagagtggtgcaggaggctgcccggcgagcccaggagctggagatggagatgctctccagcaccagcccacccgagaggacccggtacagccccatcccacccagccaccaccagctgactctccccgacccgtcccaccatggtctccacagcactcccgacagccccgccaaaccagagaagaatgggcatgccaaagaccaccccaagattgccaagatctttgagatccagaccatgcccaatggcaaaacccggacctccctcaagaccatgagccgtaggaagctctcccagcagaaggagaagaaagccactcagatgctcgccattgttctcggcgtgttcatcatctgctggctgcccttcttcatcacacacatcctgaacatacactgtgactgcaacatcccgcctgtcctgtacagcgccttcacgtggctgggctatgtcaacagcgccgtgaaccccatcatctacaccaccttcaacattgagttccgcaaggccttcctgaagatcctccactgctgactctgctgcctgcccgcacagcagcctgcttcccacctccctgcccaggccggccagcctcacccttgcgaaccgtgagcaggaaggcctgggtggatcggcctcctcttcaccccggcaggccctgcagtgttcgcttggctccatgctcctca

SEQ ID NO: 127906 - DNA, 714 bp, Homo sapiens
  Payload ID: 5041
  Gene Symbol: DRD2
  Gene Name: dopamine receptor D2
  ENST ID: ENST00000543292
  CDS Start-End: 183-714
gccagatgctgactgcctgtcagaattcagtccctacacaccccgccccatgtctgtctgtcttgcttcatggaccactcacaccccagagttccgcctgccttctctgttgcccaccaaacccgtgtgtgtttgttcgttcatatgcaagagcctggccacccagtggctccaccgccctgatggatccactgaatctgtcctggtatgatgatgatctggagaggcagaactggagccggcccttcaacgggtcagacgggaaggcggacagaccccactacaactactatgccacactgctcaccctgctcatcgctgtcatcgtcttcggcaacgtgctggtgtgcatggctgtgtcccgcgagaaggcgctgcagaccaccaccaactacctgatcgtcagcctcgcagtggccgacctcctcgtcgccacactggtcatgccctgggttgtctacctggaggtggtaggtgagtggaaattcagcaggattcactgtgacatcttcgtcactctggacgtcatgatgtgcacggcgagcatcctgaacttgtgtgccatcagcatcgacaggtacacagctgtggccatgcccatgctgtacaatacgcgctacagctccaagcgccgggtcaccgtcatgatctccatcgtctgggtcctgtccttcaccatctcctgcccactcctcttcggactcaataacgcag

SEQ ID NO: 127907 - DNA, 2473 bp, Homo sapiens
  Payload ID: 5041
  Gene Symbol: DRD2
  Gene Name: dopamine receptor D2
  ENST ID: ENST00000544518
  CDS Start-End: 34-1362
agagcctggccacccagtggctccaccgccctgatggatccactgaatctgtcctggtatgatgatgatctggagaggcagaactggagccggcccttcaacgggtcagacgggaaggcggacagaccccactacaactactatgccacactgctcaccctgctcatcgctgtcatcgtcttcggcaacgtgctggtgtgcatggctgtgtcccgcgagaaggcgctgcagaccaccaccaactacctgatcgtcagcctcgcagtggccgacctcctcgtcgccacactggtcatgccctgggttgtctacctggaggtaggtgagtggaaattcagcaggattcactgtgacatcttcgtcactctggacgtcatgatgtgcacggcgagcatcctgaacttgtgtgccatcagcatcgacaggtacacagctgtggccatgcccatgctgtacaatacgcgctacagctccaagcgccgggtcaccgtcatgatctccatcgtctgggtcctgtccttcaccatctcctgcccactcctcttcggactcaataacgcagaccagaacgagtgcatcattgccaacccggccttcgtggtctactcctccatcgtctccttctacgtgcccttcattgtcaccctgctggtctacatcaagatctacattgtcctccgcagacgccgcaagcgagtcaacaccaaacgcagcagccgagctttcagggcccacctgagggctccactaaagggcaactgtactcaccccgaggacatgaaactctgcaccgttatcatgaagtctaatgggagtttcccagtgaacaggcggagagtggaggctgcccggcgagcccaggagctggagatggagatgctctccagcaccagcccacccgagaggacccggtacagccccatcccacccagccaccaccagctgactctccccgacccgtcccaccatggtctccacagcactcccgacagccccgccaaaccagagaagaatgggcatgccaaagaccaccccaagattgccaagatctttgagatccagaccatgcccaatggcaaaacccggacctccctcaagaccatgagccgtaggaagctctcccagcagaaggagaagaaagccactcagatgctcgccattgttctcggcgtgttcatcatctgctggctgcccttcttcatcacacacatcctgaacatacactgtgactgcaacatcccgcctgtcctgtacagcgccttcacgtggctgggctatgtcaacagcgccgtgaaccccatcatctacaccaccttcaacattgagttccgcaaggccttcctgaagatcctccactgctgactctgctgcctgcccgcacagcagcctgcttcccacctccctgcccaggccggccagcctcacccttgcgaaccgtgagcaggaaggcctgggtggatcggcctcctcttcaccccggcaggccctgcagtgttcgcttggctccatgctcctcactgcccgcacaccctcactctgccagggcagtgctagtgagctgggcatggtaccagccctggggctgggccccccagctcaggggcagctcatagagtcccccctcccacctccagtccccctatccttggcaccaaagatgcagccgccttccttgaccttcctctggggctctagggttgctggagcctgagtcagggcccagaggctgagttttctctttgtggggcttggcgtggagcaggcggtggggagagatggacagttcacaccctgcaaggcccacaggaggcaagcaagctctcttgccgaggagccaggcaacttcagtcctgggagacccatgtaaataccagactgcaggttggaccccagagattcccaagccaaaaaccttagctccctcccgcaccccgatgtggacctctactttccaggctagtccggacccacctcaccccgttacagctccccaagtggtttccacatgctctgagaagaggagccctcatcttgaagggcccaggagggtctatggggagaggaactccttggcctagcccaccctgctgccttctgacggccctgcaatgtatcccttctcacagcacatgctggccagcctggggcctggcagggaggtcaggccctggaactctatctgggcctgggctaggggacatcagaggttctttgagggactgcctctgccacactctgacgcaaaaccactttccttttctattccttctggcctttcctctctcctgtttcccttcccttccactgcctctgccttagaggagcccacggctaagaggctgctgaaaaccatctggcctggcctggccctgccctgaggaaggaggggaagctgcagcttgggagagcccctggggcctagactctgtaacatcactatccatgcaccaaactaataaaactttgacgagtc

SEQ ID NO: 127908 - DNA, 443 bp, Homo sapiens
  Payload ID: 5041
  Gene Symbol: DRD2
  Gene Name: dopamine receptor D2
  ENST ID: ENST00000542616
  CDS Start-End: 422-443
actgctccccgcgggccagagccggccgagctgctgcccgccggggctctgaacggcgcggcggggccgggagccagggaccggccgaggagagtggcggccccggacggctgccggaggggcggccgcgcgtggatgcggcgggagctggaagcctcaagcagccggcgccgtctctgcccccgggcgccctatggcttgaagtgcaggcgacggtggcggcagtagcggagggtgaccgcccggctctcggcccggctctatgatggaccgagagcccctctagggtggtatgcggagacaagagacacctctaagcaccagacagagcgcttccctatccctgtctgaggcgggcagcccttgagtgcttcctcttgaagagcagagagcctggccacccagtggctccaccgccctgatggatccactgaatctgtcct

SEQ ID NO: 127909 - DNA, 2467 bp, Homo sapiens
  Payload ID: 5041
  Gene Symbol: DRD2
  Gene Name: dopamine receptor D2
  Uniprot ID: P14416
  ENST ID: ENST00000542968
  CDS Start-End: 322-1653
ttaagaagtgtttgttgaatgaataaataaatgatggatcagctctgttcaagctcatcttattatgcatttttaaaaaattgtgtttgctcatttgtcctaccagctgtaaaaacttgctagcaaaagagtggcagaaggcccaacatttttagaaaattcttagccgtaaaccttaaaatcccgagttggaaaattctcattattaaatgccaggagttggtcttcttcctggagacctctgcaagaggccctctcactgacaccttgtgtccatttttcctggccagagcctggccacccagtggctccaccgccctgatggatccactgaatctgtcctggtatgatgatgatctggagaggcagaactggagccggcccttcaacgggtcagacgggaaggcggacagaccccactacaactactatgccacactgctcaccctgctcatcgctgtcatcgtcttcggcaacgtgctggtgtgcatggctgtgtcccgcgagaaggcgctgcagaccaccaccaactacctgatcgtcagcctcgcagtggccgacctcctcgtcgccacactggtcatgccctgggttgtctacctggaggtggtaggtgagtggaaattcagcaggattcactgtgacatcttcgtcactctggacgtcatgatgtgcacggcgagcatcctgaacttgtgtgccatcagcatcgacaggtacacagctgtggccatgcccatgctgtacaatacgcgctacagctccaagcgccgggtcaccgtcatgatctccatcgtctgggtcctgtccttcaccatctcctgcccactcctcttcggactcaataacgcagaccagaacgagtgcatcattgccaacccggccttcgtggtctactcctccatcgtctccttctacgtgcccttcattgtcaccctgctggtctacatcaagatctacattgtcctccgcagacgccgcaagcgagtcaacaccaaacgcagcagccgagctttcagggcccacctgagggctccactaaagggcaactgtactcaccccgaggacatgaaactctgcaccgttatcatgaagtctaatgggagtttcccagtgaacaggcggagagtggaggctgcccggcgagcccaggagctggagatggagatgctctccagcaccagcccacccgagaggacccggtacagccccatcccacccagccaccaccagctgactctccccgacccgtcccaccatggtctccacagcactcccgacagccccgccaaaccagagaagaatgggcatgccaaagaccaccccaagattgccaagatctttgagatccagaccatgcccaatggcaaaacccggacctccctcaagaccatgagccgtaggaagctctcccagcagaaggagaagaaagccactcagatgctcgccattgttctcggcgtgttcatcatctgctggctgcccttcttcatcacacacatcctgaacatacactgtgactgcaacatcccgcctgtcctgtacagcgccttcacgtggctgggctatgtcaacagcgccgtgaaccccatcatctacaccaccttcaacattgagttccgcaaggccttcctgaagatcctccactgctgactctgctgcctgcccgcacagcagcctgcttcccacctccctgcccaggccggccagcctcacccttgcgaaccgtgagcaggaaggcctgggtggatcggcctcctcttcaccccggcaggccctgcagtgttcgcttggctccatgctcctcactgcccgcacaccctcactctgccagggcagtgctagtgagctgggcatggtaccagccctggggctgggccccccagctcaggggcagctcatagagtcccccctcccacctccagtccccctatccttggcaccaaagatgcagccgccttccttgaccttcctctggggctctagggttgctggagcctgagtcagggcccagaggctgagttttctctttgtggggcttggcgtggagcaggcggtggggagagatggacagttcacaccctgcaaggcccacaggaggcaagcaagctctcttgccgaggagccaggcaacttcagtcctgggagacccatgtaaataccagactgcaggttggaccccagagattcccaagccaaaaaccttagctccctcccgcaccccgatgtggacctctactttccaggctagtccggacccacctcaccccgttacagctccccaagtggtttccacatgctctgagaagaggagccctcatcttgaagggcccaggagggtctatggggagaggaactccttggcctagcccaccctgctgccttctgacggccctgcaatgtatcccttctcacagcacatgctggccagcctggggcctggcagggaggtcaggccctggaactc

SEQ ID NO: 127910 - DNA, 1541 bp, Homo sapiens
  Payload ID: 5042
  Gene Symbol: DRD3
  Gene Name: dopamine receptor D3
  ENST ID: ENST00000295881
  CDS Start-End: 432-1535
gatagagagacaaagaggaaaagagagcgaggtagaaaacggatactgcctatgcctactccatccctctttcagcaccaaggacagaacctctgagcggctgacccaagcaacgctcagtttagggtccctcccaaatcctctaaagaaaacggatacattcgaaagcagctatgaaacatgcactaaggtctaatagggaagctggaaaagcagcactcaagtaatttcaccttagaggcaaaaatgggtgatttctttctgttcatttcatagtttctgagtcctgagaaaggcaaagtttgctttgcttgggtatgtctgctgtcagtaaatggctgcaggagccgaagtggtaaactcctcggtctccagaaatcagaagaaaattttagggaagccccttggcatcacgcacctccctctgggctatggcatctctgagccagctgagtggccacctgaactacacctgtggggcagagaactccacaggtgccagccaggcccgcccacatgcctactatgccctctcctactgcgcgctcatcctggccatcgtcttcggcaatggcctggtgtgcatggctgtgctgaaggagcgggccctgcagactaccaccaactacttagtagtgagcctggctgtggcagacttgctggtggccaccttggtgatgccctgggtggtatacctggaggtgacaggtggagtctggaatttcagccgcatttgctgtgatgtttttgtcaccctggatgtcatgatgtgtacagccagcatccttaatctctgtgccatcagcatagacaggtacactgcagtggtcatgcccgttcactaccagcatggcacgggacagagctcctgtcggcgcgtggccctcatgatcacggccgtctgggtactggcctttgctgtgtcctgccctcttctgtttggctttaataccacaggggaccccactgtctgctccatctccaaccctgattttgtcatctactcttcagtggtgtccttctacctgccctttggagtgactgtccttgtctatgccagaatctatgtggtgctgaaacaaaggagacggaaaaggatcctcactcgacagaacagtcagtgcaacagtgtcaggcctggcttcccccagcaaaccctctctcctgacccggcacatctggagctgaagcgttactacagcatctgccaggacactgccttgggtggaccaggcttccaagaaagaggaggagagttgaaaagagaggagaagactcggaattccctgatgccacttcgggagaagaaggcaacccaaatggtggccattgtgcttggggccttcattgtctgctggctgcccttcttcttgacccatgttctcaatacccactgccagacatgccacgtgtccccagagctttacagtgccacgacatggctgggctacgtgaatagcgccctcaaccctgtgatctataccaccttcaatatcgagttccggaaagccttcctcaagatcctgtcttgctgagggagc

SEQ ID NO: 127911 - DNA, 1640 bp, Homo sapiens
  Payload ID: 5042
  Gene Symbol: DRD3
  Gene Name: dopamine receptor D3
  Uniprot ID: P35462
  ENST ID: ENST00000383673
  CDS Start-End: 432-1634
gatagagagacaaagaggaaaagagagcgaggtagaaaacggatactgcctatgcctactccatccctctttcagcaccaaggacagaacctctgagcggctgacccaagcaacgctcagtttagggtccctcccaaatcctctaaagaaaacggatacattcgaaagcagctatgaaacatgcactaaggtctaatagggaagctggaaaagcagcactcaagtaatttcaccttagaggcaaaaatgggtgatttctttctgttcatttcatagtttctgagtcctgagaaaggcaaagtttgctttgcttgggtatgtctgctgtcagtaaatggctgcaggagccgaagtggtaaactcctcggtctccagaaatcagaagaaaattttagggaagccccttggcatcacgcacctccctctgggctatggcatctctgagccagctgagtggccacctgaactacacctgtggggcagagaactccacaggtgccagccaggcccgcccacatgcctactatgccctctcctactgcgcgctcatcctggccatcgtcttcggcaatggcctggtgtgcatggctgtgctgaaggagcgggccctgcagactaccaccaactacttagtagtgagcctggctgtggcagacttgctggtggccaccttggtgatgccctgggtggtatacctggaggtgacaggtggagtctggaatttcagccgcatttgctgtgatgtttttgtcaccctggatgtcatgatgtgtacagccagcatccttaatctctgtgccatcagcatagacaggtacactgcagtggtcatgcccgttcactaccagcatggcacgggacagagctcctgtcggcgcgtggccctcatgatcacggccgtctgggtactggcctttgctgtgtcctgccctcttctgtttggctttaataccacaggggaccccactgtctgctccatctccaaccctgattttgtcatctactcttcagtggtgtccttctacctgccctttggagtgactgtccttgtctatgccagaatctatgtggtgctgaaacaaaggagacggaaaaggatcctcactcgacagaacagtcagtgcaacagtgtcaggcctggcttcccccagcaaaccctctctcctgacccggcacatctggagctgaagcgttactacagcatctgccaggacactgccttgggtggaccaggcttccaagaaagaggaggagagttgaaaagagaggagaagactcggaattccctgagtcccaccatagcgcccaagctcagcttagaagttcgaaaactcagcaatggcagattatcgacatctttgaagctggggcccctgcaacctcggggagtgccacttcgggagaagaaggcaacccaaatggtggccattgtgcttggggccttcattgtctgctggctgcccttcttcttgacccatgttctcaatacccactgccagacatgccacgtgtccccagagctttacagtgccacgacatggctgggctacgtgaatagcgccctcaaccctgtgatctataccaccttcaatatcgagttccggaaagccttcctcaagatcctgtcttgctgagggagc

SEQ ID NO: 127912 - DNA, 1557 bp, Homo sapiens
  Payload ID: 5042
  Gene Symbol: DRD3
  Gene Name: dopamine receptor D3
  Uniprot ID: P35462
  ENST ID: ENST00000460779
  CDS Start-End: 291-1493
attataaaagcaagttcaacctcctcttgctctcaccctttcttgctcttctgccttccgccatgagatgacacagcacaaaggtctttgccagatgtctgtgccacactcttggacttcccggactccagaacttttctgagtcctgagaaaggcaaagtttgctttgcttgggtatgtctgctgtcagtaaatggctgcaggagccgaagtggtaaactcctcggtctccagaaatcagaagaaaattttagggaagccccttggcatcacgcacctccctctgggctatggcatctctgagccagctgagtggccacctgaactacacctgtggggcagagaactccacaggtgccagccaggcccgcccacatgcctactatgccctctcctactgcgcgctcatcctggccatcgtcttcggcaatggcctggtgtgcatggctgtgctgaaggagcgggccctgcagactaccaccaactacttagtagtgagcctggctgtggcagacttgctggtggccaccttggtgatgccctgggtggtatacctggaggtgacaggtggagtctggaatttcagccgcatttgctgtgatgtttttgtcaccctggatgtcatgatgtgtacagccagcatccttaatctctgtgccatcagcatagacaggtacactgcagtggtcatgcccgttcactaccagcatggcacgggacagagctcctgtcggcgcgtggccctcatgatcacggccgtctgggtactggcctttgctgtgtcctgccctcttctgtttggctttaataccacaggggaccccactgtctgctccatctccaaccctgattttgtcatctactcttcagtggtgtccttctacctgccctttggagtgactgtccttgtctatgccagaatctatgtggtgctgaaacaaaggagacggaaaaggatcctcactcgacagaacagtcagtgcaacagtgtcaggcctggcttcccccagcaaaccctctctcctgacccggcacatctggagctgaagcgttactacagcatctgccaggacactgccttgggtggaccaggcttccaagaaagaggaggagagttgaaaagagaggagaagactcggaattccctgagtcccaccatagcgcccaagctcagcttagaagttcgaaaactcagcaatggcagattatcgacatctttgaagctggggcccctgcaacctcggggagtgccacttcgggagaagaaggcaacccaaatggtggccattgtgcttggggccttcattgtctgctggctgcccttcttcttgacccatgttctcaatacccactgccagacatgccacgtgtccccagagctttacagtgccacgacatggctgggctacgtgaatagcgccctcaaccctgtgatctataccaccttcaatatcgagttccggaaagccttcctcaagatcctgtcttgctgagggagcagaagagggaacactctttgtacccatttctagctgccaggctgttggcccactcaga

SEQ ID NO: 127913 - DNA, 1554 bp, Homo sapiens
  Payload ID: 5042
  Gene Symbol: DRD3
  Gene Name: dopamine receptor D3
  Uniprot ID: P35462
  ENST ID: ENST00000467632
  CDS Start-End: 346-1548
ggtaaactcctcggtctccagaaatcagaagaaaattttaggaaagagaacaaataattaaaactctgtaagtcttaatgaggtgctaaggaggaaccccacgaatgtttcaggaagactgttattcagcactgagggattgaacatcagcaaagcaggacaaatgtcataactgatggggacctgacaactctctgttcccctgcctttttaaataggttatgcactcactctaagagatgccagaacaaactataaagaccaagataaatcaatactttgtaaggcatttaaaagctcattaaaatgtgaagccccttggcatcacgcacctccctctgggctatggcatctctgagccagctgagtggccacctgaactacacctgtggggcagagaactccacaggtgccagccaggcccgcccacatgcctactatgccctctcctactgcgcgctcatcctggccatcgtcttcggcaatggcctggtgtgcatggctgtgctgaaggagcgggccctgcagactaccaccaactacttagtagtgagcctggctgtggcagacttgctggtggccaccttggtgatgccctgggtggtatacctggaggtgacaggtggagtctggaatttcagccgcatttgctgtgatgtttttgtcaccctggatgtcatgatgtgtacagccagcatccttaatctctgtgccatcagcatagacaggtacactgcagtggtcatgcccgttcactaccagcatggcacgggacagagctcctgtcggcgcgtggccctcatgatcacggccgtctgggtactggcctttgctgtgtcctgccctcttctgtttggctttaataccacaggggaccccactgtctgctccatctccaaccctgattttgtcatctactcttcagtggtgtccttctacctgccctttggagtgactgtccttgtctatgccagaatctatgtggtgctgaaacaaaggagacggaaaaggatcctcactcgacagaacagtcagtgcaacagtgtcaggcctggcttcccccagcaaaccctctctcctgacccggcacatctggagctgaagcgttactacagcatctgccaggacactgccttgggtggaccaggcttccaagaaagaggaggagagttgaaaagagaggagaagactcggaattccctgagtcccaccatagcgcccaagctcagcttagaagttcgaaaactcagcaatggcagattatcgacatctttgaagctggggcccctgcaacctcggggagtgccacttcgggagaagaaggcaacccaaatggtggccattgtgcttggggccttcattgtctgctggctgcccttcttcttgacccatgttctcaatacccactgccagacatgccacgtgtccccagagctttacagtgccacgacatggctgggctacgtgaatagcgccctcaaccctgtgatctataccaccttcaatatcgagttccggaaagccttcctcaagatcctgtcttgctgagggagc

SEQ ID NO: 127914 - DNA, 1375 bp, Homo sapiens
  Payload ID: 5043
  Gene Symbol: DRD4
  Gene Name: dopamine receptor D4
  Uniprot ID: P21917
  ENST ID: ENST00000176183
  CDS Start-End: 13-1272
cccgggcgcgccatggggaaccgcagcaccgcggacgcggacgggctgctggctgggcgcgggccggccgcgggggcatctgcgggggcatctgcggggctggctgggcagggcgcggcggcgctggtggggggcgtgctgctcatcggcgcggtgctcgcggggaactcgctcgtgtgcgtgagcgtggccaccgagcgcgccctgcagacgcccaccaactccttcatcgtgagcctggcggccgccgacctcctcctcgctctcctggtgctgccgctcttcgtctactccgaggtccagggtggcgcgtggctgctgagcccccgcctgtgcgacgccctcatggccatggacgtcatgctgtgcaccgcctccatcttcaacctgtgcgccatcagcgtggacaggttcgtggccgtggccgtgccgctgcgctacaaccggcagggtgggagccgccggcagctgctgctcatcggcgccacgtggctgctgtccgcggcggtggcggcgcccgtactgtgcggcctcaacgacgtgcgcggccgcgaccccgccgtgtgccgcctggaggaccgcgactacgtggtctactcgtccgtgtgctccttcttcctaccctgcccgctcatgctgctgctctactgggccacgttccgcggcctgcagcgctgggaggtggcacgtcgcgccaagctgcacggccgcgcgccccgccgacccagcggccctggcccgccttcccccacgccacccgcgccccgcctcccccaggacccctgcggccccgactgtgcgccccccgcgcccggccttccccggggtccctgcggccccgactgtgcgcccgccgcgcccagcctcccccaggacccctgcggccccgactgtgcgccccccgcgcccggcctccccccggacccctgcggctccaactgtgctccccccgacgccgtcagagccgccgcgctcccaccccagactccaccgcagacccgcaggaggcggcgtgccaagatcaccggccgggagcgcaaggccatgagggtcctgccggtggtggtcggggccttcctgctgtgctggacgcccttcttcgtggtgcacatcacgcaggcgctgtgtcctgcctgctccgtgcccccgcggctggtcagcgccgtcacctggctgggctacgtcaacagcgccctcaaccccgtcatctacactgtcttcaacgccgagttccgcaacgtcttccgcaaggccctgcgtgcctgctgctgagccgggcacccccggacgccccccggcctgatggccaggcctcagggaccaaggagatggggagggcgcttttgtacgttaattaaacaaattccttcccaaa

SEQ ID NO: 127915 - DNA, 1375 bp, Homo sapiens
  Payload ID: 5043
  Gene Symbol: DRD4
  Gene Name: dopamine receptor D4
  ENST ID: ENST00000611962
  CDS Start-End: 13-1272
cccgggcgcgccatggggaaccgcagcaccgcggacgcggacgggctgctggctgggcgcgggccggccgcgggggcatctgcgggggcatctgcggggctggctgggcagggcgcggcggcgctggtggggggcgtgctgctcatcggcgcggtgctcgcggggaactcgctcgtgtgcgtgagcgtggccaccgagcgcgccctgcagacgcccaccaactccttcatcgtgagcctggcggccgccgacctcctcctcgctctcctggtgctgccgctcttcgtctactccgaggtccagggtggcgcgtggctgctgagcccccgcctgtgcgacgccctcatggccatggacgtcatgctgtgcaccgcctccatcttcaacctgtgcgccatcagcgtggacaggttcgtggccgtggccgtgccgctgcgctacaaccggcagggtgggagccgccggcagctgctgctcatcggcgccacgtggctgctgtccgcggcggtggcggcgcccgtactgtgcggcctcaacgacgtgcgcggccgcgaccccgccgtgtgccgcctggaggaccgcgactacgtggtctactcgtccgtgtgctccttcttcctaccctgcccgctcatgctgctgctctactgggccacgttccgcggcctgcagcgctgggaggtggcacgtcgcgccaagctgcacggccgcgcgccccgccgacccagcggccctggcccgccttcccccacgccacccgcgccccgcctcccccaggacccctgcggccccgactgtgcgccccccgcgcccggccttccccggggtccctgcggccccgactgtgcgcccgccgcgcccagcctcccccaggacccctgtggccccgactgtgcgccccccgcgcccggcctccccccggacccctgcggctccaactgtgctccccccgacgccgtcagagccgccgcgctcccaccccagactccaccgcagacccgcaggaggcggcgtgccaagatcaccggccgggagcgcaaggccatgagggtcctgccggtggtggtcggggccttcctgctgtgctggacgcccttcttcgtggtgcacatcacgcaggcgctgtgtcctgcctgctccgtgcccccgcggctggtcagcgccgtcacctggctgggctacgtcaacagcgccctcaaccccgtcatctacactgtcttcaacgccgagttccgcaacgtcttccgcaaggccctgcgtgcctgctgctgagccgggcacccccggacgccccccggcctgatggccaggcctcagggaccaaggagatggggagggcgcttttgtacgttaattaaacaaattccttcccaaa

SEQ ID NO: 127916 - DNA, 2330 bp, Homo sapiens
  Payload ID: 5044
  Gene Symbol: DRD5
  Gene Name: dopamine receptor D5
  Uniprot ID: P21918
  ENST ID: ENST00000304374
  CDS Start-End: 351-1784
cggcttgctctcttctctcgctccgaaccagacacagccgctgccgctgccgtccggcgcgctacagactcccgagaacagccctggctgtcagcgagcaccagccgcttcctgtccccatcgcggagactggaggggcgcaccacggccatggagccagaggcgcttcaggaggcaagagaagtccccgcgcgctccgcagcccggcgcagctcatggtgagcgccctctggggctcgagggtcccttggctgagggggcgcatcctcggggtgcccgatggggctgcctgggggtcgcagggctgaagttgggaccgcgcacagaccgcccctgcagtccagcccgaaatgctgccgccaggcagcaacggcaccgcgtacccggggcagttcgctctataccagcagctggcgcaggggaacgccgtggggggctcggcgggggcaccgccactggggccctcacaggtggtcaccgcctgcctgctgaccctactcatcatctggaccctgctgggcaacgtgctggtgtgcgcagccatcgtgcggagccgccacctgcgcgccaacatgaccaacgtcttcatcgtgtctctggccgtgtcagaccttttcgtggcgctgctggtcatgccctggaaggcagtcgccgaggtggccggttactggccctttggagcgttctgcgacgtctgggtggccttcgacatcatgtgctccactgcctccatcctgaacctgtgcgtcatcagcgtggaccgctactgggccatctccaggcccttccgctacaagcgcaagatgactcagcgcatggccttggtcatggtcggcctggcatggaccttgtccatcctcatctccttcattccggtccagctcaactggcacagggaccaggcggcctcttggggcgggctggacctgccaaacaacctggccaactggacgccctgggaggaggacttttgggagcccgacgtgaatgcagagaactgtgactccagcctgaatcgaacctacgccatctcttcctcgctcatcagcttctacatccccgttgccatcatgatcgtgacctacacgcgcatctaccgcatcgcccaggtgcagatccgcaggatttcctccctggagagggccgcagagcacgcgcagagctgccggagcagcgcagcctgcgcgcccgacaccagcctgcgcgcttccatcaagaaggagaccaaggttctcaagaccctgtcggtgatcatgggggtcttcgtgtgttgctggctgcccttcttcatccttaactgcatggtccctttctgcagtggacaccccgaaggccctccggccggcttcccctgcgtcagtgagaccaccttcgacgtcttcgtctggttcggctgggctaactcctcactcaaccccgtcatctatgccttcaacgccgactttcagaaggtgtttgcccagctgctggggtgcagccacttctgctcccgcacgccggtggagacggtgaacatcagcaatgagctcatctcctacaaccaagacatcgtcttccacaaggaaatcgcagctgcctacatccacatgatgcccaacgccgttacccccggcaaccgggaggtggacaacgacgaggaggagggtcctttcgatcgcatgttccagatctatcagacgtccccagatggtgaccctgttgctgagtctgtctgggagctggactgcgagggggagatttctttagacaaaataacacctttcaccccgaatggattccattaaactgcattaagaaaccccctcatggatctgcataaccgcacagacattgacaagcacgcacacacacgcaaatacatgcctttccagtgctgctccctttatcatgtgtttctgtgtagtagctcgtgtgcttagaaacctcaccccattgattggtagttcgaagaattggcagaagcagttgcaataaactcagtcaaatgtacccagcctaccagagatggaccaacgatcctatgagagaagagagtatggtgctgggtccttaaaaaaaaaaatgatacttggtccttaaaaaatatgctctcccctccctttttaaacaaatggcttgttcagtcacttgtttgtgtttgaattgatttttaaacagcaggttgtgtgtgtgtgcagtgatgtggtgggagcacagctttcctgggtctggattcccgtggctttgtgcttatgtcatttcttctctctgtgctggtgggggcctctttaccatagcttaagaagtatccctgatttattctggtgtctaataaacacagattatttgta

SEQ ID NO: 127917 - DNA, 8210 bp, Homo sapiens
  Payload ID: 5045
  Gene Symbol: DOPEY1
  Gene Name: dopey family member 1
  Uniprot ID: Q5JWR5
  ENST ID: ENST00000349129
  CDS Start-End: 261-7658
cgagcacggtgcactctgggagctgtcactaggcccttcggctcccggtctcggtgtagctgccgtggttgccaggagagctgcgccggcgagaagcggccgagccagcagcaggaaggaacacacaagtagttatctttcaggctgtctttgaatacttccatgaccctgaacactagctgaggagagtttcaaccactgctaacagtaatgactttacatgagtttggaactggtctctagtgggaagttgtgggaggatgaacacagaagagctggagttattgagtgactccaaatacagaaactatgtagcagcaattgacaaagcactaaagaattttgaatactccagtgaatgggcagatttgatatcagcacttggaaaacttaataaggttttacaaaataatgcaaagtaccaagtagtacccaaaaagctgaccataggcaaacgcctagctcaatgtctacatccagcattaccaggtggagttcatcggaaggcgcttgaaacatatgaaattatcttcaaaataattggacctaagcgacttgccaaagatctttttttatatagttctggattatttcctcttcttgcaaatgctgccatgtctgtgaaaccaacattgctcagtttgtatgagatatattatctgcctttgggtaaaacactgaaacctggtctacagggattgcttactggtattcttcctggcttagaagaaggatcagagtactatgagagaacaaatatgttgttggaaaaggttgctgctgctgtggaccagtcagcattctacagtgccctgtggggtagtcttctcaccagtcctgctgtgcgtttacctggaatcacgtatgttcttgcccatttaaacaggaagctttctatggaagatcaactttatataattggcagtgatattgagctaatggtagaagcagtaagtacttcagtgcaggactcaagtgtacttgtacagagaagcacactggacctcatactcttctgttttccattccacatgagtcaggccactcgaccggatatgatcaggatcttgtcagcagcccttcatgtagtgctaaggagggatatgtctctgaatcgaagactttatgcatggcttcttggttttgataacaacggtgctatcataggacccagaagcacaagacacagtaatcctgaagaacatgccacttactatttcactaccttttcaaaagaattattagtccaggcaatggtgggaatcttacaagtgaatggatttggagaagagaacactctaatgcaggatctaaagccttttcgcattttaatcagtttactggacaaacctgagctaggacctgtaattctagaagatgtcctgattgaagtgtttagaacattatattctcaatgcaaagcagagttggatcttcaaactgaaccacccttcagcaaggatcatgctcagttaagcagtaaattaagagaaaataagaaaacagcagagctgattaaaactgctaaccttctctttaattccttcgaaccttattatatgtgggattatgttgcacgctggtttgaagaatgttgtaggaggacactgcatgtgagacttcagattggacctggagatagtaatgactcatctgaattacagctgaccaatttctgcttactggtggattttttgttggacatagtttctttgcctactagaagtatgagggtgctgtgtcaggagacttacattgaaatccagacagaacacttgccccagttgctgctcagaatgatttctgccttgacaagccatctccagacattgcacttatctgaactcacagattctctcagactctgctcaaagatccttagcaaggttcagcctccactgttatctgctagcactggaggtgttttgcagtttccaagtgggcagaacaattcagtcaaagagtgggaagacaaaaaggtatcatcagtttctcatgaaaatcctactgaagtgtttgaagatggagaaaatccaccaagtagtcgatcatcagagagtggattcactgagtttatacaatatcaagcagaccgaactgatgatattgacagagaactgagtgagggccagggggcagctgccatcccaattggtagcacatcctctgagacagaaacagcatccactgtgggatctgaagaaaccatcatccagaccccttccgtagtcactcaggggacagcaacccgaagtaggaagacagcccaaaagactgcaatgcagtgctgcttggagtatgtccaacagtttcttaccagacttatcaacctctacatcattcagaataactctttttctcagtctttggctacagaacatcaaggggatcttggtcgagaacaaggagagacttcaaaatgggacagaaattcacaaggagatgtaaaagagaaaaacataagtaaacaaaaaacttctaaagaatacctgtctgccttccttgctgcctgtcagctcttcctagagtgctcaagtttcccagtttacattgctgaggggaaccatacatcagagttacgttctgaaaaattggagactgactgtgagcatgtgcagcctccacagtggctccagactctgatgaatgcttgcagccaagcaagtgatttcagtgttcagagtgttgctatttcactagttatggacctggtgggactgacacagtctgtggccatggtcactggggaaaacatcaacagtgtagagcctgcacaacccttaagtccaaaccagggaagagtagctgtggttattagacctcccctcactcagggcaatctgaggtacatagctgagaagactgaatttttcaagcatgtagctttaacattgtgggaccagttgggagatgggacacctcagcatcaccagaagagtgtggaactattttatcaattacataacttagttccttcttctagcatctgtgaggatgttataagtcagcagttaacccataaagataagaaaataaggatggaagcacatgccaagtttgcagttctttggcatctaacgagagatctccatataaataaatcttcatcttttgtacgttcttttgacaggtcactgttcatcatgttagatagccttaacagtctcgatggttctactagctctgtgggacaagcctggctgaaccaagtcctacaaagacatgatattgcacgagttttggaaccattgctattgctcctgcttcatccaaaaactcagagggtttcagtacagcgtgtacaagcagaacgttattggaataagtctccctgttatccaggagaggagagtgacaagcatttcatgcaaaattttgcctgcagcaatgtgagccaagtacaactcatcacatcaaaaggaaatggtgaaaagccacttaccatggatgaaatagagaactttagtctcactgtgaatccattaagtgacagactttccctcctaagtaccagcagtgagacaattccaatggttgtgtctgattttgatcttccagaccaacagatagaaatacttcagagttctgactcgggatgttcacagtcctctgctggggacaacttgagttacgaagttgatcctgaaaccgtgaatgcccaagaggattctcaaatgcccaaggaaagctccccagatgatgatgttcaacaggtagtatttgacctgatatgtaaagttgtaagtggcctcgaagtggaatctgcatcagttacatctcaattagaaattgaagctatgcccccaaagtgcagtgatatagatccagatgaagagacgattaaaattgaagatgactccattcaacagagtcagaatgctttgctgagtaatgaaagttctcagtttctgtctgtgtctgcagagggaggccatgagtgtgtggcaaatggaatctccaggaatagctcctcaccttgtatttcaggaaccacacacactcttcatgactcttctgttgcttccatagaaaccaaatctagacaaaggagtcacagtagtattcaattcagcttcaaagaaaaattatcagaaaaagtttcggagaaggaaacaatagttaaggagtcaggtaaacaaccaggagcaaaacctaaagtaaaacttgccagaaaaaaggatgatgacaagaaaaaatcttcaaatgaaaaactcaaacaaaccagtgtattcttcagtgatggtctggatttagagaactggtatagctgtggagagggagacatttctgaaattgagagtgacatgggttctccaggatctcgaaaatctcccaatttcaacattcatcctctctatcaacatgtgctcctgtatctccagttgtatgattcatccaggactttgtatgctttctctgccatcaaagccatcttgaaaactaaccctatagcttttgtaaatgccatttcaactactagtgtaaataatgcatatactcctcagttgtctctccttcagaatctattggccagacaccggatttctgttatgggcaaagatttttatagtcacattccagtggactcaaatcataacttccggagttctatgtacatagaaattcttatttctctctgcttatattacatgcgtagccattacccaactcatgtcaaggttactgcacaagatttaataggcaatcgaaacatgcaaatgatgagcatagaaattctgacactactcttcactgagctggcaaaagtaatagaaagctcagcgaagggtttccctagttttatttctgatatgttatctaagtgcaaagttcagaaagtgattcttcattgtttgctgtcatctatctttagtgctcagaaatggcatagtgaaaaaatggcaggtaagaacctggttgctgtggaagaaggtttctcagaggacagccttattaatttctcagaggatgaatttgacaatggcagcacgttgcagtcacaacttcttaaggtgcttcagaggctgattgttctagaacacagagtaatgactattcctgaagagaatgaaacaggttttgattttgttgtatctgacttagaacacatcagtccccatcaacccatgacttctcttcagtatttgcatgctcagccaatcacatgtcaaggcatgttcctctgtgcagtgatacgagctttgcatcagcactgtgcatgtaagatgcacccacaatggattggtttaatcacatctactctgccttacatgggaaaagttctgcagagagtggttgtttctgtgacactacaactgtgcagaaatttagataatctaattcagcagtacaaatacgaaacaggattatctgatagtaggcctctgtggatggcatcaattattccaccagatatgattcttactcttttggaagggattacagccattatccattactgtttgttggatccaactacacagtatcaccaacttttggtcagtgtagaccagaaacacttgtttgaagcacgcagtggaatcctctcaatccttcatatgatcatgtcctctgtgacactgctttggagcatactgcatcaagctgattcttcagaaaagatgactattgccgcatccgcatctcttaccactattaatcttggagctacaaagaacttgagacaacagattcttgaattgttgggccccatttcaatgaatcatggtgttcactttatggctgccattgcatttgtgtggaatgaaagaagacagaataaaacaaccaccaggaccaaggtcattcctgcagccagtgaagaacagcttttattagtggaattggttcgttcaatcagtgtcatgagagcagaaactgttatccagactgtaaaagaagttttaaagcagccaccagccatagccaaggacaagaaacatctttctttggaagtctgcatgcttcagtttttctatgcttatattcaaagaattccagtgcccaatttagtggatagctgggcgtcactgttgatacttctgaaagactctatacaactgagtcttccagctccagggcagtttcttatacttggggttctgaatgagtttattatgaaaaaccctagtttggaaaataaaaaagaccaaagagaccttcaggatgtaactcacaaaatagtggatgcaattggtgcaattgctggttcttctctggaacagacaacatggctgcgacgaaatcttgaagttaagccttctcccaaaataatggtagatggaaccaatttggaatctgatgttgaagatatgttatcacctgcaatggaaaccgcaaacataactccttctgtatatagtgtccatgcattgacattactctctgaggttttggctcatcttttggatatggttttctatagtgatgaaaaggagcgggttattcctttacttgtaaatattatgcattatgttgtgccctacctcagaaatcacagtgcacataatgcccctagttatcgagcttgtgtccagctgctcagcagtcttagtgggtatcagtacacacggagagcttggaaaaaagaagcttttgacctctttatggatcccagtttctttcagatggatgcctcttgtgttaatcattggagagcaattatggacaatctgatgacacatgataaaacaacatttagagatttgatgactcgtgtagcagtggctcaaagcagttcacttaatctctttgcaaaccgtgatgtggagctagaacagagagctatgcttcttaaaagattagcatttgctatttttagcagtgaaattgaccagtaccagaaatatcttccagatatacaagagagattggttgagagtctccgtttgccacaggtgccaactctccattctcaagtgttcctgtttttcagagtgttacttttaagaatgtctccccaacatcttacctcactctggcctaccatgattacagaacttgtacaagtatttttactgatggagcaggaactcactgctgatgaagatatttcacggacttcagggccctctgtggctggtctggagacaacgtacacaggaggtaatggcttctctacttcatataacagccagcggtggttaaacctctatctctctgcttgcaaatttttggatttggctctcgcattgccctctgaaaaccttcctcagtttcagatgtaccgatgggcctttattccagaagcctcagatgattcaggtttggaagtcagaaggcagggtatacatcaacgagaatttaaaccttacgtggtacgactagcaaaacttcttcggaaaagagcaaagaaaaatccagaggaagacaactcagggagaacattgggttgggagccagggcacttgctgctcaccatctgcaccgtgcgcagtatggagcagctcctgccgttcttcaatgtgctcagtcaagtcttcaacagcaaagtcacaagccgatgtggaggacactcagggagtcctatcctctactcaaatgccttccctaataaggacatgaaactggagaaccacaaaccatgttccagcaaagccaggcaaaaaatagaagagatggtagaaaaagattttctggaagggatgataaaaacttgagcaccattgctggttccatttagcttacatgtaaatgtaattatttaaaacacacacactgctctgcgttgtatagtttttccttttttgtatgtaacagaacacatttcagattgtatttaatttaaatatttgtatataagagcaaatgtctgaatgtggcctgaatcaagtttaaatattgttggctcatactgattatggtgcctaagagagctatatatatacacatgtaaagtccattgtttttattgtcctgagttgtcttaaacctgcaaaatatacactacccattttttttttccattggtttcagacttggttcaattaagattggttggggatttttctcttttccttattaaccatgttctggtatcagaatggtgttccttctccatcagaggctgggaaacgtattataattagtttttctcccacataccttcaccaagagcagtgaagaataactgaaggctggaccatgcatccttaaaagtattgcatgagcatctccacctcagtatggaagagggatggacaaccccctat

SEQ ID NO: 127918 - DNA, 7995 bp, Homo sapiens
  Payload ID: 5045
  Gene Symbol: DOPEY1
  Gene Name: dopey family member 1
  ENST ID: ENST00000237163
  CDS Start-End: 261-7691
cgagcacggtgcactctgggagctgtcactaggcccttcggctcccggtctcggtgtagctgccgtggttgccaggagagctgcgccggcgagaagcggccgagccagcagcaggaaggaacacacaagtagttatctttcaggctgtctttgaatacttccatgaccctgaacactagctgaggagagtttcaaccactgctaacagtaatgactttacatgagtttggaactggtctctagtgggaagttgtgggaggatgaacacagaagagctggagttattgagtgactccaaatacagaaactatgtagcagcaattgacaaagcactaaagaattttgaatactccagtgaatgggcagatttgatatcagcacttggaaaacttaataaggttttacaaaataatgcaaagtaccaagtagtacccaaaaagctgaccataggcaaacgcctagctcaatgtctacatccagcattaccaggtggagttcatcggaaggcgcttgaaacatatgaaattatcttcaaaataattggacctaagcgacttgccaaagatctttttttatatagttctggattatttcctcttcttgcaaatgctgccatgtctgtgaaaccaacattgctcagtttgtatgagatatattatctgcctttgggtaaaacactgaaacctggtctacagggattgcttactggtattcttcctggcttagaagaaggatcagagtactatgagagaacaaatatgttgttggaaaaggttgctgctgctgtggaccagtcagcattctacagtgccctgtggggtagtcttctcaccagtcctgctgtgcgtttacctggaatcacgtatgttcttgcccatttaaacaggaagctttctatggaagatcaactttatataattggcagtgatattgagctaatggtagaagcagtaagtacttcagtgcaggactcaagtgtacttgtacagagaagcacactggacctcatactcttctgttttccattccacatgagtcaggccactcgaccggatatgatcaggatcttgtcagcagcccttcatgtagtgctaaggagggatatgtctctgaatcgaagactttatgcatggcttcttggacccagaagcacaagacacagtaatcctgaagaacatgccacttactatttcactaccttttcaaaagaattattagtccaggcaatggtgggaatcttacaagtgaatggatttggagaagagaacactctaatgcaggatctaaagccttttcgcattttaatcagtttactggacaaacctgagctaggacctgtaattctagaagatgtcctgattgaagtgtttagaacattatattctcaatgcaaagcagagttggatcttcaaactgaaccacccttcagcaaggatcatgctcagttaagcagtaaattaagagaaaataagaaaacagcagagctgattaaaactgctaaccttctctttaattccttcgaaccttattatatgtgggattatgttgcacgctggtttgaagaatgttgtaggaggacactgcatgtgagacttcagattggacctggagatagtaatgactcatctgaattacagctgaccaatttctgcttactggtggattttttgttggacatagtttctttgcctactagaagtatgagggtgctgtgtcaggagacttacattgaaatccagacagaacacttgccccagttgctgctcagaatgatttctgccttgacaagccatctccagacattgcacttatctgaactcacagattctctcagactctgctcaaagatccttagcaaggttcagcctccactgttatctgctagcactggaggtgttttgcagtttccaagtgggcagaacaattcagtcaaagagtgggaagacaaaaaggtatcatcagtttctcatgaaaatcctactgaagtgtttgaagatggagaaaatccaccaagtagtcgatcatcagagagtggattcactgagtttatacaatatcaagcagaccgaactgatgatattgacagagaactgagtgagggccagggggcagctgccatcccaattggtagcacatcctctgagacagaaacagcatccactgtgggatctgaagaaaccatcatccagaccccttccgtagtcactcaggggacagcaacccgaagtaggaagacagcccaaaagactgcaatgcagtgctgcttggagtatgtccaacagtttcttaccagacttatcaacctctacatcattcagaataactctttttctcagtctttggctacagaacatcaaggggatcttggtcgagaacaaggagagacttcaaaatgggacagaaattcacaaggagatgtaaaagagaaaaacataagtaaacaaaaaacttctaaagaatacctgtctgccttccttgctgcctgtcagctcttcctagagtgctcaagtttcccagtttacattgctgaggggaaccatacatcagagttacgttctgaaaaattggagactgactgtgagcatgtgcagcctccacagtggctccagactctgatgaatgcttgcagccaagcaagtgatttcagtgttcagagtgttgctatttcactagttatggacctggtgggactgacacagtctgtggccatggtcactggggaaaacatcaacagtgtagagcctgcacaacccttaagtccaaaccagggaagagtagctgtggttattagacctcccctcactcagggcaatctgaggtacatagctgagaagactgaatttttcaagcatgtagctttaacattgtgggaccagttgggagatgggacacctcagcatcaccagaagagtgtggaactattttatcaattacataacttagttccttcttctagcatctgtgaggatgttataagtcagcagttaacccataaagataagaaaataaggatggaagcacatgccaagtttgcagttctttggcatctaacgagagatctccatataaataaatcttcatcttttgtacgttcttttgacaggtcactgttcatcatgttagatagccttaacagtctcgatggttctactagctctgtgggacaagcctggctgaaccaagtcctacaaagacatgatattgcacgagttttggaaccattgctattgctcctgcttcatccaaaaactcagagggtttcagtacagcgtgtacaagcagaacgttattggaataagtctccctgttatccaggagaggagagtgacaagcatttcatgcaaaattttgcctgcagcaatgtgagccaagtacaactcatcacatcaaaaggaaatggtgaaaagccacttaccatggatgaaatagagaactttagtctcactgtgaatccattaagtgacagactttccctcctaagtaccagcagtgagacaattccaatggttgtgtctgattttgatcttccagaccaacagatagaaatacttcagagttctgactcgggatgttcacagtcctctgctggggacaacttgagttacgaagttgatcctgaaaccgtgaatgcccaagaggattctcaaatgcccaaggaaagctccccagatgatgatgttcaacaggtagtatttgacctgatatgtaaagttgtaagtggcctcgaagtggaatctgcatcagttacatctcaattagaaattgaagctatgcccccaaagtgcagtgatatagatccagatgaagagacgattaaaattgaagatgactccattcaacagagtcagaatgctttgctgagtaatgaaagttctcagtttctgtctgtgtctgcagagggaggccatgagtgtgtggcaaatggaatctccaggaatagctcctcaccttgtatttcaggaaccacacacactcttcatgactcttctgttgcttccatagaaaccaaatctagacaaaggagtcacagtagtattcaattcagcttcaaagaaaaattatcagaaaaagtttcggagaaggaaacaatagttaaggagtcaggtaaacaaccaggagcaaaacctaaagtaaaacttgccagaaaaaaggatgatgacaagaaaaaatcttcaaatgaaaaactcaaacaaaccagtgtattcttcagtgatggtctggatttagagaactggtatagctgtggagagggagacatttctgaaattgagagtgacatgggttctccaggatctcgaaaatctcccaatttcaacattcatcctctctatcaacatgtgctcctgtatctccagttgtatgattcatccaggactttgtatgctttctctgccatcaaagccatcttgaaaactaaccctatagcttttgtaaatgccatttcaactactagtgtaaataatgcatatactcctcagttgtctctccttcagaatctattggccagacaccggatttctgttatgggcaaagatttttatagtcacattccagtggactcaaatcataacttccggagttctatgtacatagaaattcttatttctctctgcttatattacatgcgtagccattacccaactcatgtcaaggttactgcacaagatttaataggcaatcgaaacatgcaaatgatgagcatagaaattctgacactactcttcactgagctggcaaaagtaatagaaagctcagcgaagggtttccctagttttatttctgatatgttatctaagtgcaaagttcagaaagtgattcttcattgtttgctgtcatctatctttagtgctcagaaatggcatagtgaaaaaatggcaggtaagaacctggttgctgtggaagaaggtttctcagaggacagccttattaatttctcagaggatgaatttgacaatggcagcacgttgcagtcacaacttcttaaggtgcttcagaggctgattgttctagaacacagagtaatgactattcctgaagagaatgaaacaggttttgattttgttgtatctgacttagaacacatcagtccccatcaacccatgacttctcttcagtatttgcatgctcagccaatcacatgtcaaggcatgttcctctgtgcagtgatacgagctttgcatcagcactgtgcatgtaagatgcacccacaatggattggtttaatcacatctactctgccttacatgggaaaagttctgcagagagtggttgtttctgtgacactacaactgtgcagaaatttagataatctaattcagcagtacaaatacgaaacaggattatctgatagtaggcctctgtggatggcatcaattattccaccagatatgattcttactcttttggaagggattacagccattatccattactgtttgttggatccaactacacagtatcaccaacttttggtcagtgtagaccagaaacacttgtttgaagcacgcagtggaatcctctcaatccttcatatgatcatgtcctctgtgacactgctttggagcatactgcatcaagctgattcttcagaaaagatgactattgccgcatccgcatctcttaccactattaatcttggagctacaaagaacttgagacaacagattcttgaattgttgggccccatttcaatgaatcatggtgttcactttatggctgccattgcatttgtgtggaatgaaagaagacagaataaaacaaccaccaggaccaaggtcattcctgcagccagtgaagaacagcttttattagtggaattggttcgttcaatcagtgtcatgagagcagaaactgttatccagactgtaaaagaagttttaaagcagccaccagccatagccaaggacaagaaacatctttctttggaagtctgcatgcttcagtttttctatgcttatattcaaagaattccagtgcccaatttagtggatagctgggcgtcactgttgatacttctgaaagactctatacaactgagtcttccagctccagggcagtttcttatacttggggttctgaatgagtttattatgaaaaaccctagtttggaaaataaaaaagaccaaagagaccttcaggatgtaactcacaaaatagtggatgcaattggtgcaattgctggttcttctctggaacagacaacatggctgcgacgaaatcttgaagttaagccttctcccaaaataatggtagatggaaccaatttggaatctgatgttgaagatatgttatcacctgcaatggaaaccgcaaacataactccttctgtatatagtgtccatgcattgacattactctctgaggttttggctcatcttttggatatggttttctatagtgatgaaaaggagcgggttattcctttacttgtaaatattatgcattatgttgtgccctacctcagaaatcacagtgcacataatgcccctagttatcgagcttgtgtccagctgctcagcagtcttagtgggtatcagtacacacggagagcttggaaaaaagaagcttttgacctctttatggatcccagtttctttcagatggatgcctcttgtgttaatcattggagagcaattatggacaatctgatgacacatgataaaacaacatttagagatttgatgactcgtgtagcagtggctcaaagcagttcacttaatctctttgcaaaccgtgatgtggagctagaacagagagctatgcttcttaaaagattagcatttgctatttttagcagtgaaattgaccagtaccagaaatatcttccagatatacaagagagattggttgagagtctccgtttgccacaggtgccaactctccattctcaagtgttcctgtttttcagagtgttacttttaagaatgtctccccaacatcttacctcactctggcctaccatgattacagaacttgtacaagtatttttactgatggagcaggaactcactgctgatgaagatatttcacggacttcagggccctctgtggctggtctggagacaacgtacacaggaggtaatggcttctctacttcatataacagccagcggtggttaaacctctatctctctgcttgcaaatttttggatttggctctcgcattgccctctgaaaaccttcctcagtttcagatgtaccgatgggcctttattccagaagcctcagatgattcaggtttggaagtcagaaggcagggtatacatcaacgagaatttaaaccttacgtggtacgactagcaaaacttcttcggaaaagagcaaaggacaaggaggaggactttaagacagtgattttggagggattggagatggccaagcatcagaaaaatccagaggaagacaactcagggagaacattgggttgggagccagggcacttgctgctcaccatctgcaccgtgcgcagtatggagcagctcctgccgttcttcaatgtgctcagtcaagtcttcaacagcaaagtcacaagccgatgtggaggacactcagggagtcctatcctctactcaaatgccttccctaataaggacatgaaactggagaaccacaaaccatgttccagcaaagccaggcaaaaaatagaagagatggtagaaaaagattttctggaagggatgataaaaacttgagcaccattgctggttccatttagcttacatgtaaatgtaattatttaaaacacacacactgctctgcgttgtatagtttttccttttttgtatgtaacagaacacatttcagattgtatttaatttaaatatttgtatataagagcaaatgtctgaatgtggcctgaatcaagtttaaatattgttggctcatactgattatggtgcctaagagagctatatatatacacatgtaaagtccattgtttttattgtcctgagttgtcttaaacctgcaaaatatacactacccattttttttttc

SEQ ID NO: 127919 - DNA, 7743 bp, Homo sapiens
  Payload ID: 5045
  Gene Symbol: DOPEY1
  Gene Name: dopey family member 1
  ENST ID: ENST00000369739
  CDS Start-End: 149-7579
aggaaggaacacacaagtagttatctttcaggctgtctttgaatacttccatgaccctgaacactagctgaggagagtttcaaccactgctaacagtaatgactttacatgagtttggaactggtctctagtgggaagttgtgggaggatgaacacagaagagctggagttattgagtgactccaaatacagaaactatgtagcagcaattgacaaagcactaaagaattttgaatactccagtgaatgggcagatttgatatcagcacttggaaaacttaataaggttttacaaaataatgcaaagtaccaagtagtacccaaaaagctgaccataggcaaacgcctagctcaatgtctacatccagcattaccaggtggagttcatcggaaggcgcttgaaacatatgaaattatcttcaaaataattggacctaagcgacttgccaaagatctttttttatatagttctggattatttcctcttcttgcaaatgctgccatgtctgtgaaaccaacattgctcagtttgtatgagatatattatctgcctttgggtaaaacactgaaacctggtctacagggattgcttactggtattcttcctggcttagaagaaggatcagagtactatgagagaacaaatatgttgttggaaaaggttgctgctgctgtggaccagtcagcattctacagtgccctgtggggtagtcttctcaccagtcctgctgtgcgtttacctggaatcacgtatgttcttgcccatttaaacaggaagctttctatggaagatcaactttatataattggcagtgatattgagctaatggtagaagcagtaagtacttcagtgcaggactcaagtgtacttgtacagagaagcacactggacctcatactcttctgttttccattccacatgagtcaggccactcgaccggatatgatcaggatcttgtcagcagcccttcatgtagtgctaaggagggatatgtctctgaatcgaagactttatgcatggcttcttggacccagaagcacaagacacagtaatcctgaagaacatgccacttactatttcactaccttttcaaaagaattattagtccaggcaatggtgggaatcttacaagtgaatggatttggagaagagaacactctaatgcaggatctaaagccttttcgcattttaatcagtttactggacaaacctgagctaggacctgtaattctagaagatgtcctgattgaagtgtttagaacattatattctcaatgcaaagcagagttggatcttcaaactgaaccacccttcagcaaggatcatgctcagttaagcagtaaattaagagaaaataagaaaacagcagagctgattaaaactgctaaccttctctttaattccttcgaaccttattatatgtgggattatgttgcacgctggtttgaagaatgttgtaggaggacactgcatgtgagacttcagattggacctggagatagtaatgactcatctgaattacagctgaccaatttctgcttactggtggattttttgttggacatagtttctttgcctactagaagtatgagggtgctgtgtcaggagacttacattgaaatccagacagaacacttgccccagttgctgctcagaatgatttctgccttgacaagccatctccagacattgcacttatctgaactcacagattctctcagactctgctcaaagatccttagcaaggttcagcctccactgttatctgctagcactggaggtgttttgcagtttccaagtgggcagaacaattcagtcaaagagtgggaagacaaaaaggtatcatcagtttctcatgaaaatcctactgaagtgtttgaagatggagaaaatccaccaagtagtcgatcatcagagagtggattcactgagtttatacaatatcaagcagaccgaactgatgatattgacagagaactgagtgagggccagggggcagctgccatcccaattggtagcacatcctctgagacagaaacagcatccactgtgggatctgaagaaaccatcatccagaccccttccgtagtcactcaggggacagcaacccgaagtaggaagacagcccaaaagactgcaatgcagtgctgcttggagtatgtccaacagtttcttaccagacttatcaacctctacatcattcagaataactctttttctcagtctttggctacagaacatcaaggggatcttggtcgagaacaaggagagacttcaaaatgggacagaaattcacaaggagatgtaaaagagaaaaacataagtaaacaaaaaacttctaaagaatacctgtctgccttccttgctgcctgtcagctcttcctagagtgctcaagtttcccagtttacattgctgaggggaaccatacatcagagttacgttctgaaaaattggagactgactgtgagcatgtgcagcctccacagtggctccagactctgatgaatgcttgcagccaagcaagtgatttcagtgttcagagtgttgctatttcactagttatggacctggtgggactgacacagtctgtggccatggtcactggggaaaacatcaacagtgtagagcctgcacaacccttaagtccaaaccagggaagagtagctgtggttattagacctcccctcactcagggcaatctgaggtacatagctgagaagactgaatttttcaagcatgtagctttaacattgtgggaccagttgggagatgggacacctcagcatcaccagaagagtgtggaactattttatcaattacataacttagttccttcttctagcatctgtgaggatgttataagtcagcagttaacccataaagataagaaaataaggatggaagcacatgccaagtttgcagttctttggcatctaacgagagatctccatataaataaatcttcatcttttgtacgttcttttgacaggtcactgttcatcatgttagatagccttaacagtctcgatggttctactagctctgtgggacaagcctggctgaaccaagtcctacaaagacatgatattgcacgagttttggaaccattgctattgctcctgcttcatccaaaaactcagagggtttcagtacagcgtgtacaagcagaacgttattggaataagtctccctgttatccaggagaggagagtgacaagcatttcatgcaaaattttgcctgcagcaatgtgagccaagtacaactcatcacatcaaaaggaaatggtgaaaagccacttaccatggatgaaatagagaactttagtctcactgtgaatccattaagtgacagactttccctcctaagtaccagcagtgagacaattccaatggttgtgtctgattttgatcttccagaccaacagatagaaatacttcagagttctgactcgggatgttcacagtcctctgctggggacaacttgagttacgaagttgatcctgaaaccgtgaatgcccaagaggattctcaaatgcccaaggaaagctccccagatgatgatgttcaacaggtagtatttgacctgatatgtaaagttgtaagtggcctcgaagtggaatctgcatcagttacatctcaattagaaattgaagctatgcccccaaagtgcagtgatatagatccagatgaagagacgattaaaattgaagatgactccattcaacagagtcagaatgctttgctgagtaatgaaagttctcagtttctgtctgtgtctgcagagggaggccatgagtgtgtggcaaatggaatctccaggaatagctcctcaccttgtatttcaggaaccacacacactcttcatgactcttctgttgcttccatagaaaccaaatctagacaaaggagtcacagtagtattcaattcagcttcaaagaaaaattatcagaaaaagtttcggagaaggaaacaatagttaaggagtcaggtaaacaaccaggagcaaaacctaaagtaaaacttgccagaaaaaaggatgatgacaagaaaaaatcttcaaatgaaaaactcaaacaaaccagtgtattcttcagtgatggtctggatttagagaactggtatagctgtggagagggagacatttctgaaattgagagtgacatgggttctccaggatctcgaaaatctcccaatttcaacattcatcctctctatcaacatgtgctcctgtatctccagttgtatgattcatccaggactttgtatgctttctctgccatcaaagccatcttgaaaactaaccctatagcttttgtaaatgccatttcaactactagtgtaaataatgcatatactcctcagttgtctctccttcagaatctattggccagacaccggatttctgttatgggcaaagatttttatagtcacattccagtggactcaaatcataacttccggagttctatgtacatagaaattcttatttctctctgcttatattacatgcgtagccattacccaactcatgtcaaggttactgcacaagatttaataggcaatcgaaacatgcaaatgatgagcatagaaattctgacactactcttcactgagctggcaaaagtaatagaaagctcagcgaagggtttccctagttttatttctgatatgttatctaagtgcaaagttcagaaagtgattcttcattgtttgctgtcatctatctttagtgctcagaaatggcatagtgaaaaaatggcaggtaagaacctggttgctgtggaagaaggtttctcagaggacagccttattaatttctcagaggatgaatttgacaatggcagcacgttgcagtcacaacttcttaaggtgcttcagaggctgattgttctagaacacagagtaatgactattcctgaagagaatgaaacaggttttgattttgttgtatctgacttagaacacatcagtccccatcaacccatgacttctcttcagtatttgcatgctcagccaatcacatgtcaaggcatgttcctctgtgcagtgatacgagctttgcatcagcactgtgcatgtaagatgcacccacaatggattggtttaatcacatctactctgccttacatgggaaaagttctgcagagagtggttgtttctgtgacactacaactgtgcagaaatttagataatctaattcagcagtacaaatacgaaacaggattatctgatagtaggcctctgtggatggcatcaattattccaccagatatgattcttactcttttggaagggattacagccattatccattactgtttgttggatccaactacacagtatcaccaacttttggtcagtgtagaccagaaacacttgtttgaagcacgcagtggaatcctctcaatccttcatatgatcatgtcctctgtgacactgctttggagcatactgcatcaagctgattcttcagaaaagatgactattgccgcatccgcatctcttaccactattaatcttggagctacaaagaacttgagacaacagattcttgaattgttgggccccatttcaatgaatcatggtgttcactttatggctgccattgcatttgtgtggaatgaaagaagacagaataaaacaaccaccaggaccaaggtcattcctgcagccagtgaagaacagcttttattagtggaattggttcgttcaatcagtgtcatgagagcagaaactgttatccagactgtaaaagaagttttaaagcagccaccagccatagccaaggacaagaaacatctttctttggaagtctgcatgcttcagtttttctatgcttatattcaaagaattccagtgcccaatttagtggatagctgggcgtcactgttgatacttctgaaagactctatacaactgagtcttccagctccagggcagtttcttatacttggggttctgaatgagtttattatgaaaaaccctagtttggaaaataaaaaagaccaaagagaccttcaggatgtaactcacaaaatagtggatgcaattggtgcaattgctggttcttctctggaacagacaacatggctgcgacgaaatcttgaagttaagccttctcccaaaataatggtagatggaaccaatttggaatctgatgttgaagatatgttatcacctgcaatggaaaccgcaaacataactccttctgtatatagtgtccatgcattgacattactctctgaggttttggctcatcttttggatatggttttctatagtgatgaaaaggagcgggttattcctttacttgtaaatattatgcattatgttgtgccctacctcagaaatcacagtgcacataatgcccctagttatcgagcttgtgtccagctgctcagcagtcttagtgggtatcagtacacacggagagcttggaaaaaagaagcttttgacctctttatggatcccagtttctttcagatggatgcctcttgtgttaatcattggagagcaattatggacaatctgatgacacatgataaaacaacatttagagatttgatgactcgtgtagcagtggctcaaagcagttcacttaatctctttgcaaaccgtgatgtggagctagaacagagagctatgcttcttaaaagattagcatttgctatttttagcagtgaaattgaccagtaccagaaatatcttccagatatacaagagagattggttgagagtctccgtttgccacaggtgccaactctccattctcaagtgttcctgtttttcagagtgttacttttaagaatgtctccccaacatcttacctcactctggcctaccatgattacagaacttgtacaagtatttttactgatggagcaggaactcactgctgatgaagatatttcacggacttcagggccctctgtggctggtctggagacaacgtacacaggaggtaatggcttctctacttcatataacagccagcggtggttaaacctctatctctctgcttgcaaatttttggatttggctctcgcattgccctctgaaaaccttcctcagtttcagatgtaccgatgggcctttattccagaagcctcagatgattcaggtttggaagtcagaaggcagggtatacatcaacgagaatttaaaccttacgtggtacgactagcaaaacttcttcggaaaagagcaaaggacaaggaggaggactttaagacagtgattttggagggattggagatggccaagcatcagaaaaatccagaggaagacaactcagggagaacattgggttgggagccagggcacttgctgctcaccatctgcaccgtgcgcagtatggagcagctcctgccgttcttcaatgtgctcagtcaagtcttcaacagcaaagtcacaagccgatgtggaggacactcagggagtcctatcctctactcaaatgccttccctaataaggacatgaaactggagaaccacaaaccatgttccagcaaagccaggcaaaaaatagaagagatggtagaaaaagattttctggaagggatgataaaaacttgagcaccattgctggttccatttagcttacatgtaaatgtaattatttaaaacacacacactgctctgcgttgtatagtttttccttttttgtatgtaacagaacacatttcagattgtatttaatttaaatatttgtatataagagcaaatgtctgaatgtggcc

SEQ ID NO: 127920 - DNA, 511 bp, Homo sapiens
  Payload ID: 5045
  Gene Symbol: DOPEY1
  Gene Name: dopey family member 1
  ENST ID: ENST00000604380
  CDS Start-End: 1-511
taaattaagagaaaataagaaaacagcagagctgattaaaactgctaaccttctctttaattccttcgaaccttattatatgtgggattatgttgcacgctggtttgaagaatgttgtaggaggacactgcatgtgagacttcagattggacctggagatagtaatgactcatctgaattacagctgaccaatttctgcttactggtggattttttgttggacatagtttctttggagacttacattgaaatccagacagaacacttgccccagttgctgctcagaatgatttctgccttgacaagccatctccagacattgcacttatctgaactcacagattctctcagactctgctcaaagatccttagcaaggttcagcctccactgttatctgctagcactggaggtgttttgcagtttccaagtgggcagaacaattcagtcaaagagtgggaagacaaaaaggtatcatcagtttctcatgaaaatcctactgaagtgtttgaa

SEQ ID NO: 127921 - DNA, 623 bp, Homo sapiens
  Payload ID: 5046
  Gene Symbol: DOPEY2
  Gene Name: dopey family member 2
  ENST ID: ENST00000270190
  CDS Start-End: 189-623
gacccgcgcggtggggaagagccgctgccgctggttctccggctcttcctcggcggttctggctcccggccgcgccgcagccctgcccagtctctctcccccagcccggagggctcctccgcgccgcacgtgagcgcgcccgccaacagggccactgccgcgatacttttctgctgtgagaatgtaagatggatccagaagagcaggagctcttaaatgattacagatacagaagctactcttcagtgattgaaaaggctttgagaaattttgagtcctcgagtgaatgggcggatctcatatcttcacttggcaaactcaacaaggctcttcagagtaacctgaggtactccttgttgccaagacggctcctcatcagcaaaagattagctcagtgtttgcaccctgccctgcccagtggtgtccacttaaaagctctggaaacctacgagattatctttaaaatcgtggggaccaaatggctggccaaggacttgtttctgtacagctgcgggttatttcctctcctggcacacgcggcggtgtcggtgaggccggtgctgctcaccctgtacgagaagtacttcctcccactgcagaagctgctcctgcccagtctgcag

SEQ ID NO: 127922 - DNA, 7685 bp, Homo sapiens
  Payload ID: 5046
  Gene Symbol: DOPEY2
  Gene Name: dopey family member 2
  Uniprot ID: Q9Y3R5
  ENST ID: ENST00000399151
  CDS Start-End: 86-6982
ttcatctcccacagtgcctggcccagaagccttgctaaatatttgaacaggattgcccaatacttttctgctgtgagaatgtaagatggatccagaagagcaggagctcttaaatgattacagatacagaagctactcttcagtgattgaaaaggctttgagaaattttgagtcctcgagtgaatgggcggatctcatatcttcacttggcaaactcaacaaggctcttcagagtaacctgaggtactccttgttgccaagacggctcctcatcagcaaaagattagctcagtgtttgcaccctgccctgcccagtggtgtccacttaaaagctctggaaacctacgagattatctttaaaatcgtggggaccaaatggctggccaaggacttgtttctgtacagctgcgggttatttcctctcctggcacacgcggcggtgtcggtgaggccggtgctgctcaccctgtacgagaagtacttcctcccactgcagaagctgctcctgcccagtctgcaggccttcatcgtgggcctgctgcccggccttgaagagggctccgagatctccgacagaacggatgctctgctcctgagactgtcgctggtggttggcaaagaggtgttttacaccgccctctgggggagcgtcctggccagcccgtccatccgcctccctgcctcagtcttcgtggtgggccacatcaacagggatgcccccggccgggagcagaagtacatgctggggaccaatcaccaactcacggtgaagtctttgcgtgcctccctgttggactcaaatgttcttgtgcaaagaaataatctggaaatcgttctgtttttcttcccattttatacctgtctggattccaatgagagagccatccccctcctcagatctgacatcgtgcgcattctctcagccgccacccagaccctactgagaagggacatgtccctgaacagaagactgtatgcatggttactaggctcagacataaaaggaaataccgttgtgccagaatctgaaatctcaaattcttatgaagaccagtcgtcttatttttttgaaaaatactccaaggatcttttagttgagggtttggctgagatattgcatcagaagttcatagatgctgacgtggaggaacgccatcatgcatacctgaagccttttcgcgtcctcatcagtctgcttgacaagccagaaatagggcctcaagtggttgggaatttgtttctcgaagtcatcagggccttttattcttactgcagagatgcccttggctctgatcttaaacttagctacacccagagtggaaattcgctgataagtgcaatcaaggaaaacagaaatgcctctgagattgtcaaaacggtaaatttgctgataacttctctaagcacagactttctctgggattatatgacaaggtgttttgaggaatgctttagaccagtgaagcagcgttacagcgtgaggaacagcgtcagccctccccccacggtctcggagctctgcgccctcctggtcttcctgctggatgtcattcctttggaactttactctgaggtgcaaacccagtatctccctcaggtgctcggctgcctggtgcagcctcttgctgaggacatggaggccttaagtttacctgaactcacgcatgccttgaagacgtgtttcaaggtgctcagcaaagtccagatgcctccttcctacctcgacacggagtccaccagcggaacctcgagtccagtaaaaggtgaaaacggcaaaataattttggaaacaaaggcagtgattcccggtgacgaagatgcttcgtttccccctctgaagtctgaggacagtgggatcgggctcagtgcctcgtcaccggagctctctgagcacttgagggttcctcgagtttctctggaaagggacgacgtttggaagaagggcgggagcatgcagaggacgtttctttgcatccaagagctaatcgccaactttgccagcaagaacatttttggagtacagctgacagcgtcaggagaagaaagcaagtccgaggagcctgcagggaagagggacagggatgggacgcagagcctggcagccaatgattccagcaggaagaactcttgggagcccaagcccatcactgtgcctcagttcaagcagatgctgtcagacttgttcacagcacgagggtctccattcaagacaaaaagttcagagtcaccatcgtcttcgcccagcagccctgccaggaaaaacgggggagaatgggatgttgagaaggtggtcattgacctggggggttccagggaggaacgcagggaggcctttgccgccgcctgccacctgctgctggattgtgccactttccctgtctacctgtccgaggaagagaccgagcagctctgtgcaacgctcttccagctgccaggagccggtgattccagttttccatcttggctgaagtccctcatgactatttgctgctgtgtgactgactgctacctccagaacgtggccatttccactctgctggaagtgataaaccattcccagtccctggcgcttgtcattgaagacaagatgaaacgctataagagctctggacacaaccctttttttggcaagctgcagatggtgacggttcctcccattgctccagggatattgaaagtcattgcagagaaaacagatttctatcagagggtggctcgtgtgctttggaatcagctgaacaaagagacccgggagcatcacgtcacctgcgtagaattgttctaccggctgcactgcctggcccctacggccaacatctgcgaggacatcatctgccatgccctcctggaccctgacaagggaacaaggctggaagctctgtttagattttccgtgatctggcatctgacaagagagatccaaggcagtcgagtaacatctcacaatcgctcctttgataggtccttgtttgtcgtgctggacagcctggcctgcacggatggtgccatcggtgcggcagcccagggctggctggtgcgtgcgctctccctcggggacgtggctcgcatcctcgaacccgtgctcctgctgctgctgcagccaaaaacccagagaacctccatccactgcctcaagcaggagaactcggccgatgacttgcaccgttggtttaacaggaagaaaacctctttcagagaggcatgcgcagtgcccgagcctcaggagagcggctctgaagagcacctgcctctgagccagttcaccacagtggaccgtgaagccatttgggccgaagtggagaaggagcccgagaagtacccgctgcgaggcgagctgagcgaggaagagctgccctactacgtggagcttccagacaggacggcccacggcgccccggacagcagcgagcacaccgagtctgcagatacaagctcctgccacacggacagcgagaacacgtcctccttctcctccccttcccacgacctgcaggagctgagcaacgaagagaactgctgtgcacccatccccatggggggcagggcgtaccccaagcgctcggccctgctggcggccttccagtcagaaagcttcaaggctggggccaagttaagcctggtgcgggtggactcggacaagacgcaggcttctgagtcgttctccagcgacgaggaggcggacttggagctccaggccctcaccacatccaggctgctaaagcagcagcgggaaaggcaggaggccgtcgaggccttgttcaagcacatcctgctctacctgcagccctacgactctcggcgggtcctctatgccttctcggtgctggaggctgtgctcaaaaccaaccctaaggaattcatcgaggctgtgtccaggactagcatggataccagctccaccgcgcacctcaacctcatctccaacctcctcgctcgccaccaggaggccctcattggccagagtttctacggaaagctccagacccaggtccccaacgtgtgcccccactctctgctcctggagctgctcacctacctctgcctgagcttcctgcgctcctactacccttgctatttgaaggtctcgcaccgagacattctcggcaaccgggacgtgcaggtcaaaagtgtcgaggttttgatcaggataatgatgcagctggtctcagtggccaagtcttcggaagggaagaacgtggagttcatccacagcttgctgcagaggtgcaaagttcaggagtttgtcctgctctccctgtcggcgtccatgtacacgagccagaagcgctacgggctggccaccgcccaccacggcagggccctgccagaggacagcctctttgaggagagtctcattaacttgggtcaggaccagatctggagtgagcacccgctgcagattgagctgctgaagctgctgcaggtgctgattgtcttggaacaccacctgggtcgggcccatgaggaggcggaaaaccagcccgacctgtcccgggagtggcagagagccctgaacttccagcaggccatcagcgccctgcagtacgtgcagccccaccccctcacctcccagggtcttctggtctctgcggtggtgaggggtctgcagcccgcctacggttacggcatgcatccggcctgggtgagcttggtcacgcattccttgccctacttcggaaagtccctgggctggacggtgacaccctttgttgtccagatttgcaaaaacttggatgacttggtcaagcagtatgaaagcgaatctgtgaagctctctgtcagcacaacctccaagagggaaaacatttctccagattatccactcacccttctagaaggtctaacgaccattagtcatttttgtcttttggaacaagccaaccaaaacaaaaagaccatggctgcaggtgatcctgccaacttgaggaatgccagaaatgccattttggaagagctgcctcgaactgttaacaccatggcccttctctggaatgttctcagaaaggaggagactcaaaagagacctgtcgatctcctaggggccacgaagggatcctcttccgtttactttaaaaccaccaaaaccataagacaaaaaattttagacttcttaaaccccttgacggcccatcttggggttcagttgacagcggctgttgcggcagtgtggagcagaaagaaagcccagcgtcacagtaagatgaagattatcccaacggcaagtgcatcccagctaacccttgtcgacttggtgtgtgcactcagcaccctgcagactgacacgctgctgcacctggtgaaggaggtggtgaagaggccaccccaagtcaaagggggtgatgagaaatcgcccctagtggacattcctgtgttgcagttttgctatgcttttctccaaaggctcccagtaccagccttgcaagagaacttttcttcactgttgggagtattgaaagagtctgtacagttgaatctagccccacctgggtattttctgcttctcagcatgctgaatgactttgtaacaagaactcccaacctggaaaacaagaaggaccaaaaagacctgcaggaaatcactcagaaaatcctagaagctgtggggaacattgccggctcttccttggagcaaaccagctggctaagcagaaacctggaagtgaaggcccaacctcaggcctctctagaagaatctgatgctgaggaggacctgtatgatgctgctgcagcttcagcaatggtgtcttcatccgccccgtcggtgtacagcgtgcaagccctctctctcctggcagaggtactggcttccctcctggacatggtttatcgaagtgatgagaaggagaaagctgtgccgttaatctcccgtctgctttactatgtttttccatacttacgcaaccacagtgcctacaatgctcccagcttccgggctggcgctcagctgctgagctccctgagtggctatgcctacacaaagcgagcctggaggaaggaggtcctggagctgtttctcgaccccgctttctttcagatggatacttcctgtgttcattggaagtccattattgaccatcttttgactcatgagaaaacaatgtttaaggatttaatgaacatgcagagcagttctttgaaactattctcaagttttgaacagaaagccatgctgttaaagcgccaggcttttgctgtcttcagtggagaacttgatcaataccacctttaccttccactgatacaagaacgcctgacagacaatctcagagttggacagacatccatagttgctgctcagatgtttctttttttcagagttttgctgctaagaatatctcctcaacatttgacttcattgtggccaataatggtctctgaattgattcagacattcacacagcttgaagaagatctaaaagatgaagatgagtcattgagaagcaccaacaaagtaaacagaacgaaagtttcagtcccggatgcaaatggaccctcagtgggggagataccccagagtgaactcatcttgtatttatcagcttgcaaattcttggacacagcgctttcttttccacctgacaagatgccattatttcaaatttataggtgggcatttattccagaagtggacacagagggccctgccttcctgtcggatgtagaggagaatcaccaagaatgcaaaccccacactgtcaggattctagaacttctaaaattaaagtttggggaaatcagtagctctgatgagatcaccatgaagagtgaattcccgcttctgcgccaacattctgtttccagcatcaggcagttgatgccattcttcatgactctaaatggtgcatttaagacccagagacagctgcctgctgatagcccaggaactccattcttggactttcctgtcacagatagcccaaggatcttaaaacaactggaagaatgcatcgaatatgattttctggaacatccagaatgttaaccatgtgagagagaatatgtttaatccatgtattggtactttactgaaaaccaggttatattctaaagaagaaagaaggcaggatagtgcttttgaacaagcctatttccattttgaaagtagatttcaggctaggtgcggtggctcacacctgtaatctcagcactttgggaggccaaggcaggcagatcacttgaggtcaggagttcgagaccagcctgaccaacatggtgagaccctgtctctactaaaaatacaaaaattagctgggtgtggtggcggcgcctgtaatcccagctacttgggaggctaaggcatgagaattgcttgaacccaggaggtggaggctgcagtgagccgagatcacgacactgcactccagctgtgtgacagaatgagaccatctccaaaaaaaaaaaaaagtagatttcagataatttactgttcagcaacaggacacacctccctaaatgccttgtaatatatttgaatctgattctgcatttcttcctcaatttatgtaatgaaaataaaattaatatatcatctaacagtagcacaaaatttgtaatatgaagtaaagtatgaagataatgaagaagttgttttctttgttgaagcagttatatgggtctttctcagtatatttctcttttctctaaaagtttaaacttattaaaagaatgttatttttaacctttca

SEQ ID NO: 127923 - DNA, 7346 bp, Homo sapiens
  Payload ID: 5047
  Gene Symbol: DRAXIN
  Gene Name: dorsal inhibitory axon guidance protein
  Uniprot ID: Q8NBI3
  ENST ID: ENST00000294485
  CDS Start-End: 136-1185
acatcctccggctgcccgcgcacctctccacgccggccccgttccgcggctcgccctcggctgcgctcggctcccgcgggcgctcggccccgagcccctcctccccctacccgccggccggacagggaggagccaatggctgggcctgccatccacaccgctcccatgctgttcctcgtcctcctgctgcccctggagctgagcctggcaggcgcccttgcacctgggacccctgcccggaacctccctgagaatcacattgacctcccaggcccagcgctgtggacgcctcaggccagccaccaccgccggcggggcccgggcaagaaggagtggggcccaggcctgcccagccaggcccaggatggggctgtggtcaccgccaccaggcaggcctccaggctgccagaggctgaggggctgctgcctgagcagagtcctgcaggcctgctgcaggacaaggacctgctcctgggactggcattgccctaccccgagaaggagaaccgacctccaggttgggagaggaccaggaaacgcagcagggagcacaagagacgcagggacaggttgaggctgcaccaaggccgagccttggtccgaggtcccagctccctgatgaagaaggcagagctctccgaagcccaggtgctggatgcagccatggaggaatcctccaccagcctggcgcccaccatgttctttctcaccacctttgaggcagcacctgccacagaagagtccctgatcctgcccgtcacctccctgcggccccagcaggcacagcccaggtctgacggggaggtgatgcccacgctggacatggccttgttcgactggaccgattatgaagacttaaaacctgatggttggccctctgcaaagaagaaagagaaacaccgcggtaaactctccagtgatggtaacgaaacatcaccagccgaaggggaaccatgcgaccatcaccaagactgcctgccagggacttgctgcgacctgcgggagcatctctgcacaccccacaaccgaggcctcaacaacaaatgcttcgatgactgcatgtgtgtggaagggctgcgctgctatgccaaattccaccggaaccgcagggttacacggaggaaagggcgctgtgtggagcccgagacggccaacggcgaccagggatccttcatcaacgtctagcggccccgcgggactggggactgagcccaggaggtttgcacaagccgggcgatttgtttgtaactagcagtgggagatcaagttggggaacagatggctgaggctgcagactcaggcccaggacactcaaccccaggaggggagccgctcggcgaatgagctgggtgggtgcccaggagccggcccgcagcacctgcacacacgaagtccggacccacgcagcctccatcccgcgtgtcttgctctccgcgatggcaatgccgagagtgccctctactgtccgactccagcactgcaacagcttcaagttcaaaaccaagaggcgtttttgagagtggaaaagaaatttaaacttcccgaaagaaggtccaccatcaggagatgaatatggaacatctcctatgtaccaggcactgtgctaagtgctggaatacattatctcattgaattatcacaacgaccttttcaagtaggcattatcaccatgcgacaggttgaggaccgtgaggcacgctggagttatttgactcgacttgcccagggtcccaggtcagtgctcctcaaacctgaacatgctaagagtcacctggaggtccagttaaaaatgtacatctggccgggcgcggcggctcacgcttgtaatcccagcactttgggaggccaaggcgggtggctcacctgaggtcaggagttcgagaccagcctggccaacatggggaaaccccgtctctattaaaaatacaaaaattaggccaggcgcggtggtgcacacctgtaatcccagctactcggaggctgaggcaccagaatcgcttgaacttgggaggcagaggttgcagtgagcagagatcgtgccactgcactccagcctgggggacaagagtgaaactccatctcaaaaaaaaaaaaaaaaaaaagcacatctgactcagtgggctctgtgctctaacaagctcccagggaacgcgaggctgctggcccagggacccactgagaggtcctgggaagtacatggcagagcaaggacatgaacctgggccaaggctgtccagctccaaggcccacgttcttgctgctccacagccaagaatttcttccagattctctaaggcttttggcaagagaggctcacaccctggtattcccttcctctgtggctggaataacttgactgttctctgccttccctggataaaggtgtatcatgtttaaaaacaaaacaaaatacaacttaagcacatacttgcttgcaggaataagttgggcaggttgatccctgtggtctagtagctgatatcctgggataagaagtgtttggggaaaagaatcatgttggcctttatgtccctgtggtcctgatcatccagtcctggacaggcactttacagttttctggagcacttcccccccaggggttctgatgcaagcatggaatccaaaaaaaccccacacatattgcccatgtttacccactttgcatactgtttagtgatttccaggaccacaaaaccatccctggaaccccaccccacatttttgcagcagagcccactgggaagttgaggctcacctgaaattgaggtgctatctgaagctaactgcccctaacaggccagactcacaatgcccacccaggacatctgtcccagcagatctggcttcaggggtcacttcaggagaaccatttaaatccccccacttggcatctcactcctggccaaccctctgttccagggcgaaccaggttgcaaatgacaaaagactttcctggccaaattcctcactggcctggatcacgcccataagatgccagagatgtttactgcgttggaaaaatcagtcggggtcaggggtcaggcaccaaggaaagcaggcagatctagaagaaattaaatatgcttgttctctccctatccaagtttgatgggcatgggaaccttgtggggagggagcagggagggcaggggaactgggagatcaaagcaggctagctgaaaggcagatatggctagacacaatggctcatgcctgtaatcccagcactttgggaggctgaggtgggcggaccacctcaggtcaggagtttgagaccagcctggccaacatggcaaaacccggtctctaccaaatatacaaaaattaaggctgggcacgagggctcatgtctgacatcccagcactctgggaggccgaggtaggcagatcacttgaagtaaggcgttcgagaacagcctgaccaacatggtgaaaccccatctctactaaaaatacaaaaattagccaggcatggtggcaggtgcctgtaatcccagctactcaggaggctcaggcgggagaatcacttgaacccaggaggcggaggttgcggtgagccaagatcacgccattgcactccagcctgggcgacagagtgagactccaaaaatataaaacacttaaaaatgtaaaaaggcagatctgccagcagcttcgtacttgagaccagacaacccacacatgctgtgtgtgcctcacattaagtggtgactcgggactgtgctggctctgtggggctagaaccctaaggagtaccgccggaagaaagcccagcattactatggctgggggacagctgttagatggtcctaggacatcagccatggagaacacagagggtcaggacaaagctaaaatgcccatagaactgccactggttgccagggtagttccatggttggaaattcaaggcccgtctctttgccctagctatctctatttgacatttccaaagagggatgggtggatggaacctcttaactccagagctgggaatcccaaagccctctcaagtgtctaaccaacctctctgccaggaagttcttccttaggtctatcttaaatttattttgctcatacagaagccagtttcctctaatccagggtttagcaaacttttactgtgaggagccaaataaacattttaggatttgcaagccatctgatctccaccagctactcagctctgccgtagctcgaagcagccacagagagtgtgtaaatgaattcatggctatgctccaggaaaactatttctggacacacatgtgaattctgtatacttttcacatgtcacaaaatattattctctctttccttttttttttttttggagatggagttttgctctgctgcccaggctggaatgcagtggctcagtctcagctcactgcaacctcttcatcccaggttcaagcaattctcctgcctcagcctcccaagtagctgtgactacaggcatgtgccaccacacctggttaatttttgtatttttagtagagataaggttttaccatgttggccaggctggtctcaaacttctgacctcaggtgatccgcccgcctcagcctcccaaaatgctgggattacaggtgtgagccaccgcacctggccataaaatattattagtttaattttctaaaaccatttaaaagtgcaaaaactgctctttgcttgccaactgcgcaaaaccaggcagtggggcagatttggcctgagggtcacggtttgccaacccctgctcaagcctgctcactctcaacgctggctgcacgttgcaataatccaggaacattcacaggcctggggcccacccacaaagcttctgttttgtttggtctgggcttcatagtttttctcccaggtaacttcaggtgcagctggggcggagagtctctgctctccccttccatctgtagcagtgtggctggtgttaaatccacctattccacctctcacagctttggcaaccttaggaaagtttcttaaggtctctgtgccttgattttttcatctgtaaaatgggaataataactctcccttcatagggttgttgtgagtagtgaatgcatacttctttttttttttttttcttttgagacagagtttcactcttgttgcccaggctggagtgcagtggcacgatctcggctcactgcgacctctgcctcctgggtacaagtgattctcccgcctcagcctctcgcgtacctgggattataggcaagcatcaccacgcccggttactgtttgtatttttagtagagatggggtttcaccatgttggccaggctggtctcaaactcctgacctcaggtgatccccccgtctcagcctcccaaagtgctgggattacaggcatgagccagcatgcctggcctgtgaacgcagaattcttataaggtgtttagaacagtgcctagcacctaataaacctccagtgttagctaatttgttattctaggagaattttagatgtcggttctttgacaatgacccatcacatactctgagatcatttctaagtcaccattcaagctccttccccaaagtgtgttccatagaacactgggaccatgagatgctctattagaaagggtcagggtacggttccatggtcagagaggtttggaaaactgttctggcctcagcccttggcagcatgtgcagattccaggcaccgaggcagggctggaggagtaagtggctttgcaataaaatgggtgctggagtctaaaatgataccctgggtggagtgggggagctgagcaggaggccaggtggcaaccagtagctgctgggcccgtggcctgaaccctcctgcactcctccagctggagtctcaccgcggatcccaggaatacctgctgttcccacagggctgcctttccgtagtttgtctggagacaccaagagtggtttccatgcctgctgggaataggctgagcatgcaatgacatgagggccaaggcttgtgggaaaatgacagcttcacagccccttgaggagtgaccaagccacaaagtaaatcctaaagccacaaccccttctaccactgagctgctggaggtgggtccttatttcaagccatattcaacccacccaacaaaacctaacattgaggtggtgggcacacggcccctgccgtggggctcactctgcagctggagagacagcatacctgaaacctgcaaggaaccggtttataaaacaacagaacagccaggaaaatggtgctaggagagacagtggagaggccagagaagcaaaccactgtggctcctcactgggggtttcacggggttggactgagccctgtcacctctgtgatagtcttcactctgacaggcaatggtgactgtgtgtgtttcctggggaggaggttagcagggacggttgcctttcctgggaagggcagtttgcagaaccaggggtttatattgcagggagtgtattttctgaattctaagtcagaacaagcagtctgatacaggatccatggctgggtcacttctgggtgcaagaggctttctagaccttagacactcaagattacggtcccgggccagtaacagcacctgggagcttggtagaaatgcagaatcttagcctaggcaacatagggagacctcatctctgcaaaaaataacaaaattagccgggcatggtggtgcacacctgtagtcccagctattctccaggctgaggtgggaggatcgcttgagcccaagaggttgaggctgcagtgagccatgatcgcaccactgcactccagcttaggcaatacagcgagaccttgtctcaaaaaaagacaaaaaaaacaaaaagaaatgtagattcttgggccccaccaccccacgcctactgagccagaatctctgggggtggggcccagccatttggcttttcacaagttctccaggtcattcttgggcacgatcaaatttgagaatcacaggtctaggatacgacggggaaaacagaaatgtggggtggtcagggacattcggataattcgggctatttgtattcaggtgtgagctggcaaatccgagacctgttttgcgtagctaattaccagcaatgacaaactcccaggctctgaggcccaagcctcctgggctgcaactggtctttatttttggaggcaatgaatggagcacctcggcctgggaccctcagtgtagggttttctgactcttaggcaacttcctagggtgctgtacttcctttttaaagttggggagcggcagggggagggggaagtgccacgcccttgtagtttcatgatgtcatgttgcatgtgctcttgagctgtaaataaagagacgatggttaaaaagcc

SEQ ID NO: 127924 - DNA, 2738 bp, Homo sapiens
  Payload ID: 5048
  Gene Symbol: DRGX
  Gene Name: dorsal root ganglia homeobox
  Uniprot ID: A6NNA5
  ENST ID: ENST00000374139
  CDS Start-End: 12-803
gacagccggcgatgttttatttccactgcccgccacagctagagggcactgcaacctttggcaatcactcttcgggggattttgatgacgggtttctgcgtagaaaacagcgccggaaccggacgacgttcactcttcagcagctggaagctctcgaggccgtttttgcccaaacacactatccagatgtcttcaccagagaagagctcgccatgaaaataaacctcacagaagccagagtgcaggtttggttccagaacagaagggccaaatggaggaagacagagagaggggcctcagaccaggagccaggagccaaggagcccatggcagaggtgacacctcctccagtgagaaacatcaactccccgccccctggggaccaagcccggagtaagaaggaggcgctggaggcccagcagagcctggggcgaacggtaggtcctgcagggcctttcttcccctcctgcttgccggggactctcctgaacacggccacctacgcccaggccttgtcccatgtggcttccctcaaagggggcccactgtgctcttgctgcgtcccagaccccatgggactctccttccttcccacctatggctgccagagtaaccgcacggccagcgtggccaccctgcgcatgaaggcccgcgagcactcagaagctgtcctgcagtcagccaacctcctgccttccaccagcagcagccccggccctgtcgccaagccggcgcccccagatggcagccaggaaaagacctctcccaccaaggaacagagcgaggcagagaagagtgtatgagggtccacagtgccccgcccggcctgccctcccccgcccctccttctcccagcctcagcccctacagaaaactctccaaatagcaaggagaagcctgcggccccagggcctctgcatggacccaggacgggcaagtgagacccacagctcccttggcacctggagcgtccctctggagtcccaccagtgcggcagtgttgtcctggcttctttggcaacagatcccgatggcacttggtggcagcagagccctctctgtgaggagcctccctgggatttccatccaggcccagagtctcggagggaggtagattcctcatccgtctcccttcctatttcctccctgggctgcctttgaaggtcttgtcaaccccaggaactgtggcatgggctgaagtttcatgaaaagaaaagggcctgtcccgcttacagtgtttaagaactggggaactggtggaaccccaagcgactcttgctcccctggaccaagatgagcagtaatgccctttctcttgttggagaatattggttgtgggcttcattacaaagtgagaagatgcagggtagggaggggccaacaggacacagcctgtcccagaggaccacggtggctctgacccaggagatctcactggcacatctggccggggggctgggctaatcacccaggccacctgctccatgaactgggggctgctgtcttgacactgtgggtgtggaactagtgtggcccctgtacctgaagcactcacctgcaagcccttcctctctcccagatagacctgtggattggtgggaagttaagcaactgaaaagcagctctctggtccaggagggcctgagggcccttggagagggaagaagcccttcaggaatgcctctgaagtaattatgcatacagatgaactacctttccccacatgcctggcacgtagagggggctcttcagtggtggtggttttttactggggaaaaaaaagtaggaaaggagacaggaacggcgtatgtgcagatatggagcatggggaagacagctttctcatggtgtggagagcattaattccaaagggccaaatttcacagagatttctgttttggtctagtgtggctgttttctctggtgaggatggtgacctagaggagatccaaggggaacgtgcaatagcataagctctgccgctttctggcaggggcgcccggcatgggaaaggttgcagtctttggtggcttttgctgatggtgtttccatgcggatggttattgccttcatgatggttattttggtttcagttattatcgtcaaaatgttttactttcacatttcctgtcccctttttaccttcccccactccatgacccccaaataatactcctgagtgtatcatgccttgtctatgatcactacgaagcatttgataaaacccactgtctcctttaaagaaaaaaatcaaatccttcttcctgctgtattttgcttgttgagtataaagatgaaacgatttgccaaaaagcggcaaagttgcttccgtttccctgtaattacgaatgtttggttgaaggatgtaagctcaagcccttatgtacactaactcttcaatctaattgtttgattaaactcgtatttcctccagaaaggtacataaataagtgaactgttgagcaaattaagaatacttaacagcattgcatctgaaaagtagttatgctgattaaattttgtgtccttgaggactttcaggaaattacttttgatcgtcaataacacaattaagtaaactacacacacattagcatgaataattgataagaaattatgtattaccacgaagcactgatttaataattcatgatgcgacactctagtgactgtgcaaaactggatcatatcgaaaagtctgcctgatgttactgaaaggaaagaaaatgagcaccaaa

SEQ ID NO: 127925 - DNA, 955 bp, Homo sapiens
  Payload ID: 5048
  Gene Symbol: DRGX
  Gene Name: dorsal root ganglia homeobox
  Uniprot ID: A6NNA5
  ENST ID: ENST00000434016
  CDS Start-End: 164-955
gagccccgcccgccgccagccgagcagggcttgcggatcggaggcggtcacgctccgacctcctcgaccgccgcccgccgagccaggcaggagcaacgcgcgcgggtccgttctgctgccaccctcccaggtctcggccgtccagccgatctgacagccggcgatgttttatttccactgcccgccacagctagagggcactgcaacctttggcaatcactcttcgggggattttgatgacgggtttctgcgtagaaaacagcgccggaaccggacgacgttcactcttcagcagctggaagctctcgaggccgtttttgcccaaacacactatccagatgtcttcaccagagaagagctcgccatgaaaataaacctcacagaagccagagtgcaggtttggttccagaacagaagggccaaatggaggaagacagagagaggggcctcagaccaggagccaggagccaaggagcccatggcagaggtgacacctcctccagtgagaaacatcaactccccgccccctggggaccaagcccggagtaagaaggaggcgctggaggcccagcagagcctggggcgaacggtaggtcctgcagggcctttcttcccctcctgcttgccggggactctcctgaacacggccacctacgcccaggccttgtcccatgtggcttccctcaaagggggcccactgtgctcttgctgcgtcccagaccccatgggactctccttccttcccacctatggctgccagagtaaccgcacggccagcgtggccaccctgcgcatgaaggcccgcgagcactcagaagctgtcctgcagtcagccaacctcctgccttccaccagcagcagccccggccctgtcgccaagccggcgcccccagatggcagccaggaaaagacctctcccaccaaggaacagagcgaggcagagaagagtgtatga

SEQ ID NO: 127926 - DNA, 7436 bp, Homo sapiens
  Payload ID: 5049
  Gene Symbol: DOT1L
  Gene Name: DOT1-like histone H3K79 methyltransferase
  Uniprot ID: Q8TEK3
  ENST ID: ENST00000398665
  CDS Start-End: 37-4650
cccgcctagcatggtgcggcggccgcgcgcgcggacatgggggagaagctggagctgagactgaagtcgcccgtgggggctgagcccgccgtctacccgtggccgctgccggtctacgataaacatcacgatgctgctcatgaaatcatcgagaccatccgatgggtctgtgaagaaatcccggatctcaagctcgctatggagaattacgttttaattgactatgacaccaaaagcttcgagagcatgcagaggctctgcgacaagtacaaccgtgccatcgacagcatccaccagctgtggaagggcaccacgcagcccatgaagctgaacacgcggccgtccactggactcctgcgccatatcctgcagcaggtctacaaccactcggtgaccgaccccgagaagctcaacaactacgagcccttctcccccgaggtgtacggggagacctccttcgacctggtggcccagatgattgatgagatcaagatgaccgacgacgacctgtttgtggacttggggagcggtgtgggccaggtcgtgctccaggttgctgctgccaccaactgcaaacatcactatggcgtcgagaaagcagacatcccggccaagtatgcggagaccatggaccgcgagttcaggaagtggatgaaatggtatggaaaaaagcatgcagaatacacattggagagaggcgatttcctctcagaagagtggagggagcgaatcgccaacacgagtgttatatttgtgaataattttgcctttggtcctgaggtggatcaccagctgaaggagcggtttgcaaacatgaaggaaggtggcagaatcgtgtcctcgaaaccctttgcacctctgaacttcagaataaacagtagaaacttgagtgacatcggcaccatcatgcgcgtggtggagctctcgcccctgaagggctcggtgtcgtggacggggaagccagtctcctactacctgcacactatcgaccgcaccatacttgaaaactatttttctagtctgaaaaacccaaaactcagggaggaacaggaggcagcccggcgccgccagcagcgcgagagcaagagcaacgcggccacgcccactaagggcccagagggcaaggtggccggccccgccgacgcccccatggactctggtgctgaggaagagaaggcgggagcagccaccgtgaagaagccgtctccctccaaagcccgcaagaagaagctaaacaagaaggggaggaagatggctggccgcaagcgcgggcgccccaagaagatgaacactgcgaaccccgagcggaagcccaagaagaaccaaactgcactggatgccctgcacgctcagaccgtgtctcagacggcggcctcctcaccccaggatgcctacagatcccctcacagcccgttctaccagctacctccgagcgtgcagcggcactcccccaacccgctgctggtggcgcccaccccgcccgcgctgcagaagcttctagagtccttcaagatccagtacctgcagttcctggcatacacaaagaccccccagtacaaggccagcctgcaggagctgctgggccaggagaaggagaagaacgcccagctcctgggtgcggctcagcagctcctcagccactgccaggcccagaaggaggagatcaggaggctgtttcagcaaaaattggatgagctgggtgtgaaggcgctgacctacaacgacctgattcaagcgcagaaggagatctccgcccataaccagcagctgcgggagcagtcggagcagctggagcaggacaaccgcgcgctccgcggccagagcttgcagctgctcaaggctcgctgcgaggagctgcagctggactgggccacgctgtcgctggagaagctgttgaaggagaagcaggccctgaagagccagatctcggagaagcagaggcactgcctggagctgcagatcagcattgtggagctagagaagagccagcggcagcaggagctcctgcagctcaagtcctgtgtgccgcctgacgacgccctgtccctgcacctgcgtgggaagggcgccctgggccgcgagctggagcctgacgccagccggctgcacctggagctggactgcaccaagttctcgctgcctcacttgagcagcatgagcccggagctctccatgaacggccaggctgctggctatgagctctgcggtgtgctgagccggccttcgtcgaagcagaacacgccccagtacctggcctcacccctggaccaggaggtggtgccctgtacccctagccacgtcggccggccgcgcctggagaagctgtctggcctagccgcacccgactacactaggctgtccccggccaagattgtgctgaggcggcacctgagccaggaccacacggtgcccggcaggccggctgccagtgagctgcattcgagagctgagcacaccaaggagaacggccttccctaccagagccccagcgtgcctggcagcatgaagctgagccctcaggacccgcggcccctgtcccctggggccttgcagcttgctggagagaagagcagtgagaagggcctgagagagcgcgcctacggcagcagcggggagctcatcaccagcctgcccatcagcatcccgctcagcaccgtgcagcccaacaagctcccggtcagcattcccctggccagcgtggtgctgcccagccgcgccgagagggcgaggagcacccccagtcccgtgctgcagccccgtgacccctcgtccacacttgaaaagcagattggtgctaatgcccacggtgctgggagcagaagccttgccctggcccccgcaggcttctcctacgctggctcggtggccatcagcggggccttggcgggcagcccggcctctctcacacctggagccgagccggccaccttggatgagtcctccagctctgggagcctttttgccaccgtggggtcccgcagctccacgccacagcaccccctgctgctggcacagccccggaactcgcttcctgcctctcccgcccaccagctctcctccagtccccggcttggtggggccgcccagggcccgttgcccgaggccagcaagggagacctgccctccgattccggcttctcagatcctgagagtgaagccaagaggaggattgtgttcaccatcaccactggtgcgggcagtgccaagcagtcgccctccagcaagcacagccccctgaccgccagcgcccgtggggactgtgtgccgagccacgggcaggacagtcgcaggcgcggccggcggaagcgagcatctgcggggacgcccagcttgagcgcaggcgtgtcccccaagcgccgagccctgccgtccgtcgctggccttttcacacagccttcggggtctcccctcaacctcaactccatggtcagtaacatcaaccagcccctggagattacagccatctcgtccccggagacctccctgaagagctcccctgtgccctaccaggaccacgaccagccccccgtgctcaagaaggagcggcctctgagccagaccaatggggcacactactccccactcacctcagacgaggagccaggctctgaggacgagcccagcagtgctcgaattgagagaaaaattgcaacaatctccttagaaagcaaatctcccccgaaaaccttggaaaatggtggtggcttggcgggaaggaagcccgcgcccgccggcgagccagtcaatagcagcaagtggaagtccaccttctcgcccatctccgacatcggcctggccaagtcggcggacagcccgctgcaggccagctccgccctcagccagaactccctgttcacgttccggcccgccctggaggagccctctgccgatgccaagctggccgctcaccccaggaaaggctttcccggctccctgtcgggggctgacggactcagcccgggcaccaaccctgccaacggctgcaccttcggcgggggcctggccgcggacctgagtttacacagcttcagtgatggtgcttctcttccccacaagggccccgaggcggccggcctgagctccccgctgagcttcccctcgcagcgcggcaaggagggctcggacgccaaccctttcctgagcaagaggcagctggacggcctggctgggctgaagggcgagggcagccgcggcaaggaggcaggggagggcggcctaccgctgtgcgggcccacggacaagaccccactgctgagcggcaaggccgccaaggcccgggaccgcgaggtcgacctcaagaatggccacaacctcttcatctctgcggcggccgtgcctcccggaagcctcctcagcggccccggcctggccccggcggcgtcctccgcaggcggcgcggcgtcctccgcccagacgcaccggtccttcctgggccccttcccgccgggaccgcagttcgcgctcggccccatgtccctgcaggccaacctcggctccgtggccggctcctccgtgctgcagtcgctgttcagctctgtgccggccgccgcaggcctggtgcacgtgtcgtccgctgccaccagactgaccaactcgcacgccatgggcagcttttccggggtggcaggcggcacagttggaggtaactaggatttctacctcaaccgcgagacctatgcaaggacggtgtggaccaactcgcgcccgcggcatggtgcccgccggcctgccgggctcccacccctggacggcagaggcaaggacggacgggagctccactgtgaatcggcggcacgcgccgcaggaggctgggactggtccagtttgtactgtcgatagttttagataaagtatttatcattttttaaaaagtataaacaattctgacttattttattccatctaagtggtaaaaggcaacttattgagaaatataaatatctatatatgagagctctatataaagacacgtgtctgcagggcgggcccgccagcggattcgccacagcctgccccggtgctatctcgtccccaggcccgcgcctgcctccacccgcttggtgctgactagacgctgacaacgccgaaccccgttctcggaaacgccgcccggccggctcccccgacgcgctgctcccgtaccaaaggcaggcccgtcgccaccacattcctcggaggcctccccgcggcctgagccccttcctgagcgccctggcgcctgccctgagctcttcacctttaccccggcactgtgaacccccagactgttcaccctccggggcgtgggttgcgcccttgcatgtgaaggggcctgcgcggtgacgcagctggccatgtgctgcgcgatggtgctgtgaggacggcgcgggcacgttgaacaagtgcatttacttttgtatttctcggctgtccatggctcgcagcatgccctgcgatgcggggcaggcctgtcgtgggtcccttggtgtttctgtacaggagagagtcacactaatgagtggcagtattttatagagatgtgatgagaatttataaatttcatagatttgacagcttttatttttagatggtataatgcacagtgaagaggaaagaaaagcgaggggaaaaaaccttatttattcaaacagtgcacaaaatggccccagcgtcagccccgaccctagacccctcagttgcagctcccagcagcccagacagagctgccggcgcccctgcctgccccacatcccttcctgtcagggccacgcctggcacccatcccttggagcctgtgctggttctcccagctgctgtgggtgtgctggggccagggtgcactgctgaaacctggcctctctggccctaggccccagggtgacgtcggccccccactctgcagccttggcgggtgcctgggactgggtgtggaaggagaggagctgaggccggggtgtagcaggcaggcagggccactccagtgcttctggagccctgagcagtcagggcctgggttgtctgagcagtggtggctctgtgccctccctggaggatgggatctgggagtctgagctccccgcatctggccctgggctgtgtggcacttgctgagcccaccttctcaagtgcttgctcctgtgagatggcatcggggagccccttccccaaggtgccacagatccaccctccagggagctgccagccctgtgttctggttcccaagggcaggatggacacacgtcacatccctaccacgtggcctccaaagggagccacggaggaaaggcttctgtggttgctaggtgggggagtcctgtgtgggagggcctgaagacccctgcttgtgcctggtgaggggggtgctgcctcccccagcccccaacaacctctcagacccccaccctccaacatagctgagttctgaagatggtgctccggacctgtcctcttaagtggtgcccagtgccctccccaccccacgttggtgctctcagctagaaggtgctgtgcctctgcctgagccccaagccccgagcctggccttcaggacaggcagcctgctctgtgtcgccacgggccggatacgccacagggttgatggcagagacggccgagtccctggtctagaacaagacacattctttaaacactgtattacttctgcctccctctaggtgacagtggcagtccgggtgccatcacgggtcctgcagatggccatgcagggctcctgcccacgcaggccaccgtatgttcaggacacgcactgggtctcagagccactggcccaggcagaagtctccttgagcccactgggtcatatgcgtgtcaccacacgtgaactagtgtggtggctgcctgcggacaccctcctgttctgagccctgggcctgtgttcttctcagacactcccagactgaggggtggtgtgtggcgggtggcagggtggctgtggagactggggatctggagcctggtgctggcacctggcctgagtttccgtgggcagctggcggggacctgtgctgctgctgctgactgtgggtgggcgggcggcgcctgggagtggctcttgctcaggaattgataggaaccctaaaaactaggataccccctcctcggcccatgaggcacgcacagtgacttatttaagacttcccccttaatttatctgcccccaggatgcgtcagtctgttcagtggtcagcaggccccccaccccccgccgactgccctcgccatcgtggtcagacccccctcccaacacaacacgctgctggtctgtgtcagcctttgtaacgtgggaggctctgccgtgtcttccgggtgaactgtatttggattgcgcgcattgtcacggtccgcccctgggctgcaggcgccccttcctctgggcacccctgcattctgcatccccacctctagacgctgtaataaacagactgttttcactcgga

SEQ ID NO: 127927 - DNA, 624 bp, Homo sapiens
  Payload ID: 5049
  Gene Symbol: DOT1L
  Gene Name: DOT1-like histone H3K79 methyltransferase
  ENST ID: ENST00000452696
  CDS Start-End: 1-624
atgggggagaagctggagctgagactgaagtcgcccgtgggggctgagcccgccgtctacccgtggccgctgccggtctacgataaacatcacgatgctgctcatgaaatcatcgagaccatccgatgggtctgtgaagaaatcccggatctcaagctcgctatggagaattacgttttaattgactatgacaccaaaagcttcgagagcatgcagaggctctgcgacaagtacaaccgtgccatcgacagcatccaccagctgcaggtctacaaccactcggtgaccgaccccgagaagctcaacaactacgagcccttctcccccgaggtgtacggggagacctccttcgacctggtggcccagatgattgatgagatcaagatgaccgacgacgacctgtttgtggacttggggagcggtgtgggccaggtcgtgctccaggttgctgctgccaccaactgcaaacatcactatggcgtcgagaaagcagacatcccggccaagtatgcggagaccatggaccgcgagttcaggaagtggatgaaatggtatggaaaaaagcatgcagaatacacattggagagaggcgatttcctctcagaagagtggagggagcgaatc

SEQ ID NO: 127928 - DNA, 2907 bp, Homo sapiens
  Payload ID: 5049
  Gene Symbol: DOT1L
  Gene Name: DOT1-like histone H3K79 methyltransferase
  ENST ID: ENST00000457590
  CDS Start-End: 1-1962
tcggggtctcccctcaacctcaactccatggtcagtaacatcaaccagcccctggagattacagccatctcgtccccggagacctccctgaagagctcccctgtgccctaccaggaccacgaccagccccccgtgctcaagaaggagcggcctctgagccagaccaatggggcacactactccccactcacctcagacgaggagccaggctctgaggacgagcccagcagtgctcgaattgagagaaaaattgcaacaatctccttagaaagcaaatctcccccgaaaaccttggaaaatggtggtggcttggcgggaaggaagcccgcgcccgccggcgagccagtcaatagcagcaagtggaagtccaccttctcgcccatctccgacatcggcctggccaagtcggcggacagcccgctgcaggccagctccgccctcagccagaactccctgttcacgttccggcccgccctggaggagccctctgccgatgccaagctggccgctcaccccaggaaaggctttcccggctccctgtcgggggctgacggactcagcccgggcaccaaccctgccaacggctgcaccttcggcgggggcctggccgcggacctgagtttacacagcttcagtgatggtgcttctcttccccacaagggccccgaggcggccggcctgagctccccgctgagcttcccctcgcagcgcggcaaggagggctcggacgccaaccctttcctgagcaagaggcagctggacggcctggctgggctgaagggcgagggcagccgcggcaaggaggcaggggagggcggcctaccgctgtgcgggcccacggacaagaccccactgctgagcggcaaggccgccaaggcccgggaccgcgaggtcgacctcaagaatggccacaacctcttcatctctgcggcggccgtgcctcccggaagcctcctcagcggccccggcctggccccggcggcgtcctccgcaggcggcgcggcgtcctccgcccagacgcaccggtccttcctgggccccttcccgccgggaccgcagttcgcgctcggccccatgtccctgcaggccaacctcggctccgtggccggctcctccgtgctgcagtcgctgttcagctctgtgccggccgccgcaggcctggtgcacgtgtcgtccgctgccaccagactgaccaactcgcacgccatgggcagcttttccggggtggcaggcggcacagttggagaaggccaccgtgcgcagggccaccagagcattactttctcccgtggaggtcacctgctaggtgtggccgcccgggctctggcaaggctctgggagctggtgttgggtgtctttaaccacgcggtgccctccgcctctgctcatccgtttggagcccgtgtcggccgcggggctgcatgtggcagcgccacactgggcccgagcccgctgcaggcggcggccagcgcctcggcctcttcctttcaggccccggcctcggttgagacccggccgccccctccgcctccgcctccgcctcccccgctgcccccgcctgcgcacctgggccggtcccccgcggggccgcccgtcctccacgccccccctccacctaacgccgccttgcctcctcccccaacgctgctggcctctaaccctgagcccgcgcttctgcagagcctcgcgtccctcccgcctaaccaagctttcttgccccccacctctgctgcctctctgccgcctgctaacgcctctttgtctatcaagctcacctccctcccgcacaagggcgcccgcccctccttcacggtgcaccaccagcccctgccccggctggccctggcccaggccgcgcccgggatcccacaggccagcgccacggggccgtccgcggtgtgggtgtccctcggcatgccgcctccctatgccgcgcacctttcgggggttaagccgcgataaagaccttgcttagctagcagtgcgtattgtgtaaggtaactaggatttctacctcaaccgcgagacctatgcaaggacggtgtggaccaactcgcgcccgcggcatggtgcccgccggcctgccgggctcccacccctggacggcagaggcaaggacggacgggagctccactgtgaatcggcggcacgcgccgcaggaggctgggactggtccagtttgtactgtcgatagttttagataaagtatttatcattttttaaaaagtataaacaattctgacttattttattccatctaagtggtaaaaggcaacttattgagaaatataaatatctatatatgagagctctatataaagacacgtgtctgcagggcgggcccgccagcggattcgccacagcctgccccggtgctatctcgtccccaggcccgcgcctgcctccacccgcttggtgctgactagacgctgacaacgccgaaccccgttctcggaaacgccgcccggccggctcccccgacgcgctgctcccgtaccaaaggcaggcccgtcgccaccacattcctcggaggcctccccgcggcctgagccccttcctgagcgccctggcgcctgccctgagctcttcacctttaccccggcactgtgaacccccagactgttcaccctccggggcgtgggttgcgcccttgcatgtgaaggggcctgcgcggtgacgcagctggccatgtgctgcgcgatggtgctgtgaggacggcgcgggcacgttgaacaagtgcatttacttttgtatttctcggctgtccatggctcgcagcatgccctgcgatgcggggcaggcctgtcgtgggtcccttggtgtttctgtacaggagagagtcacactaatgagtggcagtattttatagagatgtgatgagaatttataaatttcatagatttgaca

SEQ ID NO: 127929 - DNA, 376 bp, Homo sapiens
  Payload ID: 5049
  Gene Symbol: DOT1L
  Gene Name: DOT1-like histone H3K79 methyltransferase
  ENST ID: ENST00000446286
  CDS Start-End: 1-376
ggccccttcccgccgggaccgcagttcgcgctcggccccatgtccctgcaggccaacctcggctccgtggccggctcctccgtgctgcagtcgctgttcagctctgtgccggccgccgcaggcctggtgcacgtgtcgtccgctgccaccagactgaccaactcgcacgccatgggcagcttttccggggtggcaggcggcacagttggaggtgtctttaaccacgcggtgccctccgcctctgctcatccgtttggagcccgtgtcggccgcggggctgcatgtggcagcgccacactgggcccgagcccgctgcaggcggcggccagcgcctcggcctcttcctttcaggccccggcctcggttgagacccggc

SEQ ID NO: 127930 - DNA, 725 bp, Homo sapiens
  Payload ID: 5049
  Gene Symbol: DOT1L
  Gene Name: DOT1-like histone H3K79 methyltransferase
  ENST ID: ENST00000586024
  CDS Start-End: 1-429
caggcccagaaggaggagatcaggaggctgtttcagcaaaaattggatgagctgggtgtgaaggcgctgacctacaacgacctgattcaagcgcagaaggagatctccgcccataaccagcagctgcgggagcagtcggagcagctggagcaggacaaccgcgcgctccgcggccagagcttgcagctgctcaaggctcgctgcgaggagctgcagctggactgggccacgctgtcgctggagaagctgttgaaggagaagcaggccctgaagagccagatctcggagaagcagaggcactgcctggagctgcagagccccatcccgtcgacactgtgcccgcctgctcaccttacgtgtccccagcgtggtttcactgttgatggacctggtgccctgtcgctggacctctgctgccttttcaaatgactgcaccaaaccgttgctgcaaggctgtccccggaggcgggctctcacgggcggctgacggacgtcgggaagcaccactcacgtgctcccgagctgctccctcacgtgtgtggcccaggcgagcctcaccagcgtacattagagaaacggaggtcgccgacctctttaccacagccgggccctgtgggtctgcctggagtagagccctcgggaagagcatatttgggttctgaccatttttgtcatcatcttttctgtgtaataaaaaaacaatgtgtttgttaaaagaaaggaaa

SEQ ID NO: 127931 - DNA, 638 bp, Homo sapiens
  Payload ID: 5049
  Gene Symbol: DOT1L
  Gene Name: DOT1-like histone H3K79 methyltransferase
  ENST ID: ENST00000478937
  CDS Start-End: 1-209
tggagctgagactgaagtcgcccgtgggggctgagcccgccgtctacccgtggccgctgccggtctacgataaacatcacgatgctgctcatgaaatcatcgagaccatccgatgggtctgtgaagaaatcccggatctcaagctcgctatggagaattacgttttaattgactatgacaccaaaagctgctggttaaggaaaacatgaacttggcctgtggagcactggttttcctatgaggaaggggaagtgtgaacctcggcacatgcagtgcccagcttcgagagcatgcagaggctctgcgacaagtacaaccgtgccatcgacagcatccaccagctgtggaagggcaccacgcagcccatgaagctgaacacgcggccgtccactggactcctgcgccatatcctgcagcaggtctacaaccactcggtgaccgaccccgagaagctcaacaactacgagcccttctcccccgaggtgtacggggagacctccttcgacctggtggcccagatgattgatgagatcaagatgaccgacgacgacctgtttgtggacttggggagcggtgagtgtcgcccgccatgcccggctcctgtgcacttccaggccacacgctctgtgcctgcccca

SEQ ID NO: 127932 - DNA, 2071 bp, Homo sapiens
  Payload ID: 5050
  Gene Symbol: DOC2A
  Gene Name: double C2-like domains, alpha
  Uniprot ID: Q14183
  ENST ID: ENST00000350119
  CDS Start-End: 192-1394
cgccgccgcgccggctgcatcctcgcctccacctcgctcaccccctcctccccgcactttctcggcgctccctccctctcggctcgcacagctcgactccgcgctctcctcgccggccgccgccgcccagcctgcgcccgccgtccccccagtgcctgggcacctgttggaggcagagccaggggtgctgcatgaggggccgcaggggcgatcgcatgaccatcaacatccaggagcacatggccatcaacgtgtgccccgggcccatccggcccatccgccagatctctgactacttcccccggggaccaggacctgaagggggcggcgggggcggcggggaggcccccgcccatctggtccccctggctctggccccccctgcagccctccttggggccaccacgcctgaggatggtgcggaggtggacagctatgactcggatgatgccaccgccctaggcacgctggagtttgaccttctctacgaccgggcctcctgcactctgcactgtagcatcctcagggccaagggcctcaagcccatggatttcaatggcctcgccgacccctacgtcaagctgcacttgctgcctggagcctgtaaggccaataagctaaaaacgaagactcagaggaacacactgaatcccgtgtggaatgaggacctgacttacagcgggatcacagatgacgacatcacgcacaaggtgctcaggatcgccgtctgtgatgaggacaagctgagtcacaatgagtttattggggagatccgcgtgcccctccgccgcctcaagccttcgcagaagaagcattttaacatctgcctcgagcgccaggtcccgctggcgtccccctcttccatgtcagcggcgctgaggggcatctcctgttatctgaaggagttggagcaggcggagcaggggcaggggctgctggaggagcgtggccgcatcctgctgagtctcagctacagctcgcggcgccggggactgctggtaggcatcttgcgctgcgcccatctggctgccatggacgtcaacggttactcggacccctacgtcaagacgtacctgaggcccgatgtggacaagaaatccaagcataagacgtgtgtgaagaagaagactctcaacccagaatttaacgaggagtttttctacgagatagagctctccactctggccaccaagaccctggaagtcaccgtctgggactatgacattggcaaatccaatgacttcattggtggcgtgtccctggggccaggtgcccgaggcgaggctcggaagcactggagtgactgcctgcagcagccggacgcagccctggagcgctggcacaccctgaccagtgagctgccccctgcggccggggctctgtcctcagcctgagtggacagcagtgtcccggcacaggcccatcgagccgggtccagtacccaaccttcgcacgagtgtgttgcacgtttacacagggtgggctgcccccaccctgcactacctatttttgtgagtctccgtgacccgggtctgtctgctcatgaggggctgcggagttctatattcacatatgcaaacctcctgcctgactcgctagtccctgcaaatatgcaaaccccccatcatctgcacacccgggcagtgctcagagcccggccccaggcccccgcgctcctcactcctgcctctccacgctgccccgtccctctcccccaacagggaggaggtcggattaggggaggttcagaggaggagaatgtctcaaaaaaaaaggacaaaaaacaaacccagagccactcctttaatacagaaacttcattgaaaaaacctagccctgtacagctgcccttttaaagaggtggccattgcagggtctctgcctccccagcaggtggcagatgctcccggccactcgtttaaataactgtcccctggagggggccggggtttgaaggcagggcccctgccaccctcctgggggacacccgtgcatgtttacgccttttctggttgtgtcagtggccggagcatggcagctgggcatcaataaacacctccgaggaagctgg

SEQ ID NO: 127933 - DNA, 556 bp, Homo sapiens
  Payload ID: 5050
  Gene Symbol: DOC2A
  Gene Name: double C2-like domains, alpha
  ENST ID: ENST00000567332
  CDS Start-End: 316-556
agctcgactccgcgctctcctcgccggccgccgccgcccagcctgcgcccgccgtccccccagtgcctgggcacctgttggaggcagaggaagggaggccagtgagggccccacagaccgaggaggccgtcgcctggccctcagccaggatggctagccctccttggggccaccacgcctgaggatggtgcggaggtggacagctatgactcggatgatgccaccgccctaggcacgctggagtttgaccttctctacgaccgggcctcctgcactctgcactgtagcatcctcagggccaagggcctcaagcccatggatttcaatggcctcgccgacccctacgtcaagctgcacttgctgcctggagcctgtaaggccaataagctaaaaacgaagactcagaggaacacactgaatcccgtgtggaatgaggacctgacttacagcgggatcacagatgacgacatcacgcacaaggtgctcaggatcgccgtctgtgatgaggacaagctgagtcacaatgagtttattggggagatccgcgtgcccctcc

SEQ ID NO: 127934 - DNA, 1128 bp, Homo sapiens
  Payload ID: 5050
  Gene Symbol: DOC2A
  Gene Name: double C2-like domains, alpha
  Uniprot ID: Q14183
  ENST ID: ENST00000566310
  CDS Start-End: 284-775
gcactttctcggcgctccctccctctcggctcgcacagctcgactccgcgctctcctcgccggccgccgccgcccagcctgcgcccgccgtccccccagtgcctgggcacctgttggaggcagagccctccttggggccaccacgcctgaggatggtgcggaggtggacagctatgactcggatgatgccaccgccctaggcacgctggagtttgaccttctctacgaccgggcctcctgcactctgcactgtagcatcctcagggccaagggcctcaagcccatggatttcaatggcctcgccgacccctacgtcaagctgcacttgctgcctggagcctgtaaggccaataagctaaaaacgaagactcagaggaacacactgaatcccgtgtggaatgaggacctgacttacagcgggatcacagatgacgacatcacgcacaaggtgctcaggatcgccgtctgtgatgaggacaagctgagtcacaatgagtttattggggagatccgcgtgcccctccgccgcctcaagccttcgcagaagaagcattttaacatctgcctcgagcgccaggtcccgctggcgtccccctcttccatgtcagcggcgctgaggggcatctcctgttatctgaaggagttggagcaggcggagcaggggcaggggctgctggaggagcgtggccgcatcctgctgagtctcagctacagctcgcggcgccggggactgctggtacctgaggcccgatgtggacaagaaatccaagcataagacgtgtgtgaagaagaagactctcaacccagaatttaacgaggagtttttctacgagatagagctctccactctggccaccaagaccctggaagtcaccgtctgggactatgacattggcaaatccaatgacttcattggtggcgtgtccctggggccaggtgcccgaggcgaggctcggaagcactggagtgactgcctgcagcagccggacgcagccctggagcgctggcacaccctgaccagtgagctgccccctgcggccggggctctgtcctcagcctgagtggacagcagtgtcccggcacaggcccatcgagccgggtccagtacccaaccttcgcacgagtgtg

SEQ ID NO: 127935 - DNA, 1782 bp, Homo sapiens
  Payload ID: 5050
  Gene Symbol: DOC2A
  Gene Name: double C2-like domains, alpha
  Uniprot ID: Q14183
  ENST ID: ENST00000564944
  CDS Start-End: 193-1395
gttggggaacacccggcgattctggcggctgcttcctggtggcgcagggagcccgcgtgtttgcgagtgcgtgtgtgtgcgaagttctccggctcgactccgcgctctcctcgccggccgccgccgcccagcctgcgcccgccgtccccccagtgcctgggcacctgttggaggcagaggcaggggtgctgcatgaggggccgcaggggcgatcgcatgaccatcaacatccaggagcacatggccatcaacgtgtgccccgggcccatccggcccatccgccagatctctgactacttcccccggggaccaggacctgaagggggcggcgggggcggcggggaggcccccgcccatctggtccccctggctctggccccccctgcagccctccttggggccaccacgcctgaggatggtgcggaggtggacagctatgactcggatgatgccaccgccctaggcacgctggagtttgaccttctctacgaccgggcctcctgcactctgcactgtagcatcctcagggccaagggcctcaagcccatggatttcaatggcctcgccgacccctacgtcaagctgcacttgctgcctggagcctgtaaggccaataagctaaaaacgaagactcagaggaacacactgaatcccgtgtggaatgaggacctgacttacagcgggatcacagatgacgacatcacgcacaaggtgctcaggatcgccgtctgtgatgaggacaagctgagtcacaatgagtttattggggagatccgcgtgcccctccgccgcctcaagccttcgcagaagaagcattttaacatctgcctcgagcgccaggtcccgctggcgtccccctcttccatgtcagcggcgctgaggggcatctcctgttatctgaaggagttggagcaggcggagcaggggcaggggctgctggaggagcgtggccgcatcctgctgagtctcagctacagctcgcggcgccggggactgctggtaggcatcttgcgctgcgcccatctggctgccatggacgtcaacggttactcggacccctacgtcaagacgtacctgaggcccgatgtggacaagaaatccaagcataagacgtgtgtgaagaagaagactctcaacccagaatttaacgaggagtttttctacgagatagagctctccactctggccaccaagaccctggaagtcaccgtctgggactatgacattggcaaatccaatgacttcattggtggcgtgtccctggggccaggtgcccgaggcgaggctcggaagcactggagtgactgcctgcagcagccggacgcagccctggagcgctggcacaccctgaccagtgagctgccccctgcggccggggctctgtcctcagcctgagtggacagcagtgtcccggcacaggcccatcgagccgggtccagtacccaaccttcgcacgagtgtgttgcacgtttacacagggtgggctgcccccaccctgcactacctatttttgtgagtctccgtgacccgggtctgtctgctcatgaggggctgcggagttctatattcacatatgcaaacctcctgcctgactcgctagtccctgcaaatatgcaaaccccccatcatctgcacacccgggcagtgctcagagcccggccccaggcccccgcgctcctcactcctgcctctccacgctgccccgtccctctcccccaacagggaggaggtcggattaggggaggttcagaggaggagaatgtctcaaaaaaaaaggacaaa

SEQ ID NO: 127936 - DNA, 1630 bp, Homo sapiens
  Payload ID: 5050
  Gene Symbol: DOC2A
  Gene Name: double C2-like domains, alpha
  Uniprot ID: Q14183
  ENST ID: ENST00000564979
  CDS Start-End: 114-1316
tcctgacggcgctggagctgaggggcagtgcgggatgccccaggaaggctcctaggaagaggggacccacggtgacttcctaaggaagcgcggttcccagccaggggtgctgcatgaggggccgcaggggcgatcgcatgaccatcaacatccaggagcacatggccatcaacgtgtgccccgggcccatccggcccatccgccagatctctgactacttcccccggggaccaggacctgaagggggcggcgggggcggcggggaggcccccgcccatctggtccccctggctctggccccccctgcagccctccttggggccaccacgcctgaggatggtgcggaggtggacagctatgactcggatgatgccaccgccctaggcacgctggagtttgaccttctctacgaccgggcctcctgcactctgcactgtagcatcctcagggccaagggcctcaagcccatggatttcaatggcctcgccgacccctacgtcaagctgcacttgctgcctggagcctgtaaggccaataagctaaaaacgaagactcagaggaacacactgaatcccgtgtggaatgaggacctgacttacagcgggatcacagatgacgacatcacgcacaaggtgctcaggatcgccgtctgtgatgaggacaagctgagtcacaatgagtttattggggagatccgcgtgcccctccgccgcctcaagccttcgcagaagaagcattttaacatctgcctcgagcgccaggtcccgctggcgtccccctcttccatgtcagcggcgctgaggggcatctcctgttatctgaaggagttggagcaggcggagcaggggcaggggctgctggaggagcgtggccgcatcctgctgagtctcagctacagctcgcggcgccggggactgctggtaggcatcttgcgctgcgcccatctggctgccatggacgtcaacggttactcggacccctacgtcaagacgtacctgaggcccgatgtggacaagaaatccaagcataagacgtgtgtgaagaagaagactctcaacccagaatttaacgaggagtttttctacgagatagagctctccactctggccaccaagaccctggaagtcaccgtctgggactatgacattggcaaatccaatgacttcattggtggcgtgtccctggggccaggtgcccgaggcgaggctcggaagcactggagtgactgcctgcagcagccggacgcagccctggagcgctggcacaccctgaccagtgagctgccccctgcggccggggctctgtcctcagcctgagtggacagcagtgtcccggcacaggcccatcgagccgggtccagtacccaaccttcgcacgagtgtgttgcacgtttacacagggtgggctgcccccaccctgcactacctatttttgtgagtctccgtgacccgggtctgtctgctcatgaggggctgcggagttctatattcacatatgcaaacctcctgcctgactcgctagtccctgcaaatatgcaaaccccccatcatctgcacacccgggcagtgctcagagcccggccccaggcccccgcgctcctcactcctgcctctccacgctgccccgtccc

SEQ ID NO: 127937 - DNA, 843 bp, Homo sapiens
  Payload ID: 5050
  Gene Symbol: DOC2A
  Gene Name: double C2-like domains, alpha
  ENST ID: ENST00000563378
  CDS Start-End: 233-843
gggaggcactggcgaagcggtgctgagccgagtcctgacggcgctggagctgaggggcagtgcgggatgccccaggaaggctcctaggaagaggggacccacggtgacttcctaaggaagcgcggttcccagctcgactccgcgctctcctcgccggccgccgccgcccagcctgcgcccgccgtccccccagtgcctgggcacctgttggaggcagagccaggggtgctgcatgaggggccgcaggggcgatcgcatgaccatcaacatccaggagcacatggccatcaacgtgtgccccgggcccatccggcccatccgccagatctctgactacttcccccggggaccaggacctgaagggggcggcgggggcggcggggaggcccccgcccatctggtccccctggctctggccccccctgcagccctccttggggccaccacgcctgaggatggtgcggaggtggacagctatgactcggatgatgccaccgccctaggcacgctggagtttgaccttctctacgaccgggcctcctgcactctgcactgtagcatcctcagggccaagggcctcaagcccatggatttcaatggcctcgccgacccctacgtcaagctgcacttgctgcctggagcctgtaaggccaataagctaaaaacgaagactcagaggaacacactgaatcccgtgtggaatgaggacctgacttacagcgggatcacagatgacgacatcacgcacaaggtgctcaggatcgccgtctgtgatgaggacaagctgagtcacaatgagtttattggggagatccgcgtgcccctccgccgcctcaagccttc

SEQ ID NO: 127938 - DNA, 858 bp, Homo sapiens
  Payload ID: 5050
  Gene Symbol: DOC2A
  Gene Name: double C2-like domains, alpha
  ENST ID: ENST00000565273
  CDS Start-End: 205-858
ctccgcgctctcctcgccggccgccgccgcccagcctgcgcccgccgtccccccagtgcctgggcacctgttggaggcagaggcaggaagggaggccagtgagggccccacagaccgaggaggccgtcgcctggccctcagccaggatggctaggtatgatgggctcactggctcacacgccctctcctagccaggggtgctgcatgaggggccgcaggggcgatcgcatgaccatcaacatccaggagcacatggccatcaacgtgtgccccgggcccatccggcccatccgccagatctctgactacttcccccggggaccaggacctgaagggggcggcgggggcggcggggaggcccccgcccatctggtccccctggctctggccccccctgcagccctccttggggccaccacgcctgaggatggtgcggaggtggacagctatgactcggatgatgccaccgccctaggcacgctggagtttgaccttctctacgaccgggcctcctgcactctgcactgtagcatcctcagggccaagggcctcaagcccatggatttcaatggcctcgccgacccctacgtcaagctgcacttgctgcctggagcctgtaaggccaataagctaaaaacgaagactcagaggaacacactgaatcccgtgtggaatgaggacctgacttacagcgggatcacagatgacgacatcacgcacaaggtgctcaggatcgccgtctgtgatgaggacaagctgagtcacaatgagtttattggggagatccgcgtgcccctccgccgcctcaagccttcgcagaagaagcattttaacatctgcctcgagcgccaggtcccg

SEQ ID NO: 127939 - DNA, 562 bp, Homo sapiens
  Payload ID: 5050
  Gene Symbol: DOC2A
  Gene Name: double C2-like domains, alpha
  ENST ID: ENST00000563125
  CDS Start-End: 403-562
aagatgatacagggacaacctagaagtgggtgggtgaggacggggtggtgcaacctcgacttctgcaaggagtgggttggcagcccagcccctgtggagtcagcttggggtctgcagggcccaggcctcccacctgccaccggctggcacacaccaccctctccctcgacacctaggaagggaggccagtgagggccccacagaccgaggaggccgtcgcctggccctcagccaggatggctagccctccttggggccaccacgcctgaggatggtgcggaggtggacagctatgactcggatgatgccaccgccctaggcacgctggagtttgaccttctctacgaccgggcctcctgcactctgcactgtagcatcctcagggccaagggcctcaagcccatggatttcaatggcctcgccgacccctacgtcaagctgcacttgctgcctggagcctgtaaggccaataagctaaaaacgaagactcagaggaacacactgaatcccgtgtggaatgaggacctgacttacagcgggatcacagatgacgacatcacgc

SEQ ID NO: 127940 - DNA, 1097 bp, Homo sapiens
  Payload ID: 5050
  Gene Symbol: DOC2A
  Gene Name: double C2-like domains, alpha
  ENST ID: ENST00000561671
  CDS Start-End: 284-463
gcactttctcggcgctccctccctctcggctcgcacagctcgactccgcgctctcctcgccggccgccgccgcccagcctgcgcccgccgtccccccagtgcctgggcacctgttggaggcagagccctccttggggccaccacgcctgaggatggtgcggaggtggacagctatgactcggatgatgccaccgccctaggcacgctggagtttgaccttctctacgaccgggcctcctgcactctgcactgtagcatcctcagggccaagggcctcaagcccatggatttcaatggcctcgccgacccctacgtcaagctgcacttgctgcctggagcctgtaaggccaataagctaaaaacgaagactcagaggaacacactgaatcccgtgtggaatgaggacctgacttacagcgggatcacagatgacgacatcacgcacaaggatcgccgtctgtgatgaggacaagctgagtcacaatgagtttattggggagatccgcgtgcccctccgccgcctcaagccttcgcagaagaagcattttaacatctgcctcgagcgccaggtcccgctggcgtccccctcttccatgtcagcggcgctgaggggcatctcctgttatctgaaggagttggagcaggcggagcaggggcaggggctgctggaggagcgtggccgcatcctgctgagtctcagctacagctcgcggcgccggggactgctggtaggcatcttgcgctgcgcccatctggctgccatggacgtcaacggttactcggacccctacgtcaagacgtacctgaggcccgatgtggacaagaaatccaagcataagacgtgtgtgaagaagaagactctcaacccagaatttaacgaggagtttttctacgagatagagctctccactctggccaccaagaccctggaagtcaccgtctgggactatgacattggcaaatccaatgacttcattggtgagggaggagctggctgcgggtgttgagggcgggcaagtggcagggaggtggccctgaccctgcccacctgctccccaggtggcgtgtccctggggccaggtgcccgaggcgaggct

SEQ ID NO: 127941 - DNA, 527 bp, Homo sapiens
  Payload ID: 5050
  Gene Symbol: DOC2A
  Gene Name: double C2-like domains, alpha
  ENST ID: ENST00000574405
  CDS Start-End: 489-527
aacgaaggtgcgtgctcagcggactctgcagacccagtgccgcgacttcccctaaagccaggcgtgtatctgcgcgtgtgaggtgctctgccgcaaccctatgcagagagcagggtctcactctgttacccaggctggagtgcagtggagtgattatagcttactgcagccttgaccttctgggctcaagagatcctcccaccatcacgaggtcaggagatcgagaccatcttggctaagaagctcgactccgcgctctcctcgccggccgccgccgcccagcctgcgcccgccgtccccccagtgcctgggcacctgttggaggcagagccctccttggggccaccacgcctgaggatggtgcggaggtggacagctatgactcggatgatgccaccgccctaggcacgctggagtttgaccttctctacgaccgggcctcctgcactctgcactgtagcatcctcagggccaagggcctcaagcccatggatttcaatggcctcgccgacccctacgtcaagctg

SEQ ID NO: 127942 - DNA, 2065 bp, Homo sapiens
  Payload ID: 5050
  Gene Symbol: DOC2A
  Gene Name: double C2-like domains, alpha
  Uniprot ID: Q14183
  ENST ID: ENST00000616445
  CDS Start-End: 193-1395
gttggggaacacccggcgattctggcggctgcttcctggtggcgcagggagcccgcgtgtttgcgagtgcgtgtgtgtgcgaagttctccggctcgactccgcgctctcctcgccggccgccgccgcccagcctgcgcccgccgtccccccagtgcctgggcacctgttggaggcagagccaggggtgctgcatgaggggccgcaggggcgatcgcatgaccatcaacatccaggagcacatggccatcaacgtgtgccccgggcccatccggcccatccgccagatctctgactacttcccccggggaccaggacctgaagggggcggcgggggcggcggggaggcccccgcccatctggtccccctggctctggccccccctgcagccctccttggggccaccacgcctgaggatggtgcggaggtggacagctatgactcggatgatgccaccgccctaggcacgctggagtttgaccttctctacgaccgggcctcctgcactctgcactgtagcatcctcagggccaagggcctcaagcccatggatttcaatggcctcgccgacccctacgtcaagctgcacttgctgcctggagcctgtaaggccaataagctaaaaacgaagactcagaggaacacactgaatcccgtgtggaatgaggacctgacttacagcgggatcacagatgacgacatcacgcacaaggtgctcaggatcgccgtctgtgatgaggacaagctgagtcacaatgagtttattggggagatccgcgtgcccctccgccgcctcaagccttcgcagaagaagcattttaacatctgcctcgagcgccaggtcccgctggcgtccccctcttccatgtcagcggcgctgaggggcatctcctgttatctgaaggagttggagcaggcggagcaggggcaggggctgctggaggagcgtggccgcatcctgctgagtctcagctacagctcgcggcgccggggactgctggtaggcatcttgcgctgcgcccatctggctgccatggacgtcaacggttactcggacccctacgtcaagacgtacctgaggcccgatgtggacaagaaatccaagcataagacgtgtgtgaagaagaagactctcaacccagaatttaacgaggagtttttctacgagatagagctctccactctggccaccaagaccctggaagtcaccgtctgggactatgacattggcaaatccaatgacttcattggtggcgtgtccctggggccaggtgcccgaggcgaggctcggaagcactggagtgactgcctgcagcagccggacgcagccctggagcgctggcacaccctgaccagtgagctgccccctgcggccggggctctgtcctcagcctgagtggacagcagtgtcccggcacaggcccatcgagccgggtccagtacccaaccttcgcacgagtgtgttgcacgtttacacagggtgggctgcccccaccctgcactacctatttttgtgagtctccgtgacccgggtctgtctgctcatgaggggctgcggagttctatattcacatatgcaaacctcctgcctgactcgctagtccctgcaaatatgcaaaccccccatcatctgcacacccgggcagtgctcagagcccggccccaggcccccgcgctcctcactcctgcctctccacgctgccccgtccctctcccccaacagggaggaggtcggattaggggaggttcagaggaggagaatgtctcaaaaaaaaaggacaaaaaacaaacccagagccactcctttaatacagaaacttcattgaaaaaacctagccctgtacagctgcccttttaaagaggtggccattgcagggtctctgcctccccagcaggtggcagatgctcccggccactcgtttaaataactgtcccctggagggggccggggtttgaaggcagggcccctgccaccctcctgggggacacccgtgcatgtttacgccttttctggttgtgtcagtggccggagcatggcagctgggcatcaataaacacctccgagg

SEQ ID NO: 127943 - DNA, 6048 bp, Homo sapiens
  Payload ID: 5051
  Gene Symbol: DOC2B
  Gene Name: double C2-like domains, beta
  ENST ID: ENST00000496357
  CDS Start-End: 158-1396
tccgcagcggagcgggcagcggccaagtcagggccgtccgggggcgcggccggcgatgcccgcagcccccgccgcgccccgccgggcctgctgagccgcccccgggccggggtcgcgccgggccgggccgcgcccggggcggggcggcgctgcctgcatgaccctccggcggcgcggggagaaggcgaccatcagcatccaggagcatatggccatcgacgtgtgccccggccccacccggcccatcaagcagatctccgactacttcccccgcttcccgcggggcctgcccccggacgccgggccccgagccgctgcacccccggacgcccccgcgcgcccggctgtggccggtgccggccgccgcagcccctccgacggcgcccgcgaggacgacgaggatgtggaccagctcttcggagcctacggctccagcccgggccccagcccgggtcccagccccgcgcggccgccagccaagccgccggaggacgagccggacgccgacggctacgagtcggacgactgcactgccctgggcacgctggacttcagcctgctgtatgaccaggagaacaacgccctccactgcaccatcaccaaggccaagggcctgaagccaatggaccacaatgggctggcagacccctacgtcaagctgcacctgctgccaggagccagtaaggcaaataagctcagaacaaaaactctccgtaacactctgaaccccacatggaacgagaccctcacttactacgggatcacagatgaagacatgatccgcaagaccctgcggatctctgtgtgtgacgaggacaaattccggcacaatgagttcatcggggagacacgtgtgcccctgaagaagctgaaacccaaccacaccaagaccttcagcatctgcctggagaagcagctgccggtggacaagactgaagacaagtccctggaggagcggggccgcatcctcatctccctcaagtacagctcacagaagcaaggcctgctggtaggcatcgtgcggtgcgcccacctggccgccatggacgccaacggctactcggacccctacgtgaaaacatacctgaggccagatgtggacaagaaatccaaacataagacagcggtgaagaaaaaaaccctgaacccggagtttaatgaggagttctgttacgagatcaagcatggggacctggccaagaagtccctggaggtcaccgtttgggattacgacattggaaaatccaacgatttcattggtggtgtggttctgggcatccacgccaagggggagcgcctgaagcactggtttgactgcctgaagaacaaggacaagcgcatcgagcgctggcacacgctcaccagcgagctcccaggggctgtgctcagcgactgacgcccacccgccactgctacccctgccgccacctgcgcccagcacggccggccccgggcttccccagcagccaccaaggcctgtggcccccacactgggggagatccagaacccctgcttggacacagagccactgcagtccccgctcggaggatgtggagggctcagccactctgggacggggagggcaaggagctggggtggggggctctcagctctctggggcccaagaggccggtggtggaaagagacctcagcacctgcccaggggaaggggacacgcccatctgggagcaaagacccttctagaggccagccccggctgagaggacaggagtgtgggggcgccttggcggacagtgggaacagaggagggaggtggtgagcagacagacaggtggaggatgggaccttgaagactggctgctccagcccaagaaagcctaactgcatccctcatctccttcgctgctggacagatggaagaagcgggcctgccggccgaaagtctgccagagttcccggaggctcctgatgatgggtaaattggcacatgcttcactcaatgattccacaagccctgggggtgaatgagacacagggcctgccctcagggagttcccatctagtcaggaagctgggaacaaaccattccaactggggtgagaaataccaagaccagcttggccagtctgcaagtaccgtgggctctgctgactctgccgggaggtcagggacggcttcctggaggaggcggtgcttccgtaaggccttggagggtgagtgagggcttctaaaagcagtccaggcagtgggagtggtctaaaacgcctggagagagaaagccaatggggccggggtgctgtggacccagggtctcctctccaggggagggtttgttaggaaggtgtgaggctcgaggcaggaggtgggggacgtgatggaaacaccatggagaaactggtgtaggctcaagttcagacctcagacccaagtctcccactctgatctctttctactcctgagggacctcaaggacggagcccgcccctcctccttcctggcataagcatcaggtcagctgcagtggagaaaagggtcccttgtgcttgggaaaaaaagcaagcattcctacacgtcctgactctgccctttcccctcccctccactccatggctcacactgggggcctccgggtgcttgctcgtggcatcttggtcccactaccgccacagatgtcccttttgggagtaatcagtggccgtccagggccttgtctctggggaggcctgtggggccagctccaccctccaggagctgagcaagaatcaccctggctggtgggcctgtctgctcccctgagtgagactccccaggaggcttgagagtatctgaatcttggggcccatgcctgaagcccacaaactttctctgcctaccaagggcccctcaggaacgctgggtgaacaaatgcagagccaaggagttgcacagccagagtcccagtgtgctcagcccatcagtgtgtgatggaaacaggcccagagaggtcaggtgacctgcccagggccttccaggccccacacagctggaaccaggatccacagcccccagcccagagtgctggacaccacgcttcaggggaattggcgtgctgagctcacaccagagaggtcctgctagctgccagcctggggctcccccgcctgctgcccaccccttcaacaccgatagagggactcacaggcacgacggtgggaccttccactgcagacacaaagcacaccaccacctgaggtccagggttatgatttgaatcctaccaagtgcccatcaggcctttcccaggttgcggggaaaacaggaccccagcccccacacagtccctggccacctgctgctcctggagacttgtctccctgcctttaggaagggtttttgtgtgaaggtttttgcatgcactggtctgaacgcatgttcacagccctgcaaggtgggtttgattctcatccccatcttgcaggtgaaacaggttcccagagtctgagtagtttgccaaggccacacagccaggaaggggtgaaccaggactcaaacccaggtcctctgactgccgctttctctctctgggggtcggtacccccagtcccttccctcttggtctgtcggagactcagcagagacaccaggtgaaggctcagtaagctcaggtgcatgatggagacctggggtcttgtcactgtcctgccacctcatccgctggctttgaaaccatccgtgctacttcaggcttccccagaggtgtctaacctggccccaaaactcagccaccccaccctagcctctgggggctgaggcaagggctcctcttttctccacacagaatgggcaccctctgggggcctaaggtaagaggtggtctatttctaaaaggcctggtgtctagttaagctctgggtatcttcttagctttgcttttttgggggtctcattcagagaggagatttgacagcctctctgaagacacagaagtgaatggcaaagcgagaagaggctgtaccccccacctaccatgacttccttattaggcacatggggaatgtgaggcccagtgggtgaaaggggcctgaaggggcacagctgggacaagaacccagaactccagccccccagtccagggccctctactgcccaggctgtgcaaatggggctgggaccgaaagatggggacagtcaggctgggaggcgggcttactggccagccagcccaggggcagcacaggcactcgggcaggaactccccaggaagtttggatccttccttccctaggatctcagcacccttttagatcccgtgcagattgtctttctgttaaagcgttttgaggcacgatggctcacgcctgtaattgcagcactttgggaggccgaggctggcggatcacctgaggtcaggagttcgaaacccgcctggccaacagggcgaaaccccatctctactaaaaatacaaaaattagccgggtgtggtggcgcacgcctgtagtcccagctactcagggaggctgaggcacgagaatcgcttgaacccgggaggtgaaggctgcagtgagccaagatcgcggcactgcactccagcctgggcgacagagcaagactccgtctcagaaaaaaaacaaacaaacaacgctttgagaagctgcagaagcggctctgcctttgaccccgaatgggcatctttactcgggtccatcatccccacaaagacaggaaatctgatgccaaaaaaaaaaagtcattccaggtgtcagtaaccaggcgctgcctccagcgccgccccgcccgccgccccgcccgccgccccgcccgccgcctgcgccaatccccgacgggcccgtcttccagccccgaagcggtcacctcctgacctctagtggcgagcgcggggaactgcgccccggcccgtccgcccgccgagcccgggccgtgcatgccgagcccgttgttccttcgcaaaccgagtgaacctcccgatgcatggactctggctgtcgtcgacgcagactctcgtgcactgcttaaccccgttttgctgccatgtgacggctgcagacactgtcctcaaactgcagtcccacagacaagttttgtattttggtctgacctacccgaaggtgtcctttttaagtcttatttgttaatatttataatgacatataatccaaagtaaatggaaacgtcatattgcgatctcattgccttggcgagactctcaccttttaatagatttgaaggggtgggggcggtggctcacgcctgtaagtcctagcacttttggaggtcgaggtgggagaattgcttgaggcctggagttcgagaccagcctggtcaacatggagaaaccacgcctctacacacacagagacacacacaatgacaattagcctagcgtggtggcacacacctgtagccccagcttttcaggaggctgaggtaggaggaggaggatcgcttgagcctggaaagtggggattgcagtgagccgagatcacgccaccgcactccagcctgggcaacagagggagaccttgtcaaaaaaaaaaaaaaaagatttggaagggtaggaggggagggtggaaagacggaggaaaaggcaactgaaacctactccggatatagtcttgttactcttcaccagggacccatttgaggtaggccctcaagttacagatggggaaactaaggcccagagaggttaaaatacttttacagaatcacacggctggtcgatggcagaagcaggattcaaactgaggcagcccaagacattttgcaccaggacctgtcgaccatgctgttgtccactcatccaacaaacagccgtggagtattgactaacgccagcccgtctgaggctccaagagtcttacgttttggaaggtaatttaagacatgtactgcttaggtttggagggaaaaaaataaaccttcctaaccacagattagtgtattaggactagtagcaatccccacactttatattttcattccaccttgttagaaaatgttgatcaattgttgaatacagtttattgtacatcattctttaggtcagaaatttctcgagataaaagcctttgctttctaacatcga

SEQ ID NO: 127944 - DNA, 6048 bp, Homo sapiens
  Payload ID: 5051
  Gene Symbol: DOC2B
  Gene Name: double C2-like domains, beta
  ENST ID: ENST00000613549
  CDS Start-End: 158-1396
tccgcagcggagcgggcagcggccaagtcagggccgtccgggggcgcggccggcgatgcccgcagcccccgccgcgccccgccgggcctgctgagccgcccccgggccggggtcgcgccgggccgggccgcgcccggggcggggcggcgctgcctgcatgaccctccggcggcgcggggagaaggcgaccatcagcatccaggagcatatggccatcgacgtgtgccccggccccatccgtcccatcaagcagatctccgactacttcccccgcttcccgcggggcctgcccccggacgccgggccccgagccgctgcacccccggacgcccccgcgcgcccggctgtggccggtgccggccgccgcagcccctccgacggcgcccgcgaggacgacgaggatgtggaccagctcttcggagcctacggctccagcccgggccccagcccgggtcccagccccgcgcggccgccagccaagccgccggaggacgagccggacgccgacggctacgagtcggacgactgcactgccctgggcacgctggacttcagcctgctgtatgaccaggagaacaacgccctccactgcaccatcaccaaggccaagggcctgaagccaatggaccacaatgggctggcagacccctacgtcaagctgcacctgctgccaggagccagtaaggcaaataagctcagaacaaaaactctccgtaacactctgaaccccacatggaacgagaccctcacttactacgggatcacagatgaagacatgatccgcaagaccctgcggatctctgtgtgtgacgaggacaaattccggcacaatgagttcatcggggagacacgtgtgcccctgaagaagctgaaacccaaccacaccaagaccttcagcatctgcctggagaagcagctgccggtggacaagactgaagacaagtccctggaggagcggggccgcatcctcatctccctcaagtacagctcacagaagcaaggcctgctggtaggcatcgtgcggtgcgcccacctggccgccatggacgccaacggctactcggacccctacgtgaaaacatacctgaggccagatgtggacaagaaatccaaacataagacagcggtgaagaaaaaaaccctgaacccggagtttaatgaggagttctgttacgagatcaagcatggggacctggccaagaagtccctggaggtcaccgtttgggattacgacattggaaaatccaacgatttcattggtggtgtggttctgggcatccacgccaagggggagcgcctgaagcactggtttgactgcctgaagaacaaggacaagcgcatcgagcgctggcacacgctcaccagcgagctcccaggggctgtgctcagcgactgacgcccacccgccactgctacccctgccgccacctgcgcccagcacggccggccccgggcttccccagcagccaccaaggcctgtggcccccacactgggggagatccagaacccctgcttggacacagagccactgcagtccccgctcggaggatgtggagggctcagccactctgggacggggagggcaaggagctggggtggggggctctcagctctctggggcccaagaggccggtggtggaaagagacctcagcacctgcccaggggaaggggacacgcccatctgggagcaaagacccttctagaggccagccccggctgagaggacaggagtgtgggggcgccttggcggacagtgggaacagaggagggaggtggtgagcagacagacaggtggaggatgggaccttgaagactggctgctccagcccaagaaagcctaactgcatccctcatctccttcgctgctggacagatggaagaagcgggcctgccggccgaaagtctgccagagttcccggaggctcctgatgatgggtaaattggcacatgcttcactcaatgattccacaagccctgggggtgaatgagacacagggcctgccctcagggagttcccatctagtcaggaagctgggaacaaaccattccaactggggtgagaaataccaagaccagcttggccagtctgcaagtaccgtgggctctgctgactctgccgggaggtcagggacggcttcctggaggaggcggtgcttccgtaaggccttggagggtgagtgagggcttctaaaagcagtccaggcagtgggagtggtctaaaacgcctggagagagaaagccaatggggccggggtgctgtggacccagggtctcctctccaggggagggtttgttaggaaggtgtgaggctcgaggcaggaggtgggggacgtgatggaaacaccatggagaaactggtgtaggctcaagttcagacctcagacccaagtctcccactctgatctctttctactcctgagggacctcaaggacggagcccgcccctcctccttcctggcataagcatcaggtcagctgcagtggagaaaagggtcccttgtgcttgggaaaaaaagcaagcattcctacacgtcctgactctgccctttcccctcccctccactccatggctcacactgggggcctccgggtgcttgctcgtggcatcttggtcccactaccgccacagatgtcccttttgggagtaatcagtggccgtccagggccttgtctctggggaggcctgtggggccagctccaccctccaggagctgagcaagaatcaccctggctggtgggcctgtctgctcccctgagtgagactccccaggaggcttgagagtatctgaatcttggggcccatgcctgaagcccacaaactttctctgcctaccaagggcccctcaggaacgctgggtgaacaaatgcagagccaaggagttgcacagccagagtcccagtgtgctcagcccatcagtgtgtgatggaaacaggcccagagaggtcaggtgacctgcccagggccttccaggccccacacagctggaaccaggatccacagcccccagcccagagtgctggacaccacgcttcaggggaattggcgtgctgagctcacaccagagaggtcctgctagctgccagcctggggctcccccgcctgctgcccaccccttcaacaccgatagagggactcacaggcacgacggtgggaccttccactgcagacacaaagcacaccaccacctgaggtccagggttatgatttgaatcctaccaagtgcccatcaggcctttcccaggttgcggggaaaacaggaccccagcccccacacagtccctggccacctgctgctcctggagacttgtctccctgcctttaggaagggtttttgtgtgaaggtttttgcatgcactggtctgaacgcatgttcacagccctgcaaggtgggtttgattctcatccccatcttgcaggtgaaacaggttcccagagtctgagtagtttgccaaggccacacagccaggaaggggtgaaccaggactcaaacccaggtcctctgactgccgctttctctctctgggggtcggtacccccagtcccttccctcttggtctgtcggagactcagcagagacaccaggtgaaggctcagtaagctcaggtgcatgatggagacctggggtcttgtcactgtcctgccacctcatccgctggctttgaaaccatccgtgctacttcaggcttccccagaggtgtctaacctggccccaaaactcagccaccccaccctagcctctgggggctgaggcaagggctcctcttttctccacacagaatgggcaccctctgggggcctaaggtaagaggtggtctatttctaaaaggcctggtgtctagttaagctctgggtatcttcttagctttgcttttttgggggtctcattcagagaggagatttgacagcctctctgaagacacagaagtgaatggcaaagcgagaagaggctgtaccccccacctaccatgacttccttattaggcacatggggaatgtgaggcccagtgggtgaaaggggcctgaaggggcacagctgggacaagaacccagaactccagccccccagtccagggccctctactgcccaggctgtgcaaatggggctgggaccgaaagatggggacagtcaggctgggaggcgggcttactggccagccagcccaggggcagcacaggcactcgggcaggaactccccaggaagtttggatccttccttccctaggatctcagcacccttttagatcccgtgcagattgtctttctgttaaagcgttttgaggcacgatggctcacgcctgtaattgcagcactttgggaggccgaggctggcggatcacctgaggtcaggagttcgaaacccgcctggccaacagggcgaaaccccatctctactaaaaatacaaaaattagccgggtgtggtggcgcacgcctgtagtcccagctactcagggaggctgaggcacgagaatcgcttgaacccgggaggtgaaggctgcagtgagccaagatcgcggcactgcactccagcctgggcgacagagcaagactccgtctcagaaaaaaaacaaacaaacaacgctttgagaagctgcagaagcggctctgcctttgaccccgaatgggcatctttactcgggtccatcatccccacaaagacaggaaatctgatgccaaaaaaaaaaagtcattccaggtgtcagtaaccaggcgctgcctccagcgccgccccgcccgccgccccgcccgccgccccgcccgccgcctgcgccaatccccgacgggcccgtcttccagccccgaagcggtcacctcctgacctctagtggcgagcgcggggaactgcgccccggcccgtccgcccgccgagcccgggccgtgcatgccgagcccgttgttccttcgcaaaccgagtgaacctcccgatgcatggactctggctgtcgtcgacgcagactctcgtgcactgcttaaccccgttttgctgccatgtgacggctgcagacactgtcctcaaactgcagtcccacagacaagttttgtattttggtctgacctacccgaaggtgtcctttttaagtcttatttgttaatatttataatgacatataatccaaagtaaatggaaacgtcatattgcgatctcattgccttggcgagactctcaccttttaatagatttgaaggggtgggggcggtggctcacgcctgtaagtcctagcacttttggaggtcgaggtgggagaattgcttgaggcctggagttcgagaccagcctggtcaacatggagaaaccacgcctctacacacacagagacacacacaatgacaattagcctagcgtggtggcacacacctgtagccccagcttttcaggaggctgaggtaggaggaggaggatcgcttgagcctggaaagtggggattgcagtgagccgagatcacgccaccgcactccagcctgggcaacagagggagaccttgtcaaaaaaaaaaaaaaaagatttggaagggtaggaggggagggtggaaagacggaggaaaaggcaactgaaacctactccggatatagtcttgttactcttcaccagggacccatttgaggtaggccctcaagttacagatggggaaactaaggcccagagaggttaaaatacttttacagaatcacacggctggtcgatggcagaagcaggattcaaactgaggcagcccaagacattttgcaccaggacctgtcgaccatgctgttgtccactcatccaacaaacagccgtggagtattgactaacgccagcccgtctgaggctccaagagtcttacgttttggaaggtaatttaagacatgtactgcttaggtttggagggaaaaaaataaaccttcctaaccacagattagtgtattaggactagtagcaatccccacactttatattttcattccaccttgttagaaaatgttgatcaattgttgaatacagtttattgtacatcattctttaggtcagaaatttctcgagataaaagcctttgctttctaacatcga

SEQ ID NO: 127945 - DNA, 768 bp, Homo sapiens
  Payload ID: 5052
  Gene Symbol: DUX4
  Gene Name: double homeobox 4
  ENST ID: ENST00000570263
  CDS Start-End: 1-483
atggccctcccgacaccctcggacagcaccctccccgcggaagcccggggacgaggacggcgacggagactcgtttggaccccgagccaaagcgaggccctgcgagcctgctttgagcggaacccgtacccgggcatcgccaccagagaacggctggcccaggccatcggcattccggagcccagggtccagatttggtttcagaatgagaggtcacgccagctgaggcagcaccggcgggaatctcggccctggcccgggagacgcggcccgccagaaggccggcgaaagcggaccgccgtcaccggatcccagaccgccctgctcctccgagcctttgagaaggatcgctttccaggcatcgccgcccgggaggagctggccagagagacgggcctcccggagtccaggattcagatctggtttcagaatcgaagggccaggcacccgggacagggtggcagggcgcccgcgcaggtctaggcccggtgagagactccactccgcggagaactgcctttctttcctgggcatcccggggatcccagagccggcccaggtaccagcagacctgcgcgcagtgcgcaccccggctgacgtgcaagggagctcgctggcctctctgtgcccttgttcttccgtgaaattctggctgaatgtctccccccaccttccgacgctgtctaggcaaacctggattagagttacatctcctggatgattagttcagagatatattaaaatgccccctccctgtggatcctatag

SEQ ID NO: 127946 - DNA, 1574 bp, Homo sapiens
  Payload ID: 5052
  Gene Symbol: DUX4
  Gene Name: double homeobox 4
  Uniprot ID: Q9UBX2
  ENST ID: ENST00000569241
  CDS Start-End: 1-1275
atggccctcccgacaccctcggacagcaccctccccgcggaagcccggggacgaggacggcgacggagactcgtttggaccccgagccaaagcgaggccctgcgagcctgctttgagcggaacccgtacccgggcatcgccaccagagaacggctggcccaggccatcggcattccggagcccagggtccagatttggtttcagaatgagaggtcacgccagctgaggcagcaccggcgggaatctcggccctggcccgggagacgcggcccgccagaaggccggcgaaagcggaccgccgtcaccggatcccagaccgccctgctcctccgagcctttgagaaggatcgctttccaggcatcgccgcccgggaggagctggccagagagacgggcctcccggagtccaggattcagatctggtttcagaatcgaagggccaggcacccgggacagggtggcagggcgcccgcgcaggcaggcggcctgtgcagcgcggcccccggcgggggtcaccctgctccctcgtgggtcgccttcgcccacaccggcgcgtggggaacggggcttcccgcaccccacgtgccctgcgcgcctggggctctcccacagggggctttcgtgagccaggcagcgagggccgcccccgcgctgcagcccagccaggccgcgccggcagaggggatctcccaacctgccccggcgcgcggggatttcgcctacgccgccccggctcctccggacggggcgctctcccaccctcaggctcctcggtggcctccgcacccgggcaaaagccgggaggaccgggacccgcagcgcgacggcctgccgggcccctgcgcggtggcacagcctgggcccgctcaagcggggccgcagggccaaggggtgcttgcgccacccacgtcccaggggagtccgtggtggggctggggccggggtccccaggtcgccggggcggcgtgggaaccccaagccggggcagctccacctccccagcccgcgcccccggacgcctccgcctccgcgcggcaggggcagatgcaaggcatcccggcgccctcccaggcgctccaggagccggcgccctggtctgcactcccctgcggcctgctgctggatgagctcctggcgagcccggagtttctgcagcaggcgcaacctctcctagaaacggaggccccgggggagctggaggcctcggaagaggccgcctcgctggaagcacccctcagcgaggaagaataccgggctctgctggaggagctttaggacgcggggtctaggcccggtgagagactccactccgcggagaactgcctttctttcctgggcatcccggggatcccagagccggcccaggtaccagcagacctgcgcgcagtgcgcaccccggctgacgtgcaagggagctcgctggcctctctgtgcccttgttcttccgtgaaattctggctgaatgtctccccccaccttccgacgctgtctaggcaaacctggattagagttacatctcctggatgattagttcagagatatattaaaatgccccctccctgtggatcctatag

SEQ ID NO: 127947 - DNA, 1710 bp, Homo sapiens
  Payload ID: 5052
  Gene Symbol: DUX4
  Gene Name: double homeobox 4
  Uniprot ID: Q9UBX2
  ENST ID: ENST00000565211
  CDS Start-End: 1-1275
atggccctcccgacaccctcggacagcaccctccccgcggaagcccggggacgaggacggcgacggagactcgtttggaccccgagccaaagcgaggccctgcgagcctgctttgagcggaacccgtacccgggcatcgccaccagagaacggctggcccaggccatcggcattccggagcccagggtccagatttggtttcagaatgagaggtcacgccagctgaggcagcaccggcgggaatctcggccctggcccgggagacgcggcccgccagaaggccggcgaaagcggaccgccgtcaccggatcccagaccgccctgctcctccgagcctttgagaaggatcgctttccaggcatcgccgcccgggaggagctggccagagagacgggcctcccggagtccaggattcagatctggtttcagaatcgaagggccaggcacccgggacagggtggcagggcgcccgcgcaggcaggcggcctgtgcagcgcggcccccggcgggggtcaccctgctccctcgtgggtcgccttcgcccacaccggcgcgtggggaacggggcttcccgcaccccacgtgccctgcgcgcctggggctctcccacagggggctttcgtgagccaggcagcgagggccgcccccgcgctgcagcccagccaggccgcgccggcagaggggatctcccaacctgccccggcgcgcggggatttcgcctacgccgccccggctcctccggacggggcgctctcccaccctcaggctcctcggtggcctccgcacccgggcaaaagccgggaggaccgggacccgcagcgcgacggcctgccgggcccctgcgcggtggcacagcctgggcccgctcaagcggggccgcagggccaaggggtgcttgcgccacccacgtcccaggggagtccgtggtggggctggggccggggtccccaggtcgccggggcggcgtgggaaccccaagccggggcagctccacctccccagcccgcgcccccggacgcctccgcctccgcgcggcaggggcagatgcaaggcatcccggcgccctcccaggcgctccaggagccggcgccctggtctgcactcccctgcggcctgctgctggatgagctcctggcgagcccggagtttctgcagcaggcgcaacctctcctagaaacggaggccccgggggagctggaggcctcggaagaggccgcctcgctggaagcacccctcagcgaggaagaataccgggctctgctggaggagctttaggacgcggggttgggacggggtcgggtggttcggggcagggcggtggcctctctttcgcggggaacacctggctggctacggaggggcgtgtctccgccccgccccctccaccgggctgaccggcctgggattcctgccttctaggtctaggcccggtgagagactccactccgcggagaactgcctttctttcctgggcatcccggggatcccagagccggcccaggtaccagcagacctgcgcgcagtgcgcaccccggctgacgtgcaagggagctcgctggcctctctgtgcccttgttcttccgtgaaattctggctgaatgtctccccccaccttccgacgctgtctaggcaaacctggattagagttacatctcctggatgattagttcagagatatattaaaatgccccctccctgtggatcctatag

SEQ ID NO: 127948 - DNA, 1275 bp, Homo sapiens
  Payload ID: 5052
  Gene Symbol: DUX4
  Gene Name: double homeobox 4
  Uniprot ID: Q9UBX2
  ENST ID: ENST00000616166
  CDS Start-End: 1-1275
atggccctcccgacaccctcggacagcaccctccccgcggaagcccggggacgaggacggcgacggagactcgtttggaccccgagccaaagcgaggccctgcgagcctgctttgagcggaacccgtacccgggcatcgccaccagagaacggctggcccaggccatcggcattccggagcccagggtccagatttggtttcagaatgagaggtcacgccagctgaggcagcaccggcgggaatctcggccctggcccgggagacgcggcccgccagaaggccggcgaaagcggaccgccgtcaccggatcccagaccgccctgctcctccgagcctttgagaaggatcgctttccaggcatcgccgcccgggaggagctggccagagagacgggcctcccggagtccaggattcagatctggtttcagaatcgaagggccaggcacccgggacagggtggcagggcgcccgcgcaggcaggcggcctgtgcagcgcggcccccggcgggggtcaccctgctccctcgtgggtcgccttcgcccacaccggcgcgtggggaacggggcttcccgcaccccacgtgccctgcgcgcctggggctctcccacagggggctttcgtgagccaggcagcgagggccgcccccgcgctgcagcccagccaggccgcgccggcagaggggatctcccaacctgccccggcgcgcggggatttcgcctacgccgccccggctcctccggacggggcgctctcccaccctcaggctcctcggtggcctccgcacccgggcaaaagccgggaggaccgggacccgcagcgcgacggcctgccgggcccctgcgcggtggcacagcctgggcccgctcaagcggggccgcagggccaaggggtgcttgcgccacccacgtcccaggggagtccgtggtggggctggggccggggtccccaggtcgccggggcggcgtgggaaccccaagccggggcagctccacctccccagcccgcgcccccggacgcctccgcctccgcgcggcaggggcagatgcaaggcatcccggcgccctcccaggcgctccaggagccggcgccctggtctgcactcccctgcggcctgctgctggatgagctcctggcgagcccggagtttctgcagcaggcgcaacctctcctagaaacggaggccccgggggagctggaggcctcggaagaggccgcctcgctggaagcacccctcagcgaggaagaataccgggctctgctggaggagctttag

SEQ ID NO: 127949 - DNA, 1006 bp, Homo sapiens
  Payload ID: 5053
  Gene Symbol: DUXA
  Gene Name: double homeobox A
  Uniprot ID: A6NLW8
  ENST ID: ENST00000554048
  CDS Start-End: 1-615
atggccgaagacacctattcacacaagatggtaaaaacaaatcataggcgctgtcgcacaaaattcacagaagaacagttgaaaatcctcatcaataccttcaatcaaaagccttacccaggttatgctaccaaacaaaaacttgctttagaaatcaatacagaagagtccagaatccagatttggtttcagaatcgaagagctaggcacggattccagaaaagaccagaagctgagactttagaatcaagccagagccaggggcaagatcaacctggtgtggagtttcaaagtagagaagccagacggtgtcgtaccacctacagcgcctctcagttacacactctcatcaaggcatttatgaaaaacccatatcctgggattgattccagagaagaacttgctaaagaaatcggtgttccagagtcaagagtccaaatttggttccaaaatcgaagatctagattacttctccagagaaaaagggaacctgtggcgtccttagaacaagaagagcagggcaagattcctgagggactgcaaggtgcagaagatacacaaaatggcaccaacttcactagtgactctcatttctctggagccagaacgtggtgaacacagtcaaattcagtgtacttgataatatcaactggaccccaaatctgtctcacggtcttcctgggagtctatccttctgctgaaactgcaagctaagccttctgaagatggtaaaggacttggccagatgtggtgggtcacacttgtaatcccactactttgggaggccaaggcaggaagattgcttgagctcaggagtttgaaaccagcctggacaacatatagcaagactctgcctctattataaaaaaacaaaataaatgaaaaggactgtaggaggcagagacgggtacagggggtaccacactaccctgttgacacagcctagatccagagttcagaagaccttgagacaatgaaaataaacttggtaataatcttttttcaa

SEQ ID NO: 127950 - DNA, 3498 bp, Homo sapiens
  Payload ID: 5054
  Gene Symbol: DZANK1
  Gene Name: double zinc ribbon and ankyrin repeat domains 1
  Uniprot ID: Q9NVP4
  ENST ID: ENST00000262547
  CDS Start-End: 210-2468
agatgcctatgggaaagcactgggaaaggaactccaggcgggtaccaggctccctgcggagcggcaggggccggtctagttgctaagaagctgagtctccaccaatcatctgcccagcacccagtgggcggggcgcggctcgccgcgtctgtggtaacccgggcggcggcgaaggaggaggcaagaggcgagagagagagagagagaaaatgactgctggttcagtgtgtgtccctcagatcataccattacgagtgcctcagcctggaaaagctaaccatgaaattgataacaatacgcttttggaaatgaaatcagacactccagatgtcaacatatattatactctggatggcagcaaacctgaatttctaaagagaattggttatggggaaaataacacatttaagtatataaaacctattactctgcctgatggaaaaatacaagttaaagctattgctgtctctaaagactgcagacagagtggcattgtgacaaaggtgtttcacgtagactatgaaccaccaaatatagtctctcctgaagacaatgttgaaaatgttctcaaagattcttcaaggcaggaattcaaaaatggatttgttggatcaaaactaaagaaaaaatataagaactctgaaaatcaacgcagctggaatgttaaccttagaaagtttccagagagtccattggaaatcccagcttatggtggaggatcaggttctagaccacccacccgccagtcccagtcccccggttttgcacacgtaagcggtcagaagtgtttgacaagcacggagataatgagaattcaaagggagacagactttctcaagtgtgcccactgccttgccccccggccatcagatccctttgctcgcttctgtcaagaatgtggctctcctgtcccacccatatttggctgtcgtctcccacccccagaaggagctcagatgggcttgtgtgcagaatgcagaagcttggtacccatgaacactcccatctgtgtggtgtgtgaggcccctcttgctctacagctgcagccacaggcaagcctccacttgaaggagaaggtaatttgccgggcctgtggtacaggaaatcctgctcacctgagatactgtgtcacctgtgagggggccctgccttcatcacaagagtcgatgtgcagtggggataaagcccctcctccgcccactcagaaaggggggaccatttcctgctacagatgtggtcgctggaatctctgggaggcgtccttctgcggctggtgtggagccatgctcggcattcctgctggctgttctgtttgccctaaatgtggggccagcaatcacctgtctgcccgattctgtggctcctgtggtatttgtgtgaagtccctagtgaaacttagcttggacagaagcctggctctagctgctgaggaacctcgccctttttctgagtccctgaatattcctttgcccagatctgatgttgggactaagagggacataggaacacagactgttggcctcttctacccatctggcaagctgctagcaaaaaaggaacaggaactagcctctcaaaagcagaggcaggagaaaatgagtgaccataaacccctcctgacagccatcagcccaggaagagggtactggagaagacagctggatcacatctctgctcacctcaggtgttatgctcagaacaaccctgaattccgggccttgattgcagaacccaggatgggaaagcttatctctgctactgtccacgaagatggttgtgaagttagcatcagactgaattatagtcaagtctcaaacaagaacctttacctgaacaaggcagtgaatttcagcgatcaccttctgagcagtgctgccgagggtgatggggggctgtgcggcagcaggtccagctgggtgagtgactacagccagagtacctcagatactattgaaaaaatcaaaaggataaagaatttcaagaccaaaacttttcaagaaaagaaggagcagcttatacctgaaaacagactcctgctgaaggaagtcggacccacgggggaaggaagagtctctgtgattgaacagctgctggatgagggagcagaccccaactgctgtgatgaagacaatcgacccgtcataaccgtggctgttatgaataagcaccatgaagcgattccagttctcgtgcagagaggagcagacatcgaccagcagtgggggccgctcagaaatacagctcttcatgaagcaactctgcttggccttgcaggaagagagagcaccgccactttactgggatgcaatgcaagcatccaaaagaagaatgcaggaggccagacagcatacgacctggctctgaacactggagatgaccttgtcacctcactctttgctgccaagtttggccaagggcttgaggaccaactcgctcaaactaggagcctcagcctggatgactgttagccctgaggcctccacgggacttcatttaagaatacgtgcatggctggcacagtggcttacgcctgtaatcccagcactttgggaggctgaggctggcgtatcacctgaggttgggagttcaagaccagcctgaccaacatggagaaaccccgtctctactaaaaatacaaaattagtcgggcgtagtggtgcatgcctgtaatcccagttactcgagaggctgaggcaggaaaatcgcttgaacccgggaggcagaggttacagtgagccaagatcgcgccatcgcactccagcctgggcaacaagagcaaaactccatctcaaaaaaaaaaaagaatatgtgcagctctggctattctttaatcatgtctttctgaaatgtgtatttgagattagaaattgaggttgagaggaactcaggagattttttttttaaatcatatgacagtataagccatcagtactaaatggacagctcccagtatactgtggactgtgataaactgaatgtatgttttttaatggtttattgctgcaggttttttgtgtatttgatttttagtttttaacttatttttcaataggtaataattgcacatggttcaaagctaaaaggtatgaagtattatgtagggatacgtccctcccattctgtcccacagccaccacctctctcctcagccagcaatgacatcagcgtcgacttgcctttcccggggttgtgcagagttagatatgcacatacatgtggtataagcacatgtacagaggagtacacatagcatataaacatgtctgtagcacatatatattctttcccctcttttaaaacaaatggtagcaaaccaaccacacactgttctgtatcttgctctgtttgcttgatacatcttgtaagtggctcctaattactatgtaaagattgaccttatttaaatttttttatgttgaaatcatcaatattcccatcattatggtgtgttctttgattgacaaatcagctctcaataaaccacttataagaatgtgt

SEQ ID NO: 127951 - DNA, 1389 bp, Homo sapiens
  Payload ID: 5054
  Gene Symbol: DZANK1
  Gene Name: double zinc ribbon and ankyrin repeat domains 1
  ENST ID: ENST00000329494
  CDS Start-End: 1-1389
atgggcttgtgtgcagaatgcagaagcttggtacccatgaacactcccatctgtgtggtgtgtgaggcccctcttgctctacagctgcagccacaggcaagcctccacttgaaggagaaggtaatttgccgggcctgtggtacaggaaatcctgctcacctgagatactgtgtcacctgtgagggggccctgccttcatcacaagagctcggcattcctgctggctgttctgtttgccctaaatgtggggccagcaatcacctgtctgcccgattctgtggctcctgtggtatttgtgtgaagtccctagtgaaacttagcttggacagaagcctggctctagctgctgaggaacctcgccctttttctgagtccctgaatattcctttgcccagatctgatgttgggactaagagggacataggaacacagactgttggcctcttctacccatctggcaagctgctagcaaaaaaggaacaggaactagcctctcaaaagcagaggcaggagaaaatgagtgaccataaacccctcctgacagccatcagcccaggaagagggtactggagaagacagctggatcacatctctgctcacctcaggtgttatgctcagaacaaccctgaattccgggccttgattgcagaacccaggatgggaaagcttatctctgctactgtccacgaagatggttgtgaagttagcatcagactgaattatagtcaagtctcaaacaagaacctttacctgaacaaggcagtgaatttcagcgatcaccttctgagcagtgctgccgagggtgatggggggctgtgcggcagcaggtccagctgggtgagtgactacagccagagtacctcagatactattgaaaaaatcaaaaggataaagaatttcaagaccaaaacttttcaagaaaagaaggagcagcttatacctgaaaacagactcctgctgaaggaagtcggacccacgggggaaggaagagtctctgtgattgaacagctgctggatgagggagcagaccccaactgctgtgatgaagacaatcgacccgtcataaccgtggctgttatgaataagcaccatgaagcgattccagttctcgtgcagagaggagcagacatcgaccagcagtgggggccgctcagaaatacagctcttcatgaagcaactctgcttggccttgcaggaagagagagcaccgccactttactgggatgcaatgcaagcatccaaaagaagaatgcaggaggccagacagcatacgacctggctctgaacactggagatgaccttgtcacctcactctttgctgccaagtttggccaagggcttgaggaccaactcgctcaaactaggagcctcagcctggatgactgttag

SEQ ID NO: 127952 - DNA, 3739 bp, Homo sapiens
  Payload ID: 5054
  Gene Symbol: DZANK1
  Gene Name: double zinc ribbon and ankyrin repeat domains 1
  ENST ID: ENST00000357236
  CDS Start-End: 1032-2711
aatctttattcccaaatatctgcaaagcctccccactgtgaagagtcaattagatccatctgagaaggatgtgtgacgcttcaggcactgggtgtgagcatcgataagaaagattcaaggagttaggccagaggatgggctagcctacagtaaggcggccaacccagaggtcttggtcacagggatgttgttgggattgacagaggaagtttataggggtttcacttaagcttgaccatgaacctgatgctagagaggaggttggtagatgcaggcatgggtgggactcaagtgtgatcaaggcaaggatctacactgggcaggggccgccttcgggggctaagccaacatatgtcagcaagtgcttaggcttgaatcaggtgtgagggaccaagtccatggagaaagtccagagagaagagtgtttaaggactgtgtgtgggcaggtggtgtgcagaagtctgattttggtctgactctaccctgcctttgccctctggacttggtggtccctctgttgttacccagactcccacagttgtaacatcctgcctgcatgtgctgctccctgcctcctgccttggccacttcacctggtgagggctacatccagatgtgctgccagctgagcagcccagtccagatacaaagctgcatgtttccagaataaagtgaaacaggggtcactttgtacaaatgaccataaactctttcaaataagaaatgcacaccatgacactttctctatcatgcagctttaattctcacatgggaataaccaagtgattgatatgcaatctcttcattcctaggaattcaaaaatggatttgttggatcaaaactaaagaaaaaatataagaactctgaaaatcaacgcagctggaatgttaaccttagaaagtttccagagagtccattggaaatcccagcttatggtggaggatcaggttctagaccacccacccgccagtcccagtcccccggttttgcacacgtaagcggtcagaagtgtttgacaagcacggagataatgagaattcaaagggagacagactttctcaagtgtgcccactgccttgccccccggccatcagatccctttgctcgcttctgtcaagaatgtggctctcctgtcccacccatatttggctgtcgtctcccacccccagaaggagctcagatgggcttgtgtgcagaatgcagaagcttggtacccatgaacactcccatctgtgtggtgtgtgaggcccctcttgctctacagctgcagccacaggcaagcctccacttgaaggagaaggtaatttgccgggcctgtggtacaggaaatcctgctcacctgagatactgtgtcacctgtgagggggccctgccttcatcacaagagtcgatgtgcagtggggataaagcccctcctccgcccactcagaaaggggggaccatttcctgctacagatgtggtcgctggaatctctgggaggcgtccttctgcggctggtgtggagccatgctcggcattcctgctggctgttctgtttgccctaaatgtggggccagcaatcacctgtctgcccgattctgtggctcctgtggtatttgtgtgaagtccctagtgaaacttagcttggacagaagcctggctctagctgctgaggaacctcgccctttttctgagccccgatgtgcctggcagtccctgaatattcctttgcccagatctgatgttgggactaagagggacataggaacacagactgttggcctcttctacccatctggcaagctgctagcaaaaaaggaacaggaactagcctctcaaaagcagaggcaggagaaaatgagtgaccataaacccctcctgacagccatcagcccaggaagagggtactggagaagacagctggatcacatctctgctcacctcaggtgttatgctcagaacaaccctgaattccgggccttgattgcagaacccaggatgggaaagcttatctctgctactgtccacgaagatggttgtgaagttagcatcagactgaattatagtcaagtctcaaacaagaacctttacctgaacaaggcagtgaatttcagcgatcaccttctgagcagtgctgccgagggtgatggggggctgtgcggcagcaggtccagctgggtgagtgactacagccagagtacctcagatactattgaaaaaatcaaaaggataaagaatttcaagaccaaaacttttcaagaaaagaaggagcagcttatacctgaaaacagactcctgctgaaggaagtcggacccacgggggaaggaagagtctctgtgattgaacagctgctggatgagggagcagaccccaactgctgtgatgaagacaatcgacccgtcataaccgtggctgttatgaataagcaccatgaagcgattccagttctcgtgcagagaggagcagacatcgaccagcagtgggggccgctcagaaatacagctcttcatgaagcaactctgcttggccttgcaggaagagagagcaccgccactttactgggatgcaatgcaagcatccaaaagaagaatgcaggaggccagacagcatacgacctggctctgaacactggagatgaccttgtcacctcactctttgctgccaagtttggccaagggcttgaggaccaactcgctcaaactaggagcctcagcctggatgactgttagccctgaggcctccacgggacttcatttaagaatacgtgcatggctggcacagtggcttacgcctgtaatcccagcactttgggaggctgaggctggcgtatcacctgaggttgggagttcaagaccagcctgaccaacatggagaaaccccgtctctactaaaaatacaaaattagtcgggcgtagtggtgcatgcctgtaatcccagttactcgagaggctgaggcaggaaaatcgcttgaacccgggaggcagaggttacagtgagccaagatcgcgccatcgcactccagcctgggcaacaagagcaaaactccatctcaaaaaaaaaaaagaatatgtgcagctctggctattctttaatcatgtctttctgaaatgtgtatttgagattagaaattgaggttgagaggaactcaggagattttttttttaaatcatatgacagtataagccatcagtactaaatggacagctcccagtatactgtggactgtgataaactgaatgtatgttttttaatggtttattgctgcaggttttttgtgtatttgatttttagtttttaacttatttttcaataggtaataattgcacatggttcaaagctaaaaggtatgaagtattatgtagggatacgtccctcccattctgtcccacagccaccacctctctcctcagccagcaatgacatcagcgtcgacttgcctttcccggggttgtgcagagttagatatgcacatacatgtggtataagcacatgtacagaggagtacacatagcatataaacatgtctgtagcacatatatattctttcccctcttttaaaacaaatggtagcaaaccaaccacacactgttctgtatcttgctctgtttgcttgatacatcttgtaagtggctcctaattactatgtaaagattgaccttatttaaatttttttatgttgaaatcatcaatattcccatcattatggtgtgttctttgattgacaaatcagctctcaataaaccacttataagaatgt

SEQ ID NO: 127953 - DNA, 3310 bp, Homo sapiens
  Payload ID: 5054
  Gene Symbol: DZANK1
  Gene Name: double zinc ribbon and ankyrin repeat domains 1
  Uniprot ID: Q9NVP4
  ENST ID: ENST00000358866
  CDS Start-End: 24-2282
agagagagagagagagagagaaaatgactgctggttcagtgtgtgtccctcagatcataccattacgagtgcctcagcctggaaaagctaaccatgaaattgataacaatacgcttttggaaatgaaatcagacactccagatgtcaacatatattatactctggatggcagcaaacctgaatttctaaagagaattggttatggggaaaataacacatttaagtatataaaacctattactctgcctgatggaaaaatacaagttaaagctattgctgtctctaaagactgcagacagagtggcattgtgacaaaggtgtttcacgtagactatgaaccaccaaatatagtctctcctgaagacaatgttgaaaatgttctcaaagattcttcaaggcaggaattcaaaaatggatttgttggatcaaaactaaagaaaaaatataagaactctgaaaatcaacgcagctggaatgttaaccttagaaagtttccagagagtccattggaaatcccagcttatggtggaggatcaggttctagaccacccacccgccagtcccagtcccccggttttgcacacgtaagcggtcagaagtgtttgacaagcacggagataatgagaattcaaagggagacagactttctcaagtgtgcccactgccttgccccccggccatcagatccctttgctcgcttctgtcaagaatgtggctctcctgtcccacccatatttggctgtcgtctcccacccccagaaggagctcagatgggcttgtgtgcagaatgcagaagcttggtacccatgaacactcccatctgtgtggtgtgtgaggcccctcttgctctacagctgcagccacaggcaagcctccacttgaaggagaaggtaatttgccgggcctgtggtacaggaaatcctgctcacctgagatactgtgtcacctgtgagggggccctgccttcatcacaagagtcgatgtgcagtggggataaagcccctcctccgcccactcagaaaggggggaccatttcctgctacagatgtggtcgctggaatctctgggaggcgtccttctgcggctggtgtggagccatgctcggcattcctgctggctgttctgtttgccctaaatgtggggccagcaatcacctgtctgcccgattctgtggctcctgtggtatttgtgtgaagtccctagtgaaacttagcttggacagaagcctggctctagctgctgaggaacctcgccctttttctgagtccctgaatattcctttgcccagatctgatgttgggactaagagggacataggaacacagactgttggcctcttctacccatctggcaagctgctagcaaaaaaggaacaggaactagcctctcaaaagcagaggcaggagaaaatgagtgaccataaacccctcctgacagccatcagcccaggaagagggtactggagaagacagctggatcacatctctgctcacctcaggtgttatgctcagaacaaccctgaattccgggccttgattgcagaacccaggatgggaaagcttatctctgctactgtccacgaagatggttgtgaagttagcatcagactgaattatagtcaagtctcaaacaagaacctttacctgaacaaggcagtgaatttcagcgatcaccttctgagcagtgctgccgagggtgatggggggctgtgcggcagcaggtccagctgggtgagtgactacagccagagtacctcagatactattgaaaaaatcaaaaggataaagaatttcaagaccaaaacttttcaagaaaagaaggagcagcttatacctgaaaacagactcctgctgaaggaagtcggacccacgggggaaggaagagtctctgtgattgaacagctgctggatgagggagcagaccccaactgctgtgatgaagacaatcgacccgtcataaccgtggctgttatgaataagcaccatgaagcgattccagttctcgtgcagagaggagcagacatcgaccagcagtgggggccgctcagaaatacagctcttcatgaagcaactctgcttggccttgcaggaagagagagcaccgccactttactgggatgcaatgcaagcatccaaaagaagaatgcaggaggccagacagcatacgacctggctctgaacactggagatgaccttgtcacctcactctttgctgccaagtttggccaagggcttgaggaccaactcgctcaaactaggagcctcagcctggatgactgttagccctgaggcctccacgggacttcatttaagaatacgtgcatggctggcacagtggcttacgcctgtaatcccagcactttgggaggctgaggctggcgtatcacctgaggttgggagttcaagaccagcctgaccaacatggagaaaccccgtctctactaaaaatacaaaattagtcgggcgtagtggtgcatgcctgtaatcccagttactcgagaggctgaggcaggaaaatcgcttgaacccgggaggcagaggttacagtgagccaagatcgcgccatcgcactccagcctgggcaacaagagcaaaactccatctcaaaaaaaaaaaagaatatgtgcagctctggctattctttaatcatgtctttctgaaatgtgtatttgagattagaaattgaggttgagaggaactcaggagattttttttttaaatcatatgacagtataagccatcagtactaaatggacagctcccagtatactgtggactgtgataaactgaatgtatgttttttaatggtttattgctgcaggttttttgtgtatttgatttttagtttttaacttatttttcaataggtaataattgcacatggttcaaagctaaaaggtatgaagtattatgtagggatacgtccctcccattctgtcccacagccaccacctctctcctcagccagcaatgacatcagcgtcgacttgcctttcccggggttgtgcagagttagatatgcacatacatgtggtataagcacatgtacagaggagtacacatagcatataaacatgtctgtagcacatatatattctttcccctcttttaaaacaaatggtagcaaaccaaccacacactgttctgtatcttgctctgtttgcttgatacatcttgtaagtggctcctaattactatgtaaagattgaccttatttaaatttttttatgttgaaatcatcaatattcccatcattatggtgtgttctttgattgacaaatcagctctcaataaaccacttataagaatgt

SEQ ID NO: 127954 - DNA, 3295 bp, Homo sapiens
  Payload ID: 5054
  Gene Symbol: DZANK1
  Gene Name: double zinc ribbon and ankyrin repeat domains 1
  ENST ID: ENST00000377630
  CDS Start-End: 55-798
aacccgggcggcggcgaaggaggaggcaagaggcgagagagagagagagagaaaatgactgctggttcagtgtgtgtccctcagatcataccattacgagtgcctcagcctggaaaagctaaccatgaaattgataacaatacgcttttggaaatgaaatcagacactccagatgtcaacatatattatactctggatggcagcaaacctgaatttctaaagagaattggttatggggaaaataacacatttaagtatataaaacctattactctgcctgatggaaaaatacaagttaaagctattgctgtctctaaagactgcagacagagtggcattgtgacaaaggtgtttcacgtagactatgaaccaccaaatatagtctctcctgaagacaatgttgaaaatgttctcaaagattcttcaaggcaggaattcaaaaatggatttgttggatcaaaactaaagaaaaaatataagaactctgaaaatcaacgcagctggaatgttaaccttagaaagtttccagtcccccggttttgcacacgtaagcggtcagaagtgtttgacaagcacggagataatgagaattcaaagggagacagactttctcaagtgtgcccactgccttgccccccggccatcagatccctttgctcgcttctgtcaagaatgtggctctcctgtcccacccatatttggctgtcgtctcccacccccagaaggagctcagatgggcttgtgtgcagaatgcagaagcttggtacccatgaacactcccatctgtgtggtgtgtgaggcccctcttgctctacagctgcagccacaggcaagcctccacttgaaggagaaggtaatttgccgggcctgtggtacaggaaatcctgctcacctgagatactgtgtcacctgtgagggggccctgccttcatcacaagagtcgatgtgcagtggggataaagcccctcctccgcccactcagaaaggggggaccatttcctgctacagatgtggtcgctggaatctctgggaggcgtccttctgcggctggtgtggagccatgctcggcattcctgctggctgttctgtttgccctaaatgtggggccagcaatcacctgtctgcccgattctgtggctcctgtggtatttgtgtgaagtccctagtgaaacttagcttggacagaagcctggctctagctgctgaggaacctcgccctttttctgagccccgatgtgcctggcagtccctgaatattcctttgcccagatctgatgttgggactaagagggacataggaacacagactgttggcctcttctacccatctggcaagctgctagcaaaaaaggaacaggaactagcctctcaaaagcagaggcaggagaaaatgagtgaccataaacccctcctgacagccatcagcccaggaagagggtactggagaagacagctggatcacatctctgctcacctcaggtgttatgctcagaacaaccctgaattccgggccttgattgcagaacccaggatgggaaagcttatctctgctactgtccacgaagatggttgtgaagttagcatcagactgaattatagtcaagtctcaaacaagaacctttacctgaacaaggcagtgaatttcagcgatcaccttctgagcagtgctgccgagggtgatggggggctgtgcggcagcaggtccagctgggtgagtgactacagccagagtacctcagatactattgaaaaaatcaaaaggataaagaatttcaagaccaaaacttttcaagaaaagaaggagcagcttatacctgaaaacagactcctgctgaaggaagtcggacccacgggggaaggaagagtctctgtgattgaacagctgctggatgagggagcagaccccaactgctgtgatgaagacaatcgacccgtcataaccgtggctgttatgaataagcaccatgaagcgattccagttctcgtgcagagaggagcagacatcgaccagcagtgggggccgctcagaaatacagctcttcatgaagcaactctgcttggccttgcaggaagagagagcaccgccactttactgggatgcaatgcaagcatccaaaagaagaatgcaggaggccagacagcatacgacctggctctgaacactggagatgaccttgtcacctcactctttgctgccaagtttggccaagggcttgaggaccaactcgctcaaactaggagcctcagcctggatgactgttagccctgaggcctccacgggacttcatttaagaatacgtgcatggctggcacagtggcttacgcctgtaatcccagcactttgggaggctgaggctggcgtatcacctgaggttgggagttcaagaccagcctgaccaacatggagaaaccccgtctctactaaaaatacaaaattagtcgggcgtagtggtgcatgcctgtaatcccagttactcgagaggctgaggcaggaaaatcgcttgaacccgggaggcagaggttacagtgagccaagatcgcgccatcgcactccagcctgggcaacaagagcaaaactccatctcaaaaaaaaaaaagaatatgtgcagctctggctattctttaatcatgtctttctgaaatgtgtatttgagattagaaattgaggttgagaggaactcaggagattttttttttaaatcatatgacagtataagccatcagtactaaatggacagctcccagtatactgtggactgtgataaactgaatgtatgttttttaatggtttattgctgcaggttttttgtgtatttgatttttagtttttaacttatttttcaataggtaataattgcacatggttcaaagctaaaaggtatgaagtattatgtagggatacgtccctcccattctgtcccacagccaccacctctctcctcagccagcaatgacatcagcgtcgacttgcctttcccggggttgtgcagagttagatatgcacatacatgtggtataagcacatgtacagaggagtacacatagcatataaacatgtctgtagcacatatatattctttcccctcttttaaaacaaatggtagcaaaccaaccacacactgttctgtatcttgctctgtttgcttgatacatcttgtaagtggctcctaattactatgtaaagattgaccttatttaaatttttttatgttgaaatcatcaatattcccatcattatggtgtgttctttgattgacaaatcagctctcaataaaccacttataagaatgtgtaa

SEQ ID NO: 127955 - DNA, 3538 bp, Homo sapiens
  Payload ID: 5054
  Gene Symbol: DZANK1
  Gene Name: double zinc ribbon and ankyrin repeat domains 1
  ENST ID: ENST00000608192
  CDS Start-End: 152-721
gagaggctggcgactgggttgggcgcggcagagatgcattaggggtcccgatcccgggccccgcggttagaggaagaggagggcggctagaggaggggaagagcttcccttactccagccgaaaggatgcagagagagagagagagagaaaatgactgctggttcagtgtgtgtccctcagatcataccattacgagtgcctcagcctggaaaagctaaccatgaaattgataacaatacgcttttggaaatgaaatcagacactccagatgtcaacatatattatactctggatggcagcaaacctgaatttctaaagagaattggttatggggaaaataacacatttaagtatataaaacctattactctgcctgatggaaaaatacaagttaaagctattgctgtctctaaagactgcagacagagtggcattgtgacaaaggtgtttcacgtagactatgaaccaccaaatatagtctctcctgaagacaatgttgaaaatgttctcaaagattcttcaaggcaggaattcaaaaatggatttgttggatcaaaactaaagaaaaaatataagaactctgaaaatcaacgcagctggaatgttaaccttagaaagtttccagagagtccattggaaatcccagcttatggtggaggatcaggttctagaccacccacccgccagtcccaggcaagacacagtcccatttacatttaaaagttttctgtttggccacagtatggagattagaccatggaagaggaaagggagaacattatttaggaggcttttgttccagtcccccggttttgcacacgtaagcggtcagaagtgtttgacaagcacggagataatgagaattcaaagggagacagactttctcaagtgtgcccactgccttgccccccggccatcagatccctttgctcgcttctgtcaagaatgtggctctcctgtcccacccatatttggctgtcgtctcccacccccagaaggagctcagatgggcttgtgtgcagaatgcagaagcttggtacccatgaacactcccatctgtgtggtgtgtgaggcccctcttgctctacagctgcagccacaggcaagcctccacttgaaggagaaggtaatttgccgggcctgtggtacaggaaatcctgctcacctgagatactgtgtcacctgtgagggggccctgccttcatcacaagagtcgatgtgcagtggggataaagcccctcctccgcccactcagaaaggggggaccatttcctgctacagatgtggtcgctggaatctctgggaggcgtccttctgcggctggtgtggagccatgctcggcattcctgctggctgttctgtttgccctaaatgtggggccagcaatcacctgtctgcccgattctgtggctcctgtggtatttgtgtgaagtccctagtgaaacttagcttggacagaagcctggctctagctgctgaggaacctcgccctttttctgagtccctgaatattcctttgcccagatctgatgttgggactaagagggacataggaacacagactgttggcctcttctacccatctggcaagctgctagcaaaaaaggaacaggaactagcctctcaaaagcagaggcaggagaaaatgagtgaccataaacccctcctgacagccatcagcccaggaagagggtactggagaagacagctggatcacatctctgctcacctcaggtgttatgctcagaacaaccctgaattccgggccttgattgcagaacccaggatgggaaagcttatctctgctactgtccacgaagatggttgtgaagttagcatcagactgaattatagtcaagtctcaaacaagaacctttacctgaacaaggcagtgaatttcagcgatcaccttctgagcagtgctgccgagggtgatggggggctgtgcggcagcaggtccagctgggtgagtgactacagccagagtacctcagatactattgaaaaaatcaaaaggataaagaatttcaagaccaaaacttttcaagaaaagaaggagcagcttatacctgaaaacagactcctgctgaaggaagtcggacccacgggggaaggaagagtctctgtgattgaacagctgctggatgagggagcagaccccaactgctgtgatgaagacaatcgacccgtcataaccgtggctgttatgaataagcaccatgaagcgattccagttctcgtgcagagaggagcagacatcgaccagcagtgggggccgctcagaaatacagctcttcatgaagcaactctgcttggccttgcaggaagagagagcaccgccactttactgggatgcaatgcaagcatccaaaagaagaatgcaggaggccagacagcatacgacctggctctgaacactggagatgaccttgtcacctcactctttgctgccaagtttggccaagggcttgaggaccaactcgctcaaactaggagcctcagcctggatgactgttagccctgaggcctccacgggacttcatttaagaatacgtgcatggctggcacagtggcttacgcctgtaatcccagcactttgggaggctgaggctggcgtatcacctgaggttgggagttcaagaccagcctgaccaacatggagaaaccccgtctctactaaaaatacaaaattagtcgggcgtagtggtgcatgcctgtaatcccagttactcgagaggctgaggcaggaaaatcgcttgaacccgggaggcagaggttacagtgagccaagatcgcgccatcgcactccagcctgggcaacaagagcaaaactccatctcaaaaaaaaaaaagaatatgtgcagctctggctattctttaatcatgtctttctgaaatgtgtatttgagattagaaattgaggttgagaggaactcaggagattttttttttaaatcatatgacagtataagccatcagtactaaatggacagctcccagtatactgtggactgtgataaactgaatgtatgttttttaatggtttattgctgcaggttttttgtgtatttgatttttagtttttaacttatttttcaataggtaataattgcacatggttcaaagctaaaaggtatgaagtattatgtagggatacgtccctcccattctgtcccacagccaccacctctctcctcagccagcaatgacatcagcgtcgacttgcctttcccggggttgtgcagagttagatatgcacatacatgtggtataagcacatgtacagaggagtacacatagcatataaacatgtctgtagcacatatatattctttcccctcttttaaaacaaatggtagcaaaccaaccacacactgttctgtatcttgctctgtttgcttgatacatcttgtaagtggctcctaattactatgtaaagattgaccttatttaaatttttttatgttgaaatcatcaatattcccatcattatggtgtgttctttgattgacaaatcagctctcaataaaccactta

SEQ ID NO: 127956 - DNA, 3145 bp, Homo sapiens
  Payload ID: 5054
  Gene Symbol: DZANK1
  Gene Name: double zinc ribbon and ankyrin repeat domains 1
  Uniprot ID: Q9NVP4
  ENST ID: ENST00000609267
  CDS Start-End: 381-2105
aatgtcaatgcccatcggacgcacaagcctggttccttcattctgagttgggaaaccaacttttagcacttggcaactctgtgaaggaatattcttagatgcctatgggaaagcactgggaaaggaactccaggcgggtaccaggctccctgcggagcggcaggggccggtctagttgctaagaagctgagtctccaccaatcatctgcccagcacccagtgggcggggcgcggctcgccgcgtctgtggtaacccgggcggcggcgaaggaggaggcaagaggcgttttgctgcatttaaattaagtgctgctcttcagcttttgtgtacattggaatttatatgtatatatatatagagagagagagagagagagaaaatgactgctggttcagtgtgtgtccctcagatcataccattacgagtgcctcagcctggaaaagctaaccatgaaattgataacaatacgcttttggaaatgaaatcagacactccagatgtcaacatatattatactctggatggcagcaaacctgaatttctaaagagaattggttatggggaaaataacacatttaagtatataaaacctattactctgcctgatggaaaaatacaagttaaagctattgctgtctctaaagactgcagacagagtggcattgtgacaaaggtgtttcacgtagactatgaaccaccaaatatagtctctcctgaagacaatgttgaaaatgttctcaaagattcttcaaggcaggaattcaaaaatggatttgttggatcaaaactaaagaaaaaatataagaactctgaaaatcaacgcagctggaatgttaaccttagaaagtttccagagagtccattggaaatcccagcttatggtggaggatcaggttctagaccacccacccgccagtcccagtcccccggttttgcacacgtaagcggtcagaagtgtttgacaagcacggagataatgagaattcaaagggagacagactttctcaagtgtgcccactgccttgccccccggccatcagatccctttgctcgcttctgtcaagaatgtggctctcctgtcccacccatatttggctgtcgtctcccacccccagaaggagctcagatgggcttgtgtgcagaatgcagaagcttggtacccatgaacactcccatctgtgtggtgtgtgaggcccctcttgctctacagctgcagccacaggcaagcctccacttgaaggagaaggtaatttgccgggcctgtggtacaggaaatcctgctcacctgagatactgtgtcacctgtgagggggccctgccttcatcacaagagtcgatgtgcagtggggataaagcccctcctccgcccactcagaaaggggggaccatttcctgctacagatgtggtcgctggaatctctgggaggcgtccttctgcggctggtgtggagccatgctcggcattcctgctggctgttctgtttgccctaaatgtggggccagcaatcacctgtctgcccgattctgtggctcctgtggtatttgtgtgaagtccctagtgaaacttagcttggacagaagcctggctctagctgctgaggaacctcgccctttttctgagtccctgaatattcctttgcccagatctgatgttgggactaagagggacataggaacacagactgttggcctcttctacccatctggcaagctgctagcaaaaaaggaacaggaactagcctctcaaaagcagaggcaggagaaaatgagtgaccataaacccctcctgacagccatcagcccaggaagagggtactggagaagacagctggatcacatctctgctcacctcaggtgttatgctcagaacaaccctgaattccgggccttgattgcagaacccaggatgggaaagcttatctctgctactgtccacgaagatggttgtgaagttagcatcagactgaattatagtcaagtctcaaacaaggtgaggaaactgaggctcagagaagttaagcaacctgcttcttccaagggcactaagttagtaagtggcagacccaggattcacacttggcagcctgagaccttcccatcatgacaccctaattccaagacattgaaggactttaagcagagaaatgacacaatcacttataaaggatctaaagaacctttacctgaacaaggcagtgaatttcagcgatcaccttctgagcagtgctgccgagggtgatggggggctgtgcggcagcaggtccagctgggtgagtgactacagccagagtacctcagatactattgaaaaaatcaaaaggataaagaatttcaagaccaaaacttttcaagaaaagaaggagcagcttatacctgaaaacagactcctgctgaaggaagtcggacccacgggggaaggaagagtctctgtgattgaacagctgctggatgagggagcagaccccaactgctgtgatgaagacaatcgacccgtcataaccgtggctgttatgaataagcaccatgaagcgattccagttctcgtgcagagaggagcagacatcgaccagcagtgggggccgctcagaaatacagctcttcatgaagcaactctgcttggccttgcaggaagagagagcaccgccactttactgggatgcaatgcaagcatccaaaagaagaatgcaggaggccagacagcatacgacctggctctgaacactggagatgaccttgtcacctcactctttgctgccaagtttggccaagggcttgaggaccaactcgctcaaactaggagcctcagcctggatgactgttagccctgaggcctccacgggacttcatttaagaatacgtgcatggctggcacagtggcttacgcctgtaatcccagcactttgggaggctgaggctggcgtatcacctgaggttgggagttcaagaccagcctgaccaacatggagaaaccccgtctctactaaaaatacaaaattagtcgggcgtagtggtgcatgcctgtaatcccagttactcgagaggctgaggcaggaaaatcgcttgaacccgggaggcagaggttacagtgagccaagatcgcgccatcgcactccagcctgggcaacaagagcaaaactccatctc

SEQ ID NO: 127957 - DNA, 3156 bp, Homo sapiens
  Payload ID: 5054
  Gene Symbol: DZANK1
  Gene Name: double zinc ribbon and ankyrin repeat domains 1
  ENST ID: ENST00000460891
  CDS Start-End: 235-978
gaggcggtgagaggctggcgactgggttgggcgcggcagagatgcattaggggtcccgatcccgggccccgcggttagaggaagaggagggcggctagaggaggggaagagcttcccttactccagccgaaaggatgcagttttgctgcatttaaattaagtgctgctcttcagcttttgtgtacattggaatttatatgtatatatatatagagagagagagagagagagaaaatgactgctggttcagtgtgtgtccctcagatcataccattacgagtgcctcagcctggaaaagctaaccatgaaattgataacaatacgcttttggaaatgaaatcagacactccagatgtcaacatatattatactctggatggcagcaaacctgaatttctaaagagaattggttatggggaaaataacacatttaagtatataaaacctattactctgcctgatggaaaaatacaagttaaagctattgctgtctctaaagactgcagacagagtggcattgtgacaaaggtgtttcacgtagactatgaaccaccaaatatagtctctcctgaagacaatgttgaaaatgttctcaaagattcttcaaggcaggaattcaaaaatggatttgttggatcaaaactaaagaaaaaatataagaactctgaaaatcaacgcagctggaatgttaaccttagaaagtttccagtcccccggttttgcacacgtaagcggtcagaagtgtttgacaagcacggagataatgagaattcaaagggagacagactttctcaagtgtgcccactgccttgccccccggccatcagatccctttgctcgcttctgtcaagaatgtggctctcctgtcccacccatatttggctgtcgtctcccacccccagaaggagctcagatgggcttgtgtgcagaatgcagaagcttggtacccatgaacactcccatctgtgtggtgtgtgaggcccctcttgctctacagctgcagccacaggcaagcctccacttgaaggtaatgaaatgtgattctgtaaaaacatgaatgaaatacatagtaatgtttgaacaggtatatgtcctttttcagctagtgggatggggtaacaatttttttttttttttgagacagaatcttgttctgtcacacaggctggagtgcagtagcgcaatctcagctcactgcaacctccgcctcctcagttcaagtgattctcctgcctcagcctcctgagtagctggaactacaggcgtgcaccaccacgcatggctaatttttatatttttagtagacatggggtttcatcatcttggccaggctggtctcaaactcctgacctcaggtgatgcgcccacctcagcctcccaaagtgctggattacaggcataagccaccatgcccgccaggatggggtaacaattgataagctaatatacatgaacaaaatccattctatttttagtaaggtatgctgtccaagagtttaatttgccaataggatctataatattaagagagatatgtaggattgtattccctgaacatggatttggagggcaaattgcactacagctaacaaagacaattttttacttcatatatttaaactccaacattgcagttagtgttgatttataattttgtccttaaagtggctcatacttttgtttgccttatttgattataggttcttgttatggagaaaaagaatgactagaactagtcacatggaagaaaaagttatgtatcatcacttacatccaaaaaactttgctcaaaaaatgatatcatactgtgaacatttttttgatagaatctttaaacatacaactaaatattttctccattcttcaatttacagtcccatttacttcctctttaatcccaagtaaaggtcactagaggataaaatagatttaatagagggaatttgggggattaaaaaactaagaatttttagcaataagggaaatgcatggcattatgtacaggccataacactcctaaaatggccttgtgggttgtatatgggcaaaatgtattcagagaaaagataaatccactttttctttcaccttcaagctccctttagcatgaagagttcacaagtgtacaaggctgtgtgagccttcagaaatgagattttgaataactggccaggccaaagtcagtttcaggacatctagggaccgcagtgctggactagaaaggaacacttgagcaccactggtcattatcaatggaaaaagattgtatcctgagagaatagtggagaaggtaatttgccgggcctgtggtacaggaaatcctgctcacctgagatactgtgtcacctgtgagggggccctgccttcatcacaagagtcgatgtgcagtggggataaagcccctcctccgcccactcagaaaggggggaccatttcctgctacagatgtggtcgctggaatctctgggaggcgtccttctgcggctggtgtggagccatgctcggcattcctgctggctgttctgtttgccctaaatgtggggccagcaatcacctgtctgcccgattctgtggctcctgtggtatttgtgtgaagtccctagtgaaacttagcttggacagaagcctggctctagctgctgaggaacctcgccctttttctgagccccgatgtgcctggcagtccctgaatattcctttgcccagatctgatgttgggactaagagggacataggaacacagactgttggcctcttctacccatctggcaagctgctagcaaaaaaggaacaggaactagcctctcaaaagcagaggcaggagaaaatgagtgaccataaacccctcctgacagccatcagcccaggaagagggtactggagaagacagctggatcacatctctgctcacctcaggtgttatgctcagaacaaccctgaattccgggccttgattgcagaacccaggatgggaaaggtgggtgagatgaaatttccactccacaagtgtccacgggatcaggctgaaggaaccctccatggactttgcctgaaactgcatcttgcctggctcctttccctttcctgctctgctttctacactttcttactcttctgccttgtgagctctgctctaataaatcacttgcacatgaa

SEQ ID NO: 127958 - DNA, 1709 bp, Homo sapiens
  Payload ID: 5054
  Gene Symbol: DZANK1
  Gene Name: double zinc ribbon and ankyrin repeat domains 1
  ENST ID: ENST00000476058
  CDS Start-End: 1-677
tgacacaatcacttataaaggatctaaagaacctttacctgaacaaggcagtgaatttcagcgatcaccttctgagcagtgctgccgagggtgatggggggctgtgcggcagcaggtccagctgggtgagtgactacagccagagtacctcagatactattgaaaaaatcaaaaggataaagaatttcaagaccaaaacttttcaagaaaagaaggagcagcttatacctgaaaacagactcctgctgaaggaagtcggacccacgggggaaggaagagtctctgtgattgaacagctgctggatgagggagcagaccccaactgctgtgatgaagacaatcgacccgtcataaccgtggctgttatgaataagcaccatgaagcgattccagttctcgtgcagagaggagcagacatcgaccagcagtgggggccgctcagaaatacagctcttcatgaagcaactctgcttggccttgcaggaagagagagcaccgccactttactgggatgcaatgcaagcatccaaaagaagaatgcaggaggccagacagcatacgacctggctctgaacactggagatgaccttgtcacctcactctttgctgccaagtttggccaagggcttgaggaccaactcgctcaaactaggagcctcagcctggatgactgttagccctgaggcctccacgggacttcatttaagaatacgtgcatggctggcacagtggcttacgcctgtaatcccagcactttgggaggctgaggctggcgtatcacctgaggttgggagttcaagaccagcctgaccaacatggagaaaccccgtctctactaaaaatacaaaattagtcgggcgtagtggtgcatgcctgtaatcccagttactcgagaggctgaggcaggaaaatcgcttgaacccgggaggcagaggttacagtgagccaagatcgcgccatcgcactccagcctgggcaacaagagcaaaactccatctcaaaaaaaaaaaagaatatgtgcagctctggctattctttaatcatgtctttctgaaatgtgtatttgagattagaaattgaggttgagaggaactcaggagattttttttttaaatcatatgacagtataagccatcagtactaaatggacagctcccagtatactgtggactgtgataaactgaatgtatgttttttaatggtttattgctgcaggttttttgtgtatttgatttttagtttttaacttatttttcaataggtaataattgcacatggttcaaagctaaaaggtatgaagtattatgtagggatacgtccctcccattctgtcccacagccaccacctctctcctcagccagcaatgacatcagcgtcgacttgcctttcccggggttgtgcagagttagatatgcacatacatgtggtataagcacatgtacagaggagtacacatagcatataaacatgtctgtagcacatatatattctttcccctcttttaaaacaaatggtagcaaaccaaccacacactgttctgtatcttgctctgtttgcttgatacatcttgtaagtggctcctaattactatgtaaagattgaccttatttaaatttttttatgttgaaatcatcaatattcccatcattatggtgtgttctttgattgacaaatcagctctcaataaaccacttataagaatgtgtaa

SEQ ID NO: 127959 - DNA, 837 bp, Homo sapiens
  Payload ID: 5054
  Gene Symbol: DZANK1
  Gene Name: double zinc ribbon and ankyrin repeat domains 1
  ENST ID: ENST00000480488
  CDS Start-End: 418-837
agatgcaggaaagtatgttagagaaaatgttggtgaccagtggctgagtgtggattagtagtgaagtctatgctctattggattacagagctgaaaaggatagatatcttccaggcatcaagcaggccggcaaacaccccttgatttgctgacttttagataataaatggctaatcctggatcaggctggaagttgctgagaaagacaggagcaaggaagatgaggcaaaggctggaaaaccctattagttccaaccccgatgtgcctggcagtccctgaatattcctttgcccagatctgatgttgggactaagagggacataggaacacagactgttggcctcttctacccatctggcaagctgctagcaaaaaaggaacaggaactagcctctcaaaagcagaggcaggagaaaatgagtgaccataaacccctcctgacagccatcagcccaggaagagggtactggagaagacagctggatcacatctctgctcacctcaggtgttatgctcagaacaaccctgaattccgggccttgattgcagaacccaggatgggaaagcttatctctgctactgtccacgaagatggttgtgaagttagcatcagactgaattatagtcaagtctcaaacaagaacctttacctgaacaaggcagtgaatttcagcgatcaccttctgagcagtgctgccgagggtgatggggggctgtgcggcagcaggtccagctgggtgagtgactacagccagagtacctcagatactattgaaaaaatcaaaaggataaagaatttcaagaccaaaacttttcaagaaaagaaggagcagctt

SEQ ID NO: 127960 - DNA, 9405 bp, Homo sapiens
  Payload ID: 5055
  Gene Symbol: DCX
  Gene Name: doublecortin
  Uniprot ID: O43602
  ENST ID: ENST00000338081
  CDS Start-End: 173-1498
cttatttcttatgaatgtcggatagctgcaccagcttggtggggaaagggtttgatgaatagcacaaagacactggctgttccctggaggctgtccctttaaaggagaatcttagtttattctggggggaggggatgcacacattagagtaggaaagagggcttggaataaaatgaaaacactcccccttcatagtcattgtactgaaatgcaaagactgcttcctaagctggagatgctaaccttgggtagctccttctgttctcttcaaggggaattttgtcaggctatggattcatttacaactgttagtcatgtgggcatgtgtgaggaaacagatgccagttttaatgtatttagcccgaagttccaatttgataggagccactgtcagtctctgaggttccaccaaaatatggaacttgattttggacactttgacgaaagagataagacatccaggaacatgcgaggctcccggatgaatgggttgcctagccccactcacagcgcccactgtagcttctaccgaaccagaaccttgcaggcactgagtaatgagaagaaagccaagaaggtacgtttctaccgcaatggggaccgctacttcaaggggattgtgtacgctgtgtcctctgaccgttttcgcagctttgacgccttgctggctgacctgacgcgatctctgtctgacaacatcaacctgcctcagggagtgcgttacatttacaccattgatggatccaggaagatcggaagcatggatgaactggaggaaggggaaagctatgtctgttcctcagacaacttctttaaaaaggtggagtacaccaagaatgtcaatcccaactggtctgtcaacgtaaaaacatctgccaatatgaaagccccccagtccttggctagcagcaacagtgcacaggccagggagaacaaggactttgtgcgccccaagctggttaccatcatccgcagtggggtgaagcctcggaaggctgtgcgtgtgcttctgaacaagaagacagcccactcttttgagcaagtcctcactgatatcacagaagccatcaaactggagaccggggttgtcaaaaaactctacactctggatggaaaacaggtaacttgtctccatgatttctttggtgatgatgatgtgtttattgcctgtggtcctgaaaaatttcgctatgctcaggatgatttttctctggatgaaaatgaatgccgagtcatgaagggaaacccatcagccacagctggcccaaaggcatccccaacacctcagaagacttcagccaagagccctggtcctatgcgccgaagcaagtctccagctgactcagcaaacggaacctccagcagccagctctctacccccaagtctaagcagtctcccatctctacgcccaccagtcctggcagcctccggaagcacaaggacctgtacctgcctctgtccttggatgactcggactcgcttggtgattccatgtaaaggaggggagagtgctcagagtccagagtacaaatccaagcctatcattgtagtagggtacttctgctcaagtgtccaacagggctattggtgctttcaagtttttattttgttgttgttgttattttgaaaaacacattgtaatatgttgggtttattttcctgtgatttctcctctgggccactgatccacagttaccaattatgagagatagattgataaccatcctttggggcagcattccagggatgcaaaatgtgctagtccatgacctttcaatggaaagcttaggtgcctgcgttatatttgccctgtctaattttgcccatacagtcttccttctgtagagggctgtttacatatacagcacttaaaatgtttgtgtgggaaaaaaaaaactcattggcagatccaagaatgacaaacacaagtgccccttttctctggatctcaagaatggtggaggaccctggaaggacagcaaggcagctccccagcctcactcttcactcctgattgaggcccgggtttgttgtccagcaccaattctggctgtcaatggggagaaataaaccaacaacttataattgtgacaccagatgcttaggatcctggtgctgggttagctaagagaatagacagaattggaaaatactgcagacatttccgaagagtttataaagcacagtgaattcctggtcaatctctccactgaggcaatttggaatcaataagcaattgataatagtttggagtaagggacttcatatacctgattcctctagaaggctgtctaacataccacatgattacatgaactgtatggtatccatctatctctgttctattgaatgccttgttaacagccaacactgaaaacactgtgagaatttgttttcaggtctgacacctttcagtctctttttatagcaagaaatcaatatcctttttataaaaattcatgtctgtatttcaggagcaaactcttcaggctccttttttataaactggtgatttttcttttgtctaaaaaacacatgaagaaaatttaccaaaaaaaaaaaaaaaagcagaagaataatgtagtttagaaattatgctgtcactgccaaacagtaacctccaggagaaaacaagatgaatagcagaggccaattcaatagaatcagttttttgatagctttttaacagttatgcttgcattaataatttcaatgtggaccagacattctaattatattttaaatgaaatgttacagcatattttaagcaactctttttatctataatcctaatatttcatactgaagacacagaaatctttcacttgtctttaacattagaaaggatttctctttactaaggactgatcatttgaaatagttttcagtcttttgagatacaggtttataacactgcttttttttttctgtaatcatagcccataatggcaaagacaactaaatttaagtgaaggtcatgcatgccaattctgtgtttgcttttagcagatatgaagatttccttatttctttgtaattgtgcagatattttgaaaggcacagcattcgaagccaagctgctgtttggctactgaatggcttgcagttgttcctccactctaaatggaatgagcttgctgtgtgtgtgtgtggtggtggtgggagggggtggtgcatgtgtgtgtgtgtgtgtgcatctgcagctgcttcaaaattaggaaatactacaggacacccctgtaatggattggtggcaactgggtggcactgctgatgtgcactgtgtaggggggaacccagtggtggtggggtagctcagatgcccctagacaagcttcagatgtctgtagctaccagaaacattttcggttcaggaaaagtgagatgatggtagtactggtttctggtgaaattgaagaaccccaaatgatgaggatctctttttgccccctctcctttttttgtagacccattcaaaaccattaataagcccattttactaagcccctatttctttctagaagctcagggttttcttagtgcctcccagaacattttgtagttaattgggaaaaagtgatacttggattagggggtgtgggcataaagaatggtgggaggcctgattttaaacttcaggccagaacccccaatgactccacccatagtctcactttaggtctcatttagtccatcacctttattttaagttgaggaagtggaggctggtaaagagcaggaccagaggaagaatccagatttccttatgcttgggcctcacactagctctctgagtatttccttgattgcggtatatgtactactagaaaataccaaatggatatattttctttaggataacctttgaaccaacaatcttcaataacaatagtacatcttccatcttacttttaatcgagtataaggaaatgtttctttatggccattttggagggagcaggggatgaggcttggcatagtccaaaatttaagtctccaataattaattgcattttaaattggcccactttcaaggcaattttttttgtgtgtctgtaactgagctcctccacccctgtcattcacttccaattttacccaatccaattttagcactcaagttccattgtgttaatttctgcacggtcaacaaacatcaagtcagcaagcatttgccaccactccctatacttctccctccttcttacacacacacacacacacacacacacaatccatctcttgcttgttcctacctcctgatttttcttccctacagaaatagaaatagggacaaagaaggggaaaatgtatatattggggctgggctgaacaactaacttcataagtagtattaactaggggtaaattgagagaaaagctccttttctcttcactgttttggaaaggatagccattagcatgactgctttgtgtccttatggactttagtattagcctagattgaattatagcgttttctagctggaaggaaccttaagatcacatcatctactcctctactccaaatttctcattcttcaggccaggaaaccgagacacagaggtaaagtaatttccccaaggtcacacagctggctggggcaggattgggtttacaacccacatctcctggctcttattccagggccttttcccactaagtagtattgccttccattaggctcctgagagttatttctcagggtcatgttgcatcttggagccacatgctgctgccctgatctcagtgggaaatccacccagcaacctaatacagccccttttccctgcattcacctggttcccatccacatgggttgcagatgtccttgaagagagtgaggcattgagggccaataggagcaatggggtccctggccttgtccatctgattcaggagatcactgctccatcgtgaggagccctctgaatagccccccactgaatgcttgccttgcccaaatggaatggaggaagattgattttctccatcagttcaccttgtgtcatctcataatggttggtctttccaggctgagggaaatgtttcttgtttccagagtagaaaaagaaagagtggaacaatagctttgttcatcctaactttctgagatggcttttcaacattttaaaaaaactagtgtggctaccattcactggcaatgatttcttttagaatatgggagtaagatgagctagagaaaataacctggtctcactgtggttgccctcatccacaatgtccccaaagccatcctgctctgatgaggacaatttccaggtataagcaaggggctttgtgacaaaaatgtaccctggctgatgttaaacattggctcctgtgtttgcaccaaaatagcaagctgtgtgctctatacactcttcccatcgtcttgtgtacactgctcctgtggccttccacagcagaaaccagggcaaaagggtccaaacacatggttttccttgctgcaaggctcttcctgggaactaagggggtatttattagttcagttctaagagacctccttctgggcttaccccactcctcaggtacttctctctccttcctccttctcctccacagtcacaagtaaccaaggaacctgaaagtggatgtgtagctatttgaagaaggcaaggaaccctgagattcttctttgaatcctctagtccaagtcttagaccagtgattggtgcttaccttgaacaaaattttgtctgtgttcctaatcccttcaatactctgggtacaatgctcccaatcaccctgcacatttgattctaaatggcttttattttttaaaaatccatatccctaggacaagagaacaggatgcctatatccccaaaatgagctccaggacactgatgggaatgatcccaaagatcaccccacctcagaaacgtctgtgccaagagacttccccagatagaaacactgggacagtggtttgaacgacttcttttatggttgtccagtttgctatggaaataaaaggcattgattttttaaaaagatgattggaacctgtctttggccacatagggccacttggatccatttccaggccttactcatatattgccttcactgaagggctttggctttaagtcccagactggtctcccaagtgaaccataagtgttttggagctcatctggggtgaggcatgagaatgttgccccatctatcccttcaggaaaaggtgccttccctccctttctcctaaagcctggtccccagaaattgtttttgtctccaaaagtctagtatggtctttatacacccagactcttagtgttgcgtcctgccttgtttccttgttaaggatctatgcagacctcccgctttggcttagctagcgtgacattggctatcatttgacaagactaacttttttttttttttttttttgactgagtctccctctgtcacctaggctggagtgcagtggcacaatcttggctcgctgcaaccttcacccttcacctcccaggtcgaagcgattctcctgcctcagtctcccgagtagctgggattacaggcgtgcgccaccaaatctggctatttttttattattattatttttagtagagatggggtttcaccatgttggccagactggtcttgaactcttggcctcaaattatctgcccacctcggcctcccaaagtgctgggattacaggcatgagccaccatgcccagctgacaagactaattttttatcccttggtttattggcttcaacatcttctggaatcagaggtgattttttcttaccttggatgcctgagactaggggagtatagaattccaattggtaattaaggcatctttctgctcctgatcagaagggcaggttagttgggagaggtcagatggcacaacagaagtcaccttgtaagtaaggcaaagacttgaaggcattagcgtttctcattactaggtcaataacctgagggaatcaatggctttttgccgctctacctcttgtgtatctctttgacttttctttctctgtctagtttcctctgttctcagtttatattctatgttatcagtctctctttccacagtacaaacatccatcctttctcctgtgcaattctgtctctccctcttattatctttatttgtactttttccttcctccctgtctaggcattgggcatgtgcctcttcttagcctgtgattttgccttgggactgatgataaattatttccagattcaatcagccctggtcctaccccagtccaatcagaagtatgttggtgggaatcaacctgatcctggccctttcttcttctccattttcattcgtaatccccctcagcagatctttacaagcagtttccttatagctcatgtatctttaggtctttgccttccaagcactgtacagaatactttgtggttcctttttagtctgacattttgtggagcagtgaagcgtgctcagagacataatcagctgaagagaaaaaatccacccatggatttatatcagctaaatactaataattgattttgtttgatgtgcccataatttttaaagctgcaatataatataatgagggaccacaggtaatttctcctgtcatttgttttggctggatgggggtgggggagtaattgcttaaagttttaccattacacattaaactctctataataatcttgtttggggcttgctaactgttgagctgttttaactaaactggtaggcaatcggagttgatttaaatgaaaagataatttaacaaatctatactataaaaagagacatttgcttaattgacatgtattttttccttctgagtcacctaaacatttactcttgacaccaactgttcatgatactgaatagacagtccatataagagaaattagtggacctaaagaagccagattgtaggtgttaatttattaaacagagtgcaaagcccttggaaatgtcactgcttggcaataccatatggaatgccaaaatttacaatgacttttctttataagttatccaaaagggatttgaacaagtaagaggttatgccaaaatgtctccaatgtatggtcctgtaatatattgcagcttgaagccaatgatcccttatgacttgtatacaactaatgcatgttttattgaattttgcatttcccacgtgtggtaagttctttaaaatgtttttgatcacctttttgtgccattaaacttgtacagaaaatgtttttatggccattttcaaagggagaaagtttaaaatggaaacagcccaccctttctgccctatagctgtagttagaattgagtacctgtagcaaaacagctgtaattggtggttgtagtgttagaggtgttagcttgctagtgactagctttggagagtaaatgcatggtattgtacatcacatttcttaactcgttttaacctctgaaaagaatatattcttctttgtagtccttcttcccacccccttgccctctccctctccctgctcccagttgtcttacagttgtaaatatctgatttgaggcccaataactcttgccaagtaaagtcagcaaacaacaaacaaaccaaaatgtggggaaaaggcatttctcaaccatctctcagcagttattgatcatttcttaaggaacagcattgtgatcaaagactcaactttacgtaaaaatcagtggtaaattggggttgtatttggccatttgattacatttcaggattgaatagttttcagaatcacatgtaatccaaagacagtaggtagtgatgtcccttatccctgcagctgttttaagatagagacctcagaagactctgcttgaccgatgaccaataattatttgaaaaaaaaagaaaaaatgagagaaataaaacagatatttaagaactttagccacctatttagaatagttatagccagaaaaaaaaacaagggcatgagttcaaatgcattactatcagtgtcctaggcaatacctaacctactctgaaattgtgattcaaaagcagtatttcaagaggcattctccttttttggtttgctgaccccacttggactggtaggtttggtgaggcccccataaaccagctggagcagacccttttcatctcctgtgcctgtaacacccctcttcccccaccccctccgcaattcaatgagggctttcttgggtcagaggacttcaaggttgtctagagaagtttgccatgtgtgtaaggtgctgtgaactgtgagtgctgaagattcgcagcattcaataccaggcagccaaagagctgctcttgcaattattttggctctcaagctctgttcttcatcgcattctcatttctgtgtacatttgcaagatgtgtgtaatgtcattttccaaaaataaaatttgatttcaat

SEQ ID NO: 127961 - DNA, 2981 bp, Homo sapiens
  Payload ID: 5055
  Gene Symbol: DCX
  Gene Name: doublecortin
  Uniprot ID: O43602
  ENST ID: ENST00000356220
  CDS Start-End: 101-1198
gagattggttttctttctctcagcatctccacccaaccagcagaaaaccgcttctacctgggattttcctttggaaaagtctctgaggttccaccaaaatatggaacttgattttggacactttgacgaaagagataagacatccaggaacatgcgaggctcccggatgaatgggttgcctagccccactcacagcgcccactgtagcttctaccgaaccagaaccttgcaggcactgagtaatgagaagaaagccaagaaggtacgtttctaccgcaatggggaccgctacttcaaggggattgtgtacgctgtgtcctctgaccgttttcgcagctttgacgccttgctggctgacctgacgcgatctctgtctgacaacatcaacctgcctcagggagtgcgttacatttacaccattgatggatccaggaagatcggaagcatggatgaactggaggaaggggaaagctatgtctgttcctcagacaacttctttaaaaaggtggagtacaccaagaatgtcaatcccaactggtctgtcaacgtaaaaacatctgccaatatgaaagccccccagtccttggctagcagcaacagtgcacaggccagggagaacaaggactttgtgcgccccaagctggttaccatcatccgcagtggggtgaagcctcggaaggctgtgcgtgtgcttctgaacaagaagacagcccactcttttgagcaagtcctcactgatatcacagaagccatcaaactggagaccggggttgtcaaaaaactctacactctggatggaaaacaggtaacttgtctccatgatttctttggtgatgatgatgtgtttattgcctgtggtcctgaaaaatttcgctatgctcaggatgatttttctctggatgaaaatgaatgccgagtcatgaagggaaacccatcagccacagctggcccaaaggcatccccaacacctcagaagacttcagccaagagccctggtcctatgcgccgaagcaagtctccagctgactcaggtaacgaccaagacgcaaacggaacctccagcagccagctctctacccccaagtctaagcagtctcccatctctacgcccaccagtcctggcagcctccggaagcacaaggacctgtacctgcctctgtccttggatgactcggactcgcttggtgattccatgtaaaggaggggagagtgctcagagtccagagtacaaatccaagcctatcattgtagtagggtacttctgctcaagtgtccaacagggctattggtgctttcaagtttttattttgttgttgttgttattttgaaaaacacattgtaatatgttgggtttattttcctgtgatttctcctctgggccactgatccacagttaccaattatgagagatagattgataaccatcctttggggcagcattccagggatgcaaaatgtgctagtccatgacctttcaatggaaagcttaggtgcctgcgttatatttgccctgtctaattttgcccatacagtcttccttctgtagagggctgtttacatatacagcacttaaaatgtttgtgtgggaaaaaaaaaactcattggcagatccaagaatgacaaacacaagtgccccttttctctggatctcaagaatggtggaggaccctggaaggacagcaaggcagctccccagcctcactcttcactcctgattgaggcccgggtttgttgtccagcaccaattctggctgtcaatggggagaaataaaccaacaacttataattgtgacaccagatgcttaggatcctggtgctgggttagctaagagaatagacagaattggaaaatactgcagacatttccgaagagtttataaagcacagtgaattcctggtcaatctctccactgaggcaatttggaatcaataagcaattgataatagtttggagtaagggacttcatatacctgattcctctagaaggctgtctaacataccacatgattacatgaactgtatggtatccatctatctctgttctattgaatgccttgttaacagccaacactgaaaacactgtgagaatttgttttcaggtctgacacctttcagtctctttttatagcaagaaatcaatatcctttttataaaaattcatgtctgtatttcaggagcaaactcttcaggctccttttttataaactggtgatttttcttttgtctaaaaaacacatgaagaaaatttaccaaaaaaaaaaaaaaaagcagaagaataatgtagtttagaaattatgctgtcactgccaaacagtaacctccaggagaaaacaagatgaatagcagaggccaattcaatagaatcagttttttgatagctttttaacagttatgcttgcattaataatttcaatgtggaccagacattctaattatattttaaatgaaatgttacagcatattttaagcaactctttttatctataatcctaatatttcatactgaagacacagaaatctttcacttgtctttaacattagaaaggatttctctttactaaggactgatcatttgaaatagttttcagtcttttgagatacaggtttataacactgcttttttttttctgtaatcatagcccataatggcaaagacaactaaatttaagtgaaggtcatgcatgccaattctgtgtttgcttttagcagatatgaagatttccttatttctttgtaattgtgcagatattttgaaaggcacagcattcgaagccaagctgctgtttggctactgaatggcttgcagttgttcctccactctaaatggaatgagcttgctgtgtgtgtgtgtggtggtggtgggagggggtggtgcatgtgtgtgtgtgtgtgtgcatctgcagctgcttcaaaattaggaaatactacaggacacccctgtaatggattggtggcaactgggtggcactgctgatgtgca

SEQ ID NO: 127962 - DNA, 9223 bp, Homo sapiens
  Payload ID: 5055
  Gene Symbol: DCX
  Gene Name: doublecortin
  ENST ID: ENST00000358070
  CDS Start-End: 1-1316
attgtactgaaatgcaaagactgcttcctaagctggagatgctaaccttgggtagctccttctgttctcttcaaggggaattttgtcaggctatggattcatttacaactgttagtcatgtgggcatgtgtgaggaaacagatgccagttttaatgtatttagcccgaagttccaatttgataggagccactgtcagtctctgaggttccaccaaaatatggaacttgattttggacactttgacgaaagagataagacatccaggaacatgcgaggctcccggatgaatgggttgcctagccccactcacagcgcccactgtagcttctaccgaaccagaaccttgcaggcactgagtaatgagaagaaagccaagaaggtacgtttctaccgcaatggggaccgctacttcaaggggattgtgtacgctgtgtcctctgaccgttttcgcagctttgacgccttgctggctgacctgacgcgatctctgtctgacaacatcaacctgcctcagggagtgcgttacatttacaccattgatggatccaggaagatcggaagcatggatgaactggaggaaggggaaagctatgtctgttcctcagacaacttctttaaaaaggtggagtacaccaagaatgtcaatcccaactggtctgtcaacgtaaaaacatctgccaatatgaaagccccccagtccttggctagcagcaacagtgcacaggccagggagaacaaggactttgtgcgccccaagctggttaccatcatccgcagtggggtgaagcctcggaaggctgtgcgtgtgcttctgaacaagaagacagcccactcttttgagcaagtcctcactgatatcacagaagccatcaaactggagaccggggttgtcaaaaaactctacactctggatggaaaacaggtaacttgtctccatgatttctttggtgatgatgatgtgtttattgcctgtggtcctgaaaaatttcgctatgctcaggatgatttttctctggatgaaaatgaatgccgagtcatgaagggaaacccatcagccacagctggcccaaaggcatccccaacacctcagaagacttcagccaagagccctggtcctatgcgccgaagcaagtctccagctgactcaggtaacgaccaagacgcaaacggaacctccagcagccagctctctacccccaagtctaagcagtctcccatctctacgcccaccagtcctggcagcctccggaagcacaaggacctgtacctgcctctgtccttggatgactcggactcgcttggtgattccatgtaaaggaggggagagtgctcagagtccagagtacaaatccaagcctatcattgtagtagggtacttctgctcaagtgtccaacagggctattggtgctttcaagtttttattttgttgttgttgttattttgaaaaacacattgtaatatgttgggtttattttcctgtgatttctcctctgggccactgatccacagttaccaattatgagagatagattgataaccatcctttggggcagcattccagggatgcaaaatgtgctagtccatgacctttcaatggaaagcttaggtgcctgcgttatatttgccctgtctaattttgcccatacagtcttccttctgtagagggctgtttacatatacagcacttaaaatgtttgtgtgggaaaaaaaaaactcattggcagatccaagaatgacaaacacaagtgccccttttctctggatctcaagaatggtggaggaccctggaaggacagcaaggcagctccccagcctcactcttcactcctgattgaggcccgggtttgttgtccagcaccaattctggctgtcaatggggagaaataaaccaacaacttataattgtgacaccagatgcttaggatcctggtgctgggttagctaagagaatagacagaattggaaaatactgcagacatttccgaagagtttataaagcacagtgaattcctggtcaatctctccactgaggcaatttggaatcaataagcaattgataatagtttggagtaagggacttcatatacctgattcctctagaaggctgtctaacataccacatgattacatgaactgtatggtatccatctatctctgttctattgaatgccttgttaacagccaacactgaaaacactgtgagaatttgttttcaggtctgacacctttcagtctctttttatagcaagaaatcaatatcctttttataaaaattcatgtctgtatttcaggagcaaactcttcaggctccttttttataaactggtgatttttcttttgtctaaaaaacacatgaagaaaatttaccaaaaaaaaaaaaaaaagcagaagaataatgtagtttagaaattatgctgtcactgccaaacagtaacctccaggagaaaacaagatgaatagcagaggccaattcaatagaatcagttttttgatagctttttaacagttatgcttgcattaataatttcaatgtggaccagacattctaattatattttaaatgaaatgttacagcatattttaagcaactctttttatctataatcctaatatttcatactgaagacacagaaatctttcacttgtctttaacattagaaaggatttctctttactaaggactgatcatttgaaatagttttcagtcttttgagatacaggtttataacactgcttttttttttctgtaatcatagcccataatggcaaagacaactaaatttaagtgaaggtcatgcatgccaattctgtgtttgcttttagcagatatgaagatttccttatttctttgtaattgtgcagatattttgaaaggcacagcattcgaagccaagctgctgtttggctactgaatggcttgcagttgttcctccactctaaatggaatgagcttgctgtgtgtgtgtgtggtggtggtgggagggggtggtgcatgtgtgtgtgtgtgtgtgcatctgcagctgcttcaaaattaggaaatactacaggacacccctgtaatggattggtggcaactgggtggcactgctgatgtgcactgtgtaggggggaacccagtggtggtggggtagctcagatgcccctagacaagcttcagatgtctgtagctaccagaaacattttcggttcaggaaaagtgagatgatggtagtactggtttctggtgaaattgaagaaccccaaatgatgaggatctctttttgccccctctcctttttttgtagacccattcaaaaccattaataagcccattttactaagcccctatttctttctagaagctcagggttttcttagtgcctcccagaacattttgtagttaattgggaaaaagtgatacttggattagggggtgtgggcataaagaatggtgggaggcctgattttaaacttcaggccagaacccccaatgactccacccatagtctcactttaggtctcatttagtccatcacctttattttaagttgaggaagtggaggctggtaaagagcaggaccagaggaagaatccagatttccttatgcttgggcctcacactagctctctgagtatttccttgattgcggtatatgtactactagaaaataccaaatggatatattttctttaggataacctttgaaccaacaatcttcaataacaatagtacatcttccatcttacttttaatcgagtataaggaaatgtttctttatggccattttggagggagcaggggatgaggcttggcatagtccaaaatttaagtctccaataattaattgcattttaaattggcccactttcaaggcaattttttttgtgtgtctgtaactgagctcctccacccctgtcattcacttccaattttacccaatccaattttagcactcaagttccattgtgttaatttctgcacggtcaacaaacatcaagtcagcaagcatttgccaccactccctatacttctccctccttcttacacacacacacacacacacacacacaatccatctcttgcttgttcctacctcctgatttttcttccctacagaaatagaaatagggacaaagaaggggaaaatgtatatattggggctgggctgaacaactaacttcataagtagtattaactaggggtaaattgagagaaaagctccttttctcttcactgttttggaaaggatagccattagcatgactgctttgtgtccttatggactttagtattagcctagattgaattatagcgttttctagctggaaggaaccttaagatcacatcatctactcctctactccaaatttctcattcttcaggccaggaaaccgagacacagaggtaaagtaatttccccaaggtcacacagctggctggggcaggattgggtttacaacccacatctcctggctcttattccagggccttttcccactaagtagtattgccttccattaggctcctgagagttatttctcagggtcatgttgcatcttggagccacatgctgctgccctgatctcagtgggaaatccacccagcaacctaatacagccccttttccctgcattcacctggttcccatccacatgggttgcagatgtccttgaagagagtgaggcattgagggccaataggagcaatggggtccctggccttgtccatctgattcaggagatcactgctccatcgtgaggagccctctgaatagccccccactgaatgcttgccttgcccaaatggaatggaggaagattgattttctccatcagttcaccttgtgtcatctcataatggttggtctttccaggctgagggaaatgtttcttgtttccagagtagaaaaagaaagagtggaacaatagctttgttcatcctaactttctgagatggcttttcaacattttaaaaaaactagtgtggctaccattcactggcaatgatttcttttagaatatgggagtaagatgagctagagaaaataacctggtctcactgtggttgccctcatccacaatgtccccaaagccatcctgctctgatgaggacaatttccaggtataagcaaggggctttgtgacaaaaatgtaccctggctgatgttaaacattggctcctgtgtttgcaccaaaatagcaagctgtgtgctctatacactcttcccatcgtcttgtgtacactgctcctgtggccttccacagcagaaaccagggcaaaagggtccaaacacatggttttccttgctgcaaggctcttcctgggaactaagggggtatttattagttcagttctaagagacctccttctgggcttaccccactcctcaggtacttctctctccttcctccttctcctccacagtcacaagtaaccaaggaacctgaaagtggatgtgtagctatttgaagaaggcaaggaaccctgagattcttctttgaatcctctagtccaagtcttagaccagtgattggtgcttaccttgaacaaaattttgtctgtgttcctaatcccttcaatactctgggtacaatgctcccaatcaccctgcacatttgattctaaatggcttttattttttaaaaatccatatccctaggacaagagaacaggatgcctatatccccaaaatgagctccaggacactgatgggaatgatcccaaagatcaccccacctcagaaacgtctgtgccaagagacttccccagatagaaacactgggacagtggtttgaacgacttcttttatggttgtccagtttgctatggaaataaaaggcattgattttttaaaaagatgattggaacctgtctttggccacatagggccacttggatccatttccaggccttactcatatattgccttcactgaagggctttggctttaagtcccagactggtctcccaagtgaaccataagtgttttggagctcatctggggtgaggcatgagaatgttgccccatctatcccttcaggaaaaggtgccttccctccctttctcctaaagcctggtccccagaaattgtttttgtctccaaaagtctagtatggtctttatacacccagactcttagtgttgcgtcctgccttgtttccttgttaaggatctatgcagacctcccgctttggcttagctagcgtgacattggctatcatttgacaagactaacttttttttttttttttttttgactgagtctccctctgtcacctaggctggagtgcagtggcacaatcttggctcgctgcaaccttcacccttcacctcccaggtcgaagcgattctcctgcctcagtctcccgagtagctgggattacaggcgtgcgccaccaaatctggctatttttttattattattatttttagtagagatggggtttcaccatgttggccagactggtcttgaactcttggcctcaaattatctgcccacctcggcctcccaaagtgctgggattacaggcatgagccaccatgcccagctgacaagactaattttttatcccttggtttattggcttcaacatcttctggaatcagaggtgattttttcttaccttggatgcctgagactaggggagtatagaattccaattggtaattaaggcatctttctgctcctgatcagaagggcaggttagttgggagaggtcagatggcacaacagaagtcaccttgtaagtaaggcaaagacttgaaggcattagcgtttctcattactaggtcaataacctgagggaatcaatggctttttgccgctctacctcttgtgtatctctttgacttttctttctctgtctagtttcctctgttctcagtttatattctatgttatcagtctctctttccacagtacaaacatccatcctttctcctgtgcaattctgtctctccctcttattatctttatttgtactttttccttcctccctgtctaggcattgggcatgtgcctcttcttagcctgtgattttgccttgggactgatgataaattatttccagattcaatcagccctggtcctaccccagtccaatcagaagtatgttggtgggaatcaacctgatcctggccctttcttcttctccattttcattcgtaatccccctcagcagatctttacaagcagtttccttatagctcatgtatctttaggtctttgccttccaagcactgtacagaatactttgtggttcctttttagtctgacattttgtggagcagtgaagcgtgctcagagacataatcagctgaagagaaaaaatccacccatggatttatatcagctaaatactaataattgattttgtttgatgtgcccataatttttaaagctgcaatataatataatgagggaccacaggtaatttctcctgtcatttgttttggctggatgggggtgggggagtaattgcttaaagttttaccattacacattaaactctctataataatcttgtttggggcttgctaactgttgagctgttttaactaaactggtaggcaatcggagttgatttaaatgaaaagataatttaacaaatctatactataaaaagagacatttgcttaattgacatgtattttttccttctgagtcacctaaacatttactcttgacaccaactgttcatgatactgaatagacagtccatataagagaaattagtggacctaaagaagccagattgtaggtgttaatttattaaacagagtgcaaagcccttggaaatgtcactgcttggcaataccatatggaatgccaaaatttacaatgacttttctttataagttatccaaaagggatttgaacaagtaagaggttatgccaaaatgtctccaatgtatggtcctgtaatatattgcagcttgaagccaatgatcccttatgacttgtatacaactaatgcatgttttattgaattttgcatttcccacgtgtggtaagttctttaaaatgtttttgatcacctttttgtgccattaaacttgtacagaaaatgtttttatggccattttcaaagggagaaagtttaaaatggaaacagcccaccctttctgccctatagctgtagttagaattgagtacctgtagcaaaacagctgtaattggtggttgtagtgttagaggtgttagcttgctagtgactagctttggagagtaaatgcatggtattgtacatcacatttcttaactcgttttaacctctgaaaagaatatattcttctttgtagtccttcttcccacccccttgccctctccctctccctgctcccagttgtcttacagttgtaaatatctgatttgaggcccaataactcttgccaagtaaagtcagcaaacaacaaacaaaccaaaatgtggggaaaaggcatttctcaaccatctctcagcagttattgatcatttcttaaggaacagcattgtgatcaaagactcaactttacgtaaaaatcagtggtaaattggggttgtatttggccatttgattacatttcaggattgaatagttttcagaatcacatgtaatccaaagacagtaggtagtgatgtcccttatccctgcagctgttttaagatagagacctcagaagactctgcttgaccgatgaccaataattatttgaaaaaaaaagaaaaaatgagagaaataaaacagatatttaagaactttagccacctatttagaatagttatagccagaaaaaaaaacaagggcatgagttcaaatgcattactatcagtgtcctaggcaatacctaacctactctgaaattgtgattcaaaagcagtatttcaagaggcattctccttttttggtttgctgaccccacttggactggtaggtttggtgaggcccccataaaccagctggagcagacccttttcatctcctgtgcctgtaacacccctcttcccccaccccctccgcaattcaatgagggctttcttgggtcagaggacttcaaggttgtctagagaagtttgccatgtgtgtaaggtgctgtgaactgtgagtgctgaagattcgcagcattcaataccaggcagccaaagagctgctcttgcaattattttggctctcaagctctgttcttcatcgcattctcatttctgtgtacatttgcaagatgtgtgtaatgtcattttccaaaaataaaatttgatttcaat

SEQ ID NO: 127963 - DNA, 9231 bp, Homo sapiens
  Payload ID: 5055
  Gene Symbol: DCX
  Gene Name: doublecortin
  Uniprot ID: O43602
  ENST ID: ENST00000371993
  CDS Start-End: 245-1327
tagagagattggttttctttctctcagcatctccacccaaccagcagaaaaccggtgagtggggcttttaagtgattttcaagaagaatgtaacagatgtcaaacgggaaaagcacaaggcaaagcctgctctctctgtctctctgtctcctcttctccttttttgccttattctatccgattttttccctaagcttctacctgggattttcctttggaaaagtctctgaggttccaccaaaatatggaacttgattttggacactttgacgaaagagataagacatccaggaacatgcgaggctcccggatgaatgggttgcctagccccactcacagcgcccactgtagcttctaccgaaccagaaccttgcaggcactgagtaatgagaagaaagccaagaaggtacgtttctaccgcaatggggaccgctacttcaaggggattgtgtacgctgtgtcctctgaccgttttcgcagctttgacgccttgctggctgacctgacgcgatctctgtctgacaacatcaacctgcctcagggagtgcgttacatttacaccattgatggatccaggaagatcggaagcatggatgaactggaggaaggggaaagctatgtctgttcctcagacaacttctttaaaaaggtggagtacaccaagaatgtcaatcccaactggtctgtcaacgtaaaaacatctgccaatatgaaagccccccagtccttggctagcagcaacagtgcacaggccagggagaacaaggactttgtgcgccccaagctggttaccatcatccgcagtggggtgaagcctcggaaggctgtgcgtgtgcttctgaacaagaagacagcccactcttttgagcaagtcctcactgatatcacagaagccatcaaactggagaccggggttgtcaaaaaactctacactctggatggaaaacaggtaacttgtctccatgatttctttggtgatgatgatgtgtttattgcctgtggtcctgaaaaatttcgctatgctcaggatgatttttctctggatgaaaatgaatgccgagtcatgaagggaaacccatcagccacagctggcccaaaggcatccccaacacctcagaagacttcagccaagagccctggtcctatgcgccgaagcaagtctccagctgactcagcaaacggaacctccagcagccagctctctacccccaagtctaagcagtctcccatctctacgcccaccagtcctggcagcctccggaagcacaaggacctgtacctgcctctgtccttggatgactcggactcgcttggtgattccatgtaaaggaggggagagtgctcagagtccagagtacaaatccaagcctatcattgtagtagggtacttctgctcaagtgtccaacagggctattggtgctttcaagtttttattttgttgttgttgttattttgaaaaacacattgtaatatgttgggtttattttcctgtgatttctcctctgggccactgatccacagttaccaattatgagagatagattgataaccatcctttggggcagcattccagggatgcaaaatgtgctagtccatgacctttcaatggaaagcttaggtgcctgcgttatatttgccctgtctaattttgcccatacagtcttccttctgtagagggctgtttacatatacagcacttaaaatgtttgtgtgggaaaaaaaaaactcattggcagatccaagaatgacaaacacaagtgccccttttctctggatctcaagaatggtggaggaccctggaaggacagcaaggcagctccccagcctcactcttcactcctgattgaggcccgggtttgttgtccagcaccaattctggctgtcaatggggagaaataaaccaacaacttataattgtgacaccagatgcttaggatcctggtgctgggttagctaagagaatagacagaattggaaaatactgcagacatttccgaagagtttataaagcacagtgaattcctggtcaatctctccactgaggcaatttggaatcaataagcaattgataatagtttggagtaagggacttcatatacctgattcctctagaaggctgtctaacataccacatgattacatgaactgtatggtatccatctatctctgttctattgaatgccttgttaacagccaacactgaaaacactgtgagaatttgttttcaggtctgacacctttcagtctctttttatagcaagaaatcaatatcctttttataaaaattcatgtctgtatttcaggagcaaactcttcaggctccttttttataaactggtgatttttcttttgtctaaaaaacacatgaagaaaatttaccaaaaaaaaaaaaaaaagcagaagaataatgtagtttagaaattatgctgtcactgccaaacagtaacctccaggagaaaacaagatgaatagcagaggccaattcaatagaatcagttttttgatagctttttaacagttatgcttgcattaataatttcaatgtggaccagacattctaattatattttaaatgaaatgttacagcatattttaagcaactctttttatctataatcctaatatttcatactgaagacacagaaatctttcacttgtctttaacattagaaaggatttctctttactaaggactgatcatttgaaatagttttcagtcttttgagatacaggtttataacactgcttttttttttctgtaatcatagcccataatggcaaagacaactaaatttaagtgaaggtcatgcatgccaattctgtgtttgcttttagcagatatgaagatttccttatttctttgtaattgtgcagatattttgaaaggcacagcattcgaagccaagctgctgtttggctactgaatggcttgcagttgttcctccactctaaatggaatgagcttgctgtgtgtgtgtgtggtggtggtgggagggggtggtgcatgtgtgtgtgtgtgtgtgcatctgcagctgcttcaaaattaggaaatactacaggacacccctgtaatggattggtggcaactgggtggcactgctgatgtgcactgtgtaggggggaacccagtggtggtggggtagctcagatgcccctagacaagcttcagatgtctgtagctaccagaaacattttcggttcaggaaaagtgagatgatggtagtactggtttctggtgaaattgaagaaccccaaatgatgaggatctctttttgccccctctcctttttttgtagacccattcaaaaccattaataagcccattttactaagcccctatttctttctagaagctcagggttttcttagtgcctcccagaacattttgtagttaattgggaaaaagtgatacttggattagggggtgtgggcataaagaatggtgggaggcctgattttaaacttcaggccagaacccccaatgactccacccatagtctcactttaggtctcatttagtccatcacctttattttaagttgaggaagtggaggctggtaaagagcaggaccagaggaagaatccagatttccttatgcttgggcctcacactagctctctgagtatttccttgattgcggtatatgtactactagaaaataccaaatggatatattttctttaggataacctttgaaccaacaatcttcaataacaatagtacatcttccatcttacttttaatcgagtataaggaaatgtttctttatggccattttggagggagcaggggatgaggcttggcatagtccaaaatttaagtctccaataattaattgcattttaaattggcccactttcaaggcaattttttttgtgtgtctgtaactgagctcctccacccctgtcattcacttccaattttacccaatccaattttagcactcaagttccattgtgttaatttctgcacggtcaacaaacatcaagtcagcaagcatttgccaccactccctatacttctccctccttcttacacacacacacacacacacacacacaatccatctcttgcttgttcctacctcctgatttttcttccctacagaaatagaaatagggacaaagaaggggaaaatgtatatattggggctgggctgaacaactaacttcataagtagtattaactaggggtaaattgagagaaaagctccttttctcttcactgttttggaaaggatagccattagcatgactgctttgtgtccttatggactttagtattagcctagattgaattatagcgttttctagctggaaggaaccttaagatcacatcatctactcctctactccaaatttctcattcttcaggccaggaaaccgagacacagaggtaaagtaatttccccaaggtcacacagctggctggggcaggattgggtttacaacccacatctcctggctcttattccagggccttttcccactaagtagtattgccttccattaggctcctgagagttatttctcagggtcatgttgcatcttggagccacatgctgctgccctgatctcagtgggaaatccacccagcaacctaatacagccccttttccctgcattcacctggttcccatccacatgggttgcagatgtccttgaagagagtgaggcattgagggccaataggagcaatggggtccctggccttgtccatctgattcaggagatcactgctccatcgtgaggagccctctgaatagccccccactgaatgcttgccttgcccaaatggaatggaggaagattgattttctccatcagttcaccttgtgtcatctcataatggttggtctttccaggctgagggaaatgtttcttgtttccagagtagaaaaagaaagagtggaacaatagctttgttcatcctaactttctgagatggcttttcaacattttaaaaaaactagtgtggctaccattcactggcaatgatttcttttagaatatgggagtaagatgagctagagaaaataacctggtctcactgtggttgccctcatccacaatgtccccaaagccatcctgctctgatgaggacaatttccaggtataagcaaggggctttgtgacaaaaatgtaccctggctgatgttaaacattggctcctgtgtttgcaccaaaatagcaagctgtgtgctctatacactcttcccatcgtcttgtgtacactgctcctgtggccttccacagcagaaaccagggcaaaagggtccaaacacatggttttccttgctgcaaggctcttcctgggaactaagggggtatttattagttcagttctaagagacctccttctgggcttaccccactcctcaggtacttctctctccttcctccttctcctccacagtcacaagtaaccaaggaacctgaaagtggatgtgtagctatttgaagaaggcaaggaaccctgagattcttctttgaatcctctagtccaagtcttagaccagtgattggtgcttaccttgaacaaaattttgtctgtgttcctaatcccttcaatactctgggtacaatgctcccaatcaccctgcacatttgattctaaatggcttttattttttaaaaatccatatccctaggacaagagaacaggatgcctatatccccaaaatgagctccaggacactgatgggaatgatcccaaagatcaccccacctcagaaacgtctgtgccaagagacttccccagatagaaacactgggacagtggtttgaacgacttcttttatggttgtccagtttgctatggaaataaaaggcattgattttttaaaaagatgattggaacctgtctttggccacatagggccacttggatccatttccaggccttactcatatattgccttcactgaagggctttggctttaagtcccagactggtctcccaagtgaaccataagtgttttggagctcatctggggtgaggcatgagaatgttgccccatctatcccttcaggaaaaggtgccttccctccctttctcctaaagcctggtccccagaaattgtttttgtctccaaaagtctagtatggtctttatacacccagactcttagtgttgcgtcctgccttgtttccttgttaaggatctatgcagacctcccgctttggcttagctagcgtgacattggctatcatttgacaagactaacttttttttttttttttttttgactgagtctccctctgtcacctaggctggagtgcagtggcacaatcttggctcgctgcaaccttcacccttcacctcccaggtcgaagcgattctcctgcctcagtctcccgagtagctgggattacaggcgtgcgccaccaaatctggctatttttttattattattatttttagtagagatggggtttcaccatgttggccagactggtcttgaactcttggcctcaaattatctgcccacctcggcctcccaaagtgctgggattacaggcatgagccaccatgcccagctgacaagactaattttttatcccttggtttattggcttcaacatcttctggaatcagaggtgattttttcttaccttggatgcctgagactaggggagtatagaattccaattggtaattaaggcatctttctgctcctgatcagaagggcaggttagttgggagaggtcagatggcacaacagaagtcaccttgtaagtaaggcaaagacttgaaggcattagcgtttctcattactaggtcaataacctgagggaatcaatggctttttgccgctctacctcttgtgtatctctttgacttttctttctctgtctagtttcctctgttctcagtttatattctatgttatcagtctctctttccacagtacaaacatccatcctttctcctgtgcaattctgtctctccctcttattatctttatttgtactttttccttcctccctgtctaggcattgggcatgtgcctcttcttagcctgtgattttgccttgggactgatgataaattatttccagattcaatcagccctggtcctaccccagtccaatcagaagtatgttggtgggaatcaacctgatcctggccctttcttcttctccattttcattcgtaatccccctcagcagatctttacaagcagtttccttatagctcatgtatctttaggtctttgccttccaagcactgtacagaatactttgtggttcctttttagtctgacattttgtggagcagtgaagcgtgctcagagacataatcagctgaagagaaaaaatccacccatggatttatatcagctaaatactaataattgattttgtttgatgtgcccataatttttaaagctgcaatataatataatgagggaccacaggtaatttctcctgtcatttgttttggctggatgggggtgggggagtaattgcttaaagttttaccattacacattaaactctctataataatcttgtttggggcttgctaactgttgagctgttttaactaaactggtaggcaatcggagttgatttaaatgaaaagataatttaacaaatctatactataaaaagagacatttgcttaattgacatgtattttttccttctgagtcacctaaacatttactcttgacaccaactgttcatgatactgaatagacagtccatataagagaaattagtggacctaaagaagccagattgtaggtgttaatttattaaacagagtgcaaagcccttggaaatgtcactgcttggcaataccatatggaatgccaaaatttacaatgacttttctttataagttatccaaaagggatttgaacaagtaagaggttatgccaaaatgtctccaatgtatggtcctgtaatatattgcagcttgaagccaatgatcccttatgacttgtatacaactaatgcatgttttattgaattttgcatttcccacgtgtggtaagttctttaaaatgtttttgatcacctttttgtgccattaaacttgtacagaaaatgtttttatggccattttcaaagggagaaagtttaaaatggaaacagcccaccctttctgccctatagctgtagttagaattgagtacctgtagcaaaacagctgtaattggtggttgtagtgttagaggtgttagcttgctagtgactagctttggagagtaaatgcatggtattgtacatcacatttcttaactcgttttaacctctgaaaagaatatattcttctttgtagtccttcttcccacccccttgccctctccctctccctgctcccagttgtcttacagttgtaaatatctgatttgaggcccaataactcttgccaagtaaagtcagcaaacaacaaacaaaccaaaatgtggggaaaaggcatttctcaaccatctctcagcagttattgatcatttcttaaggaacagcattgtgatcaaagactcaactttacgtaaaaatcagtggtaaattggggttgtatttggccatttgattacatttcaggattgaatagttttcagaatcacatgtaatccaaagacagtaggtagtgatgtcccttatccctgcagctgttttaagatagagacctcagaagactctgcttgaccgatgaccaataattatttgaaaaaaaaagaaaaaatgagagaaataaaacagatatttaagaactttagccacctatttagaatagttatagccagaaaaaaaaacaagggcatgagttcaaatgcattactatcagtgtcctaggcaatacctaacctactctgaaattgtgattcaaaagcagtatttcaagaggcattctccttttttggtttgctgaccccacttggactggtaggtttggtgaggcccccataaaccagctggagcagacccttttcatctcctgtgcctgtaacacccctcttcccccaccccctccgcaattcaatgagggctttcttgggtcagaggacttcaaggttgtctagagaagtttgccatgtgtgtaaggtgctgtgaactgtgagtgctgaagattcgcagcattcaataccaggcagccaaagagctgctcttgcaattattttggctctcaagctctgttcttcatcgcattctcatttctgtgtacatttgcaagatgtgtgtaatgtcattttccaaaaataaaatttgatttc

SEQ ID NO: 127964 - DNA, 518 bp, Homo sapiens
  Payload ID: 5055
  Gene Symbol: DCX
  Gene Name: doublecortin
  ENST ID: ENST00000468911
  CDS Start-End: 180-518
aatgctgagctcagcataggtcatggtgacattggaaaaaaggcggaattgagcctggcagacccattaggcaccagtctttcttatctcctgtcctcctggtcccttgcaaatatattgatgtggcagtgtgtagcagctgagccctgcttgctttgtctctgaggttccaccaaaatatggaacttgattttggacactttgacgaaagagataagacatccaggaacatgcgaggctcccggatgaatgggttgcctagccccactcacagcgcccactgtagcttctaccgaaccagaaccttgcaggcactgagtaatgagaagaaagccaagaaggtacgtttctaccgcaatggggaccgctacttcaaggggattgtgtacgctgtgtcctctgaccgttttcgcagctttgacgccttgctggctgacctgacgcgatctctgtctgacaacatcaacctgcctcagggagtgcgttacatttacaccattgatggatccaggaagatc

SEQ ID NO: 127965 - DNA, 2422 bp, Homo sapiens
  Payload ID: 5055
  Gene Symbol: DCX
  Gene Name: doublecortin
  Uniprot ID: O43602
  ENST ID: ENST00000488120
  CDS Start-End: 261-1343
gaaacctttctagctgttaatgcagcctgtgaatttttttaaaagcatgtaattaatcataggaggttggggggattcactaagcctgagttacatgggagaagctggacaaggcactaggacctagaaggcatctatccaccctggcaggaatttcttgcttggagctcagacaacaaaggcatagagagattggttttctttctctcagcatctccacccaaccagcagaaaaccggtctctgaggttccaccaaaatatggaacttgattttggacactttgacgaaagagataagacatccaggaacatgcgaggctcccggatgaatgggttgcctagccccactcacagcgcccactgtagcttctaccgaaccagaaccttgcaggcactgagtaatgagaagaaagccaagaaggtacgtttctaccgcaatggggaccgctacttcaaggggattgtgtacgctgtgtcctctgaccgttttcgcagctttgacgccttgctggctgacctgacgcgatctctgtctgacaacatcaacctgcctcagggagtgcgttacatttacaccattgatggatccaggaagatcggaagcatggatgaactggaggaaggggaaagctatgtctgttcctcagacaacttctttaaaaaggtggagtacaccaagaatgtcaatcccaactggtctgtcaacgtaaaaacatctgccaatatgaaagccccccagtccttggctagcagcaacagtgcacaggccagggagaacaaggactttgtgcgccccaagctggttaccatcatccgcagtggggtgaagcctcggaaggctgtgcgtgtgcttctgaacaagaagacagcccactcttttgagcaagtcctcactgatatcacagaagccatcaaactggagaccggggttgtcaaaaaactctacactctggatggaaaacaggtaacttgtctccatgatttctttggtgatgatgatgtgtttattgcctgtggtcctgaaaaatttcgctatgctcaggatgatttttctctggatgaaaatgaatgccgagtcatgaagggaaacccatcagccacagctggcccaaaggcatccccaacacctcagaagacttcagccaagagccctggtcctatgcgccgaagcaagtctccagctgactcagcaaacggaacctccagcagccagctctctacccccaagtctaagcagtctcccatctctacgcccaccagtcctggcagcctccggaagcacaaggacctgtacctgcctctgtccttggatgactcggactcgcttggtgattccatgtaaaggaggggagagtgctcagagtccagagtacaaatccaagcctatcattgtagtagggtacttctgctcaagtgtccaacagggctattggtgctttcaagtttttattttgttgttgttgttattttgaaaaacacattgtaatatgttgggtttattttcctgtgatttctcctctgggccactgatccacagttaccaattatgagagatagattgataaccatcctttggggcagcattccagggatgcaaaatgtgctagtccatgacctttcaatggaaagcttaggtgcctgcgttatatttgccctgtctaattttgcccatacagtcttccttctgtagagggctgtttacatatacagcacttaaaatgtttgtgtgggaaaaaaaaaactcattggcagatccaagaatgacaaacacaagtgccccttttctctggatctcaagaatggtggaggaccctggaaggacagcaaggcagctccccagcctcactcttcactcctgattgaggcccgggtttgttgtccagcaccaattctggctgtcaatggggagaaataaaccaacaacttataattgtgacaccagatgcttaggatcctggtgctgggttagctaagagaatagacagaattggaaaatactgcagacatttccgaagagtttataaagcacagtgaattcctggtcaatctctccactgaggcaatttggaatcaataagcaattgataatagtttggagtaagggacttcatatacctgattcctctagaaggctgtctaacataccacatgattacatgaactgtatggtatccatctatctctgttctattgaatgccttgttaacagccaacactgaaaacactgtgagaatttgttttcaggtctgacacctttcagtctctttttatagcaagaaatcaatatcctttttataaaaattcatgtctgtatttcaggagcaaactcttcaggctccttttttataaactggtgatttttcttttgtctaaaaaacacatgaagaaaatttaccaaaaaaaaaaaaaaaagcagaagaa

SEQ ID NO: 127966 - DNA, 4669 bp, Homo sapiens
  Payload ID: 5056
  Gene Symbol: DCDC1
  Gene Name: doublecortin domain containing 1
  ENST ID: ENST00000303697
  CDS Start-End: 1-1222
tgatggaaagagaaaaactatgctctgcttggcttgtggacaatccatgagaacagagaaaggactgaaacaattgcttccaggggttccattcctctgtatttcaggcaccaagactcagaagcccttcttacaagggcccttcaaggtcatcagtgtggctgaggttgatttgtcgtgtgacaaggctgaaaaaactctaagttactaccaagcacgtctattgtctttacggatgaagacctgcacgcaagctgcatctcacagtggcatggcagccacacaccagaaggcagtgaaaataattgcatacaaaaatggggatgggtatcgtaatgggaagttaattgtggctggaacattccccatgcttcttacagaatgcacggaacaacttgggcttgccagagcagcctccaaagtatataccaaagatggaaccccaatctttaccttgcgtgatttggttttatgggctctagatgaatcctttctccagagagactctgagaaacaaaagcaagatgcagctcctgttggaaaagaacagataattgttgaaagtatggaagaaaatccaagaatgaaagtgaaaaacagattatttgcaaaatctgtgacatccgatagtttggatggtatagacaagtctttgcttaccctcatcctcagaaatcctattgccatctgggtgtcttgtggtgaaccatttctacctccaaatgctttgcagaaagcagaaaaattagagaaacagaactggctaaaaaaggacagaattttggctgatctagataccatgagacacaaaatgagacagttaaaagggcggcgagtagcggcatgtcagccagccaccatggttcctaccaagagccctgtgcagcccgtggtggttgaaggaggctggaccgaacagactcaacaggaaattaaactcatggaacttataagacatacagaggcacacctttctgaaatccaagaaatggaatccaaaataaattttccaattgcaaccaaacgtatagcagtcaagccgagcaacctgtataagcagcccaacacaaaacgagtgtggatttatctaaatggaggcagacctgaagatggcacttatgcctggggcaaaactatttcagaggtcagcttactttatctgaagacatggatctttatttggagcaggaaagttttcttctattttttgataactgcttaaggttaatgtattctagattcctctccagtaacaccaataatgtataggtttaatatctgatgtcttgacattataaatgtttgacttttctctctcatacactttgtctcttttcctttttctgtatcctgtgagatcttctccacctagtctgccctaataatgatttgaatttctgtaatattgagtcttttttctttcttaccttctctcctcttgtcattcagctctctcttcatcctcacttgaaaccctatttcttctctcactagcagctatacaactttggttattatatttaacctctttgttctccatttttctcatcaacaaaaggtggatactaattatttccacagaacaaaattagattgttcttgagaacttttagaaaaatacccagtccctagaaatgtgtcaatatgttttaatcagtattactgttatcagcagcctcagcatctctcctgtatctgagcaatactcctttcctttaagctgtggttgtctcgtttctgtgtgtatctgtgagtatatttacacacagaagtcatattttttgaatttaggggtaacacaacacagatacttttgaaaatgtactcctgctgtaaatctttttcaaaatcttcaccttgagtacaatgtaccctttttttatgttgtagaatattttcattagctttacattgttgctattgttgatttttctatttatatttccttgtacaaggagagatcttttgataacagacagaataggttagttctctttggtgaccctagacatctacttgggagctgtcagaatcctccctcaatggtaggttgaaggattggtttgtatgcagagtatttaatcaaattgcttctgactggatggtatttggcaggagtagggctgcatttaaccaacatggcacatgtatacatatgtaacaaacctgcacattgtgcacatgtaccctagaacttaaagtatgataaaaaaatatataaaaatagataacattaaaaaaagactactctcctgttggtcctctctgactatcctattctatagaggggaatatatttttggataatttgaattattattaaattcaatccactcatcccttactcaaaatactgggtgaaaagctgcgctttttgaactgcatcgccccatcactcttcttgtcttggctcatattcctgatgcatttgccagatgcaaggtgtcatcacatgcccagccctgacccctgccattctgccttgttgtgagttgtagcatctaaacagatctataaacagaagtattgatggtgatttggagggctgatgtggacttggcacctgcattttgggggaacaggcttttggccctctaataggtgaaagccatacaggcagctgctgcaagactgctcctctcgtctcaaaatgacccacccagctagagcactgtacacccccagtggagagccaattcagtcctgggacgacatagagcgagatatggtcatctgtgtgtctatgggacatggtttcaaaaccccaaaagagttaaaacaactgatggagatcagagcaaattatgccagaatccgaaggcagcagggccctcaagccacagacattgtggtgtcaccatccacgaagctgctgtctctggcacatctccacaattaactcctatcagaaccatcggattttctgctgtatttttctggaaagaaaactttctttacccacttataaacagaagactgtgacaagaaggccaattatttccatcgctgaagactctaaatttggcaaatcttctaaataacaatcctgcatagtttattaaaaaaaattagtcgtaaaatttatccttcaaaaatctgcattttaaataaaccctgacagtgatttctcaagactgtaaagatattagtctgagaatgcaactctaacagactgctctgggcatcttttctctttgccttggccaggcctctcagaattgagtgagcgtgtgactccatttgcacagtgggacagatgagtacaactgaaataaaaagtggaggcctctgcaaaaaataaaaaataaaaaataaatttatccttcaaaataactcagttttttcaatgggcctattttgaagaatgaacattgaaaaatgagacaatatatccataaattcatagtatgacataccataatcgagagcattgttagccatagacattttgtatgccagtgaaatctgtatacattctctaaatttttccagtttatcgtgtggcttattggaaaaaaaaaagcatatacactgactgcatgttttgtctccccaactaaatgataagtgcctagagggcaggaacacccttggttttatttacttgggacagagctctacccacaagggctcactgataaaactcatcagtcccaccccacagcaacatgatggggacatgaggttcagttcttctactcttggcctgagccgcaaaccaaaattacaacagtacaatgggaatagaggatctgctttatagaatttcctttcagtcagctgctcagaaactacaatcctcagagtgaaattaaatggagttatactgggatagtcctctctgcttttcagaggaaagaaacacttctcgaaattgtgcaaatgaaagaaatgtcatggtataaactagacatcttatatccttaaaatatatctttgatgattatacatattggtttcaaatcccaagtttgaagaaacatccaaaagttatgtgaaattacttatagatgaattgacaacatttgagacttcgacaggcaatcatgaagcagttctcaagttgatttggtttatatagctctttaagaatcttttggaaagccataatctcacaaaatacagatatgcaattttttttttttgagatggagtctcactctgttgcccagtctggagttcagtggcgcgatctcagctcactacaagctccccttcccaggttcaagcaattctcctgtctcagcctcctgagtagctgggactacaggcgcctgccaccacacccagctaacttttgtatttttagtagagatggggtttcaccttgttggtcaagctggtctcaaactcctgacctcaggtgatccactcgcctctgcctcccaaagtgctgggattacaggcgtaagccaccacacccagcccaaaaaatgtttgtgcacagaactgtggatgtttgtcacagaactttccaaataaagaagttctgataaaagagaagatatttctcatttccataatctttaaggtgtgggggatacgtaatctggacttctcaaatggatgatttctaaatacgcgtcagatgaagtgattctaactttctctgtagtaatatcttattttgttttattcaaaaacaataaaccatgtagatttattagca

SEQ ID NO: 127967 - DNA, 3980 bp, Homo sapiens
  Payload ID: 5056
  Gene Symbol: DCDC1
  Gene Name: doublecortin domain containing 1
  Uniprot ID: P59894
  ENST ID: ENST00000342355
  CDS Start-End: 239-1051
gtttctggccgagctgatgtggccgtggcacagctcagaagcgacgctccgcccaccccgacgcggtctctatggtaaccggtcaccgcttctatggagtggcgtttactaccaattgcaaataagaaaattccagattccattccaagatggccaaataggaacagctccagcctgcagctcccagcgtgattaatgtagaagatgggtgatttctgcatttccaactaagctgaaaatggcaaaaacaggagcagaagatcacagagaagcactatctcagtcttccttatccctcttgactgaagcaatggaagtattacagcaaagtagccctgaaggcactttggatgggaatactgtaaacccaatttacaaatatattttgaatgatttaccaagagagtttatgtcatcccaggcaaaagcagttattaaaactactgatgattatttgcagtctcagtttggccccaacagactcgtgcattcagcagcagtatcagaagggtcaggacttcaagattgctccacacatcaaacagcatcagatcacagccatgatgaaatatcagacctagatagctacaaatcaaacagtaaaaacaattcttgttctatatcagcatccaagagaaacagacctgtcagtgctccagtgggtcaactgagggttgcagagttctcttctttaaaatttcagtcagcccggaattggcagaaattgtctcaaagacacaaacttcaaccaagagtgattaaagtaacagcttacaaaaatggatctagaacagtctttgccagagttactgtaccaaccatcaccttgctgctggaggagtgcacagaaaagctgaatctgaacatggccgcaagacgagtgttcttggcagacggcaaggaagccctcgaacctgaagatataccccatgaagccgatgtttatgtttcaacgggagagccctttttaaatccattcaaaaaaattaaaggttttagatacttgtacaataagaatgaatctaaatttaccagccagatatttttatgatttgtatggcagaaaaattgaagatatttcaaaagttcctctgcttgaaaaatgcctgcaaaattccatcacacctttgcgaggactactttgggtctctaagggagaaggtttcagcccctcaggagctaagatgtacatccaaggagttcttttggccctgtaccaacgattaaagtctgcaaaaaaatattataaacagagaactgggtctcactatgttgcccaggcaagcctcaatctcctgtgctcaagggatcctcctgcctcagccttccgagttgctgagactacagttgaacctggtcatgaatgaacagaaggagaaaattacagaaaaagtcattctttcaatgacggcaaaggaacaccataaggaacaggaagaagtgagcaggctgattgatgaattgcagacagctatcaaaagtaacataggtcatctctgtaaacttggcccccaattacaggctgagcaggagcaattctcctcttatgtctaccaacacattaaaagccttccagcaaacacgcttgtcccaggaggcctgcagcttaaggtatttgaaaatggtaaaaacactggagagatctctgttggtatcagtaaaaaagatttgggatcggatagcccaattcaaactgaccatatgatggaaagattacttctcaagattcatcaaaggcttcaaggttcttccatcaacccaccaggcctcaattattcttcaatgcggctttttgatgagaatggccaagaaattaagaatccactttcgctgaagaatgagcaaaaaatttgggtctcttatggtagagcatacagatctccactaaatcttgctttgggtttgacctttgaccgagtgagtgcatttgccagaggtgatatcatggttgcatataagacctttttggatcctaatgctgttctgctacctggatgtggcaattgggaagtttgtgagggatttccaattaatttcaactgtaccagtcaacagatacctgaccagtttgaaaaggtggacttggagaaccattttctacagaacaaggtagatcccaatattgtccttcatgcctctgtttccattggaaagtggagtttctcaggcagtgaagcaagcagcaggagtcaaatagcgccatcgatcctgtggcctgtagccagtgtgtggctgatcaccaagactggaatgatcctgagccgagcgataactcagggctgcctggctattggtcatcctatcagagtcaaggctgctgagggaacatcactagaaggatataaattaatcttacagaaaagacatagtggagatgactctcagaagtgggtgtttggaactgatggttgcatttattcaaaggcttatcctcagtttgttctgacctacctagaggagctaaatgcacaagtagatgtgacccagacagagtatcacattcaccatggtgcctggaccacagctcatcaggaacatggcagaaacttagcagaagaggttctgcaagaaagtgccagcaaccttggtctgaagcaactgccagaaccctcagacacccatttaatgccagaaggttctcttgaggagacgggggagctgacagtagcactggtgaggaaactggaagagaaacatcctaaggcttctgctcagaggtgggccataaaacatgaaggaaccagtaagccaggccagtggaaacattctagagttgaaaatcctctatggaacaagcttacctacatgtggcctgtccttcccagtggccaacttaatgaggcaatgcagacagagcaaggaaggagatagacttggttcctaagttcatgaagcttacagattaagaagtataagctatgagtcaacaaggaagaaacaagaaaaggaaggagacagagttgatgaataaaggagaaggaagggagagagaagaaactcacagaaaaagtttggtgttccagaaatcaaggctatgcattgagccagtttatttagtcatatagtcactgtgaagaaagatcagctgggctgattgtccaaatgggcctgaaaattaagtaaaaatactaaatctaggaaaaccatctaacaaacaacaccctgagtgagactccaattctcctgttagttccttgacaagaaactttcaaaatagaatgatgactaaggaagtatgaacaatatagaaatatggaattatcttggtaatgtctcagactgcattaatactaaaaactatgtacctctcagtggtgacagctgctttgagaactgatttcatgctgtcctcacttttaaatattattcatactaaaaggcaattgataatatttttatgaacaaacagcatttaatatatctagggatatcagtattttttaaatatggtaaagccttattgaaaaccaacattaataaattcttttggtttcttttgtgactaagttcactggaaaaaattagaggaactcaagttattttctcactctatgggggaaaagttgtgaattgaaaaattgtgcttctaaacacttaaaggtaaggagcaatggattttcatattcaaggaaggaattgtggtaaaaagtaagattaaaaagatgtacgattttggaatgagctgttggatagttattttaaagtatctaaattaaaatatatccatttggacgggccatgccagacagaacaaagctaaaagtttattactctattgagagatgataataagtagctaccagaataaagaggggggaaaaggagacgtgggaaggctcaggagagaacattgaagaatatattatattgttaatagcaaatagataaaagaggactaatatagctatgaaacttagattgctggttaagagctggactcccaaaacgaacacatgctctctctcttatgagagagagat

SEQ ID NO: 127968 - DNA, 4758 bp, Homo sapiens
  Payload ID: 5056
  Gene Symbol: DCDC1
  Gene Name: doublecortin domain containing 1
  ENST ID: ENST00000406071
  CDS Start-End: 317-2989
agctttgtgtctctcagtaccatcatggcctctccatgtatctttacagtataccttctgagacctgctgaggatatgactcagcaaatcaccatggtgatgggagaaagccaggttgtgggggcaccagctataacggggtaatacttggaaggcaatttctttctgagaacttgctgcagcctagcttggagtcctggcctggaaagcttgaatatgaaaagtcaggtgggccataaaacatgaaggaaccagtaagccaggccagtggaaacattctagagttgaaaatcctctatggaacaagcttacctacatgtggcctgtccttcccagtggccaacttaatgaggagtttgattggccaatacaaggactgcttgttccgagcagtcctcccatgaagaaacccatctgtaagacaacagagccatatgcccctgtgcgactcagagttttgcagaatggagagaagaataaaaacagatccgttactatccttggtccagatatctcacctggacggaaaacgcagtgcactgagattttaaatttaccttctgcagctcggagattgtacaatgaaaaggggaaggaaatatttgccttaaaagacctgcaaagagatgaactggtgtatgtttcatgtggagaactctggatcaatcctgacctgtccattgctcagcaaaagaaacaaatattcctgaggaacctagaatcagacattgccaaaattcaaatcttctgcagcacacataaaatagaagctcttgttttagaagtccaaagtgacattgtatctggaagcaagcttgctgtgcataaacctgtagcaatttttggagaagagaagcaagttacagaaccggaagaaaagcaaatgcaagaagatcctctaacaacggaaaatgcttccagtgaaattctagattcacacgtaagagctcatcttcgaatgaaggcttgtcacacacttcccaggtatgcctggcaggaaacttcacatgactttgatgaggatgacagtcttccaaagaaaacggaaaaagggctctttgaaaatgtggaaccacagaagaaacacagctgttcaccaaagcatagtaaattgcacaagcattgtcatcagcagttcgaatacagagatgggcagattataagccatgctgctcctcagctagtcttgggggttcaaggtcccaatctccgatcaggcatggaggtggttttggtggagaagaaatctgatggtagtcatcagcgctggatacaccaggaagacagcaggacctttcaccttgtgagtaaccctgaccttgtgctggcagtgtctatgaccaagactagaaatgaagtttgtggctatccagttattgttcagaaatataagccgtacaacaatggagctgccaatcaaaagtggcattacatgaaaaatataaaagcacttgtggcctttcatagcactgccttggataaggaaattacatcagcaaattatgctggtgtctgtacatcatctgtgattaaagaagaaaacattgatcaaccaggatactgttatctctcacctgatggaaagagaaaaactatgctctgcttggcttgtggacaatccatgagaacagagaaaggactgaaacaattgcttccaggggttccattcctctgtatttcaggcaccaagactcagaagcccttcttacaagggcccttcaaggtcatcagtgtggctgaggttgatttgtcgtgtgacaaggctgaaaaaactctaagttactaccaagcacgtctattgtctttacggatgaagacctgcacgcaagctgcatctcacagtggcatggcagccacacaccagaaggcagtgaaaataattgcatacaaaaatggggatgggtatcgtaatgggaagttaattgtggctggaacattccccatgcttcttacagaatgcacggaacaacttgggcttgccagagcagcctccaaagtatataccaaagatggaaccccaatctttaccttgcgtgatttggttttatgggctctagatgaatcctttctccagagagactctgagaaacaaaagcaagatgcagctcctgttggaaaagaacagataattgttgaaaaaaatccaagaatgaaagtgaaaaacagattatttgcaaaatctgtgacatccgatagtttggatggtatagacaagtctttgcttaccctcatcctcagaaatcctattgccatctgggtgtcttgtggtgaaccatttctacctccaaatgctttgcagaaagcagaaaaattagagaaacagaactggctaaaaaaggacagaattttggctgatctagataccatgagacacaaaatgagacagttaaaagggcggcgagtagcggcatgtcagccagccaccatggttcctaccaagagccctgtgcagcccgtggtggttgaaggaggctggaccgaacagactcaacaggaaattaaactcatggaacttataagacatacagaggcacacctttctgaaatccaagaaatggaatccaaaataaattttccaattgcaaccaaacgtatagcagtcaagccgagcaacctgtataagcagcccaacacaaaacgagtgtggatttatctaaatggaggcagacctgaagatggcacttatgcctggggcaaaactatttcagagctgctgcaagactgctcctctcgtctcaaaatgacccacccagctagagcactgtacacccccagtggagagccaattcagtcctgggacgacatagagcgagatatggtcatctgtgtgtctatgggacatggtttcaaaaccccaaaagagttaaaacaactgatggagatcagagcaaattatgccagaatccgaaggcagcagggccctcaagccacagacattgtggtgtcaccatccacgaagctgctgtctctggcacatctccacaattaactcctatcagaaccatcggattttctgctgtatttttctggaaagaaaactttctttacccacttataaacagaagactgtgacaagaaggccaattatttccatcgctgaagactctaaatttggcaaatcttctaaataacaatcctgcatagtttattaaaaaaaattagtcgtaaaatttatccttcaaaaatctgcattttaaataaaccctgacagtgatttctcaagactgtaaagatattagtctgagaatgcaactctaacagactgctctgggcatcttttctctttgccttggccaggcctctcagaattgagtgagcgtgtgactccatttgcacagtgggacagatgagtacaactgaaataaaaagtggaggcctctgcaaaaaataaaaaataaaaaataaatttatccttcaaaataactcagttttttcaatgggcctattttgaagaatgaacattgaaaaatgagacaatatatccataaattcatagtatgacataccataatcgagagcattgttagccatagacattttgtatgccagtgaaatctgtatacattctctaaatttttccagtttatcgtgtggcttattggaaaaaaaaaagcatatacactgactgcatgttttgtctccccaactaaatgataagtgcctagagggcaggaacacccttggttttatttacttgggacagagctctacccacaagggctcactgataaaactcatcagtcccaccccacagcaacatgatggggacatgaggttcagttcttctactcttggcctgagccgcaaaccaaaattacaacagtacaatgggaatagaggatctgctttatagaatttcctttcagtcagctgctcagaaactacaatcctcagagtgaaattaaatggagttatactgggatagtcctctctgcttttcagaggaaagaaacacttctcgaaattgtgcaaatgaaagaaatgtcatggtataaactagacatcttatatccttaaaatatatctttgatgattatacatattggtttcaaatcccaagtttgaagaaacatccaaaagttatgtgaaattacttatagatgaattgacaacatttgagacttcgacaggcaatcatgaagcagttctcaagttgatttggtttatatagctctttaagaatcttttggaaagccataatctcacaaaatacagatatgcaattttttttttttgagatggagtctcactctgttgcccagtctggagttcagtggcgcgatctcagctcactacaagctccccttcccaggttcaagcaattctcctgtctcagcctcctgagtagctgggactacaggcgcctgccaccacacccagctaacttttgtatttttagtagagatggggtttcaccttgttggtcaagctggtctcaaactcctgacctcaggtgatccactcgcctctgcctcccaaagtgctgggattacaggcgtaagccaccacacccagcccaaaaaatgtttgtgcacagaactgtggatgtttgtcacagaactttccaaataaagaagttctgataaaagagaagatatttctcatttccataatctttaaggtgtgggggatacgtaatctggacttctcaaatggatgatttctaaatacgcgtcagatgaagtgattctaactttctctgtagtaatatcttattttgttttattcaaaaacaataaaccatgtagatttattagc

SEQ ID NO: 127969 - DNA, 1706 bp, Homo sapiens
  Payload ID: 5056
  Gene Symbol: DCDC1
  Gene Name: doublecortin domain containing 1
  Uniprot ID: P59894
  ENST ID: ENST00000452803
  CDS Start-End: 203-1267
agaagcgacgctccgcccaccccgacgcggtctctatggtaaccggtcaccgcttctatggagtggcgtttactaccaattgcaaataagaaaattccagattccattccaagatggccaaataggaacagctccagcctgcagctcccagcgtgattaatgtagaagatgggtgatttctgcatttccaactaagctgaaaatggcaaaaacaggagcagaagatcacagagaagcactatctcagtcttccttatccctcttgactgaagcaatggaagtattacagcaaagtagccctgaaggcactttggatgggaatactgtaaacccaatttacaaatatattttgaatgatttaccaagagagtttatgtcatcccaggcaaaagcagttattaaaactactgatgattatttgcagtctcagtttggccccaacagactcgtgcattcagcagcagtatcagaagggtcaggacttcaagattgctccacacatcaaacagcatcagatcacagccatgatgaaatatcagacctagatagctacaaatcaaacagtaaaaacaattcttgttctatatcagcatccaagagaaacagacctgtcagtgctccagtgggtcaactgagggttgcagagttctcttctttaaaatttcagtcagcccggaattggcagaaattgtctcaaagacacaaacttcaaccaagagtgattaaagtaacagcttacaaaaatggatctagaacagtctttgccagagttactgtaccaaccatcaccttgctgctggaggagtgcacagaaaagctgaatctgaacatggccgcaagacgagtgttcttggcagacggcaaggaagccctcgaacctgaagatataccccatgaagccgatgtttatgtttcaacgggagagccctttttaaatccattcaaaaaaattaaagaccatctgttgttaattaagaaagtaacttggacaatgaatgggttgatgcttcctactgatatcaaaagacggaaaaccaagcctgttctttctattagaatgaagaaacttactgagaggacctcagtccgaattctgttctttaagaatggcatggggcaggatgggcatgagattacagtgggaaaagaaacaatgaaaaaggttttagatacttgtacaataagaatgaatctaaatttaccagccagatatttttatgatttgtatggcagaaaaattgaagatatttcaaaaggaaagcactgactctgagacgtgatacttcatggatgccagaggcattcggattcatgactcgtgcttcacgtatcccagaagtgtgctattatcacattttaatgcatgccttgccctctgtttttgcatccttataaaagcttatgccagctgaaattagcctgtgcaaccactaacatgtggaagcattacaagttcactggacttaaaatatttaaagaagctaatcctgttggaggaacttccagtctgtagcaccctagtcacttaacattaggtttttgaacttcttttttctttgtttctatgatgttgtgcatcaaatgattgagatccctaaacttttgtgttggatggttttctgaacttcaacttgggaaaggtcaagttttatgtgaaagttatcttttaatttaaacaaataaatgctgatactcttttgattcga

SEQ ID NO: 127970 - DNA, 3184 bp, Homo sapiens
  Payload ID: 5056
  Gene Symbol: DCDC1
  Gene Name: doublecortin domain containing 1
  ENST ID: ENST00000444572
  CDS Start-End: 1-2455
gtgcactgagattttaaatttaccttctgcagctcggagattgtacaatgaaaaggggaaggaaatatttgccttaaaagacctgcaaagagatgaactggtgtatgtttcatgtggagaactctggatcaatcctgacctgtccattgctcagcaaaagaaacaaatattcctgaggaacctagaatcagacattgccaaaattcaaatcttctgcagcacacataaaatagaagctcttgttttagaagtccaaagtgacattgtatctggaagcaagcttgctgtgcataaacctgtagcaatttttggagaagagaagcaagttacagaaccggaagaaaagcaaatgcaagaagatcctctaacaacggaaaatgcttccagtgaaattctagattcacacgtaagagctcatcttcgaatgaaggcttgtcacacacttcccaggtatgcctggcaggaaacttcacatgactttgatgaggatgacagtcttccaaagaaaacggaaaaagggctctttgaaaatgtggaaccacagaagaaacacagctgttcaccaaagcatagtaaattgcacaagcattgtcatcagcagttcgaatacagagatgggcagattataagccatgctgctcctcagctagtcttgggggttcaaggtcccaatctccgatcaggcatggaggtggttttggtggagaagaaatctgatggtagtcatcagcgctggatacaccaggaagacagcaggacctttcaccttgtgagtaaccctgaccttgtgctggcagtgtctatgaccaagactagaaatgaagtttgtggctatccagttattgttcagaaatataagccgtacaacaatggagctgccaatcaaaagtggcattacatgaaaaatataaaagcacttgtggcctttcatagcactgccttggataaggaaattacatcagcaaattatgctggtgtctgtacatcatctgtgattaaagaagaaaacattgatcaaccaggatactgttatctctcacctgatggaaagagaaaaactatgctctgcttggcttgtggacaatccatgagaacagagaaaggactgaaacaattgcttccaggggttccattcctctgtatttcaggcaccaagactcagaagcccttcttacaagggcccttcaaggtcatcagtgtggctgaggttgatttgtcgtgtgacaaggctgaaaaaactctaagttactaccaagcacgtctattgtctttacggatgaagacctgcacgcaagctgcatctcacagtggcatggcagccacacaccagaaggcagtgaaaataattgcatacaaaaatggggatgggtatcgtaatgggaagttaattgtggctggaacattccccatgcttcttacagaatgcacggaacaacttgggcttgccagagcagcctccaaagtatataccaaagatggaaccccaatctttaccttgcgtgatttggttttatgggctctagatgaatcctttctccagagagactctgagaaacaaaagcaagatgcagctcctgttggaaaagaacagataattgttgaaaaaaatccaagaatgaaagtgaaaaacagattatttgcaaaatctgtgacatccgatagtttggatggtatagacaagtctttgcttaccctcatcctcagaaatcctattgccatctgggtgtcttgtggtgaaccatttctacctccaaatgctttgcagaaagcagaaaaattagagaaacagaactggctaaaaaaggacagaattttggctgatctagataccatgagacacaaaatgagacagttaaaagggcggcgagtagcggcatgtcagccagccaccatggttcctaccaagagccctgtgcagcccgtggtggttgaaggaggctggaccgaacagactcaacaggaaattaaactcatggaacttataagacatacagaggcacacctttctgaaatccaagaaatggaatccaaaataaattttccaattgcaaccaaacgtatagcagtcaagccgagcaacctgtataagcagcccaacacaaaacgagtgtggatttatctaaatggaggcagacctgaagatggcacttatgcctggggcaaaactatttcagagctgctgcaagactgctcctctcgtctcaaaatgacccacccagctagagcactgtacacccccagtggagagccaattcagtcctgggacgacatagagcgagatatggtcatctgtgtgtctatgggacatggtttcaaaaccccaaaagagttaaaacaactgatggagatcagagcaaattatgccagaatccgaaggcagcagggccctcaagccacagacattgtggtgtcaccatccacgaagctgctgtctctggcacatctccacaattaactcctatcagaaccatcggattttctgctgtatttttctgagttcttggttgcaagcaacagaaatctatcatttacaacaaaagcaacgaggagattacatgaagcgaaagagggggctcacagaattgaagggatgccggagaacaagaagctgaagaaaatctcaacattgaaggagccttggacaaccacctaatcctatattcattgaatagttgaactgtatccacccggcgtaatacccatggcaactggtcttccacatatgatgaaatagcctctgagaggttaagtcactcacccaaaatttccactgccaggaagtggtagtgatgggattcaaacctgggtggccctgagaccagagcttccgctctacccacttcactatacttctcttactacaggtacacagcccttttatctctgctttcctgaagcagcctttgtaagtggaaggattgtactgaaggctcagcagcaatagagctaatgaaatggaagctgggcagtgctgagtccctgggtcacagttaccgagaggaaaagtgggctggctgagatttcatcccaggctgcctgctacgaagctcctcatctgcctccctcgaatcaagtgctacatccaataatagggactaaacccacatctgtagcttctgagtcgagagatctgaatagagaaatcagcagttaaaataaaattaaaatagctctgaacatttaa

SEQ ID NO: 127971 - DNA, 5352 bp, Homo sapiens
  Payload ID: 5056
  Gene Symbol: DCDC1
  Gene Name: doublecortin domain containing 1
  ENST ID: ENST00000597505
  CDS Start-End: 1-5352
atggcaaaaacaggagcagaagatcacagagaagcactatctcagtcttccttatccctcttgactgaagcaatggaagtattacagcaaagtagccctgaaggcactttggatgggaatactgtaaacccaatttacaaatatattttgaatgatttaccaagagagtttatgtcatcccaggcaaaagcagttattaaaactactgatgattatttgcagtctcagtttggccccaacagactcgtgcattcagcagcagtatcagaagggtcaggacttcaagattgctccacacatcaaacagcatcagatcacagccatgatgaaatatcagacctagatagctacaaatcaaacagtaaaaacaattcttgttctatatcagcatccaagagaaacagacctgtcagtgctccagtgggtcaactgagggttgcagagttctcttctttaaaatttcagtcagcccggaattggcagaaattgtctcaaagacacaaacttcaaccaagagtgattaaagtaacagcttacaaaaatggatctagaacagtctttgccagagttactgtaccaaccatcaccttgctgctggaggagtgcacagaaaagctgaatctgaacatggccgcaagacgagtgttcttggcagacggcaaggaagccctcgaacctgaagatataccccatgaagccgatgtttatgtttcaacgggagagccctttttaaatccattcaaaaaaattaaagaccatctgttgttaattaagaaagtaacttggacaatgaatgggttgatgcttcctactgatatcaaaagacggaaaaccaagcctgttctttctattagaatgaagaaacttactgagaggacctcagtccgaattctgttctttaagaatggcatggggcaggatgggcatgagattacagtgggaaaagaaacaatgaaaaaggttttagatacttgtacaataagaatgaatctaaatttaccagccagatatttttatgatttgtatggcagaaaaattgaagatatttcaaaagttcctctgcttgaaaaatgcctgcaaaattccatcacacctttgcgaggactactttgggtctctaagggagaaggtttcagcccctcaggagctaagatgtacatccaaggagttcttttggccctgtaccaacgattaaagtctgcaaaaaaatattataaacagttgaacctggtcatgaatgaacagaaggagaaaattacagaaaaagtcattctttcaatgacggcaaaggaacaccataaggaacaggaagaagtgagcaggctgattgatgaattgcagacagctatcaaaagtaacataggtcatctctgtaaacttggcccccaattacaggctgagcaggagcaattctcctcttatgtctaccaacacattaaaagccttccagcaaacacgcttgtcccaggaggcctgcagcttaaggtatttgaaaatggtaaaaacactggagagatctctgttggtatcagtaaaaaagatttgggatcggatagcccaattcaaactgaccatatgatggaaagattacttctcaagattcatcaaaggcttcaaggttcttccatcaacccaccaggcctcaattattcttcaatgcggctttttgatgagaatggccaagaaattaagaatccactttcgctgaagaatgagcaaaaaatttgggtctcttatggtagagcatacagatctccactaaatcttgctttgggtttgacctttgaccgagtgagtgcatttgccagaggtgatatcatggttgcatataagacctttttggatcctaatgctgttctgctacctggatgtggcaattgggaagtttgtgagggatttccaattaatttcaactgtaccagtcaacagatacctgaccagtttgaaaaggtggacttggagaaccattttctacagaacaaggtagatcccaatattgtccttcatgcctctgtttccattggaaagtggagtttctcaggcagtgaagcaagcagcaggagtcaaatagcgccatcgatcctgtggcctgtagccagtgtgtggctgatcaccaagactggaatgatcctgagccgagcgataactcagggctgcctggctattggtcatcctatcagagtcaaggctgctgagggaacatcactagaaggatataaattaatcttacagaaaagacatagtggagatgactctcagaagtgggtgtttggaactgatggttgcatttattcaaaggcttatcctcagtttgttctgacctacctagaggagctaaatgcacaagtagatgtgacccagacagagtatcacattcaccatggtgcctggaccacagctcatcaggaacatggcagaaacttagcagaagaggttctgcaagaaagtgccagcaaccttggtctgaagcaactgccagaaccctcagacacccatttaatgccagaaggttctcttgaggagacgggggagctgacagtagcactggtgaggaaactggaagagaaacatcctaaggcttctgctcagaggtgggccataaaacatgaaggaaccagtaagccaggccagtggaaacattctagagttgaaaatcctctatggaacaagcttacctacatgtggcctgtccttcccagtggccaacttaatgaggagtttgattggccaatacaaggactgcttgttccgagcagtcctcccatgaagaaacccatctgtaagacaacagagccatatgcccctgtgcgactcagagttttgcagaatggagagaagaataaaaacagatccgttactatccttggtccagatatctcacctggacggaaaacgcagtgcactgagattttaaatttaccttctgcagctcggagattgtacaatgaaaaggggaaggaaatatttgccttaaaagacctgcaaagagatgaactggtgtatgtttcatgtggagaactctggatcaatcctgacctgtccattgctcagcaaaagaaacaaatattcctgaggaacctagaatcagacattgccaaaattcaaatcttctgcagcacacataaaatagaagctcttgttttagaagtccaaagtgacattgtatctggaagcaagcttgctgtgcataaacctgtagcaatttttggagaagagaagcaagttacagaaccggaagaaaagcaaatgcaagaagatcctctaacaacggaaaatgcttccagtgaaattctagattcacacgtaagagctcatcttcgaatgaaggcttgtcacacacttcccaggtatgcctggcaggaaacttcacatgactttgatgaggatgacagtcttccaaagaaaacggaaaaagggctctttgaaaatgtggaaccacagaagaaacacagctgttcaccaaagcatagtaaattgcacaagcattgtcatcagcagttcgaatacagagatgggcagattataagccatgctgctcctcagctagtcttgggggttcaaggtcccaatctccgatcaggcatggaggtggttttggtggagaagaaatctgatggtagtcatcagcgctggatacaccaggaagacagcaggacctttcaccttgtgagtaaccctgaccttgtgctggcagtgtctatgaccaagactagaaatgaagtttgtggctatccagttattgttcagaaatataagccgtacaacaatggagctgccaatcaaaagtggcattacatgaaaaatataaaagcacttgtggcctttcatagcactgccttggataaggaaattacatcagcaaattatgctggtgtctgtacatcatctgtgattaaagaagaaaacattgatcaaccaggatactgttatctctcacctgatggaaagagaaaaactatgctctgcttggcttgtggacaatccatgagaacagagaaaggactgaaacaattgcttccaggggttccattcctctgtatttcaggcaccaagactcagaagcccttcttacaagggcccttcaaggtcatcagtgtggctgaggttgatttgtcgtgtgacaaggctgaaaaaactctaagttactaccaagcacgtctattgtctttacggatgaagacctgcacgcaagctgcatctcacagtggcatggcagccacacaccagaaggcagtgaaaataattgcatacaaaaatggggatgggtatcgtaatgggaagttaattgtggctggaacattccccatgcttcttacagaatgcacggaacaacttgggcttgccagagcagcctccaaagtatataccaaagatggaaccccaatctttaccttgcgtgatttggttttatgggctctagatgaatcctttctccagagagactctgagaaacaaaagcaagatgcagctcctgttggaaaagaacagataattgttgaaaaaaatccaagaatgaaagtgaaaaacagattatttgcaaaatctgtgacatccgatagtttggatggtatagacaagtctttgcttaccctcatcctcagaaatcctattgccatctgggtgtcttgtggtgaaccatttctacctccaaatgctttgcagaaagcagaaaaattagagaaacagaactggctaaaaaaggacagaattttggctgatctagataccatgagacacaaaatgagacagttaaaagggcggcgagtagcggcatgtcagccagccaccatggttcctaccaagagccctgtgcagcccgtggtggttgaaggaggctggaccgaacagactcaacaggaaattaaactcatggaacttataagacatacagaggcacacctttctgaaatccaagaaatggaatccaaaataaattttccaattgcaaccaaacgtatagcagtcaagccgagcaacctgtataagcagcccaacacaaaacgagtgtggatttatctaaatggaggcagacctgaagatggcacttatgcctggggcaaaactatttcagagctgctgcaagactgctcctctcgtctcaaaatgacccacccagctagagcactgtacacccccagtggagagccaattcagtcctgggacgacatagagcgagatatggtcatctgtgtgtctatgggacatggtttcaaaaccccaaaagagttaaaacaactgatggagatcagagcaaattatgccagaatccgaaggcagcagggccctcaagccacagacattgtggtgtcaccatccacgaagctgctgtctctggcacatctccacaattaa

SEQ ID NO: 127972 - DNA, 3684 bp, Homo sapiens
  Payload ID: 5057
  Gene Symbol: DCDC2
  Gene Name: doublecortin domain containing 2
  Uniprot ID: Q9UHG0
  ENST ID: ENST00000378450
  CDS Start-End: 21-710
gaccactgaatgttttctcaatgaaaatgtggaacaactgggggtggtgtggtggtcggaggagggggtgcacaaaaatactatcaactaaaaagggaatccaaatgtctattaaaaataagcatttgattgtaattccagcattcagccacacgatgtcacaattggattttgattttcactgtgtgtttgtctcaatagatgaaggcattttcaaagctggagcagagaggtctgaaacacggggggcagcagaagtccaagaagatgaagatactcaggttgaggttccagtcgatcagaggccagcagaaatagtagacgaggaagaagatggagagaaggcaaacaaggatgcagaacagaaagaagacttttcaggaatgaatggtgaccttgaagaggaaggaggtagggaggctacagatgcccctgagcaagtcgaggagattctggatcacagtgagcagcaggcacgccctgctcgtgtaaatggaggcaccgatgaggagaatggtgaggagctgcagcaggttaataatgagcttcaactggtcctagacaaggaaagaaagtctcaaggagctggcagtggacaagatgaggctgatgtagaccctcaaagaccaccaaggccagaagtaaaaattaccagtccagaagaaaatgaaaacaaccaacaaaacaaggactatgctgccgtggcttagaacatttttaaaaagagagtatatggatcgcaagaaaaatgaagggttatcatacttgaaagataagcacatagttattgctgaatataatgtgacactatggtcgaatactacctacgaattataacattagaagcctagtggaaagaccagataactttaaatggctactaaaggataattacttacttttattgcatgtgttttaaaagtcatatagaaatattaaataagacggacagaggagaatttgcactggaagacaattgccacttgtaaaggatgaaaaataggatcactcttattgtacgctttattataagtttagaaggcagtttattctaaataatttttctctaggaaggcgtagaattttaaagaactggtaataggaaagcatgtactattttcttaaagcaataaactcttgaatgaacagattgcgatttactttcagacataatttggagatggcagtagatcaaaatgtgtccatgacttgttaacatgcctttctttcttcctccttagccaaaatccacctttgaactacaaagacagagcaaggcgttcattttggtgggaggaagcattggttcagagtgttagtgactagtatcgccatgccgtcacttaaatgctttcaggcttgcatgcttgtggctccaatggcgcacactcaggaaggaattgtaaaggagcacccagttatattataaagcctggatgtatggtttgcagataatggaaatcctgtggattttcactgatccagtctatctttaccaatagtatctctctcttctcccttatgttattagagaacctgatattggctattccaaagattaaattattttcaaatagttttcaacaaaaataaaagtgtattaggaagaaaaaagtagactatatgaagagtttgtgactgctcaatttaacttgttttttgccttatttctattaagactgttttactatgtttttgccctagggatatcagcaaatatttatttttcctagcatgatatagttagaatttcaagcagatttctttgtaattagaaggcatctgatagaaattgtaaaactttagaagttattataatgaaaccaattcctgaatcacaacttcatggactgactaaattgatttatagttgccttgtgaggtatgtatggggaaaacataaaaacataattaaaacataatttcgtcctttttatgaattcttaagagatgttcttccataaatatagaaataatatatttttcttaaaggatatatttttaattatgtggaagttgtaagcttgaaattttaacttctagtgcttttctaaaattcacaattacaagtttaaaacattttttctcttccaggtttcatttggaataaagagttggcagttatataaagcacttaataatactatagaaaatagatgtgttttttcttaatatgattttggtattttccacagatcagaagtgtaaacagagagataatgtaacagtatttggaagagataatgacacaaggatatagtgatctgggagcatgaattagaaacagggtactatgtttctggtgtaaaatctaaattgtgctttctactagcgttactttttcaaatgggatgatataaagcactgtgggctataagcaacaatcttgggttggtaggcaaatagaccaattgatctttattattattattattattattattattattttttgagatgaagtcttgctcttgtcgcccaggctgggtgcagtggcatgatcttggcttactgcaacctctgcctcctgggttcaagcacctgagcctcccgagtagctgggattacaggcatctgccaccacacctggctaatttttgtattttttgtagagacagatgtttcaccatgttggccaggctggtctcaaactcctgacctcaggtgatccgcccgcctttgcatcccaaaatgctgggattacaggtgtgagccacagcacccggtcccagttggtcttttaatattaaatttgtgcactattactgggtctggagttaatgatttcaaatagtttctaaaaataactgattaaatgtaagaaattataactaattatcaaggtgattctcttttgtttcttcaatggagagtttctctttctcttttcctcctctaataaaaatatttctttttttcctgtccttttattcattatattatgaaacttaggttttaggaaacaccttaagcgtcattttaatgaagcacaacattgatattttacatgaataataacgtttggtattttaaatatacttcaagggggtaataagccacaataactgtaccaaaaaaacttaaaaatggggacatattcatcccttgtgtgtgcatattttaccacttgttgacaagatacaattgtgacctactttgaggggatgaataacgacttatcactttaagacactttgcaaacatgttactaaaaaaaggtgcctagccaaggaaaaaaccattcacttggaattaaaattgtggatgtcacttcagagatgactttaacataaatgctgaaagttcattcacctcacaaatgtggcagttttctctgtggagaatggtggtctccgtggcagactggctctccaaattaaatgaaactcattgacagacctgggaccttttatgtgagtggacagacaagatcttggtttggcttcatgtactgttttctagagagagtgctacgaaaaacttatgatgcttttatgtgataaccaatataatgctttaatatgttaattctttgtgatgctatatacatagtttttatagttttatgaaaccactttgttaaacttatctggattttaagacacttgtaaacaaatggtttgttagtaaaattggggcattaagagttttacagagcaaataaagaagattttgacaaaagtc

SEQ ID NO: 127973 - DNA, 4707 bp, Homo sapiens
  Payload ID: 5057
  Gene Symbol: DCDC2
  Gene Name: doublecortin domain containing 2
  Uniprot ID: Q9UHG0
  ENST ID: ENST00000378454
  CDS Start-End: 303-1733
gtccaccttgattctgcccgtagcaggtgaacctggtgtggtgcgcgcactgcgggtcctgattggctgtgcacgccacggtgaaaaacttgagcgtctactccgagtcctgcaagctcctagtgtctcctctgggtggacgcctaggcgcacggccgttacttctctttcacctgtggattcgtcagtttctcgttcgtttcaggaggcgatcccgcgccctgggtgcggtgaggccgctgggacagcggaggtgcctcccgacgcgaagcagcgagctgaggcggcggccagcggggaagatgagcggcagcagcgccaggtccagccacctgtctcagcccgtcgtgaagagcgtgcttgtgtaccgcaacggggaccccttctacgcggggcgccgcgtcgtcatccatgagaagaaggtgtccagcttcgaagtcttcctgaaggaggtgaccggcggcgttcaggcaccctttggggccgtcaggaacatctacaccccgcggactggccaccgaatccggaagctagaccagatccagagcgggggcaattacgtggctggaggccaggaagccttcaagaaactcaattacttggacataggagaaatcaagaaaagaccaatggaagttgttaatacagaggtaaaaccagtaatccatagcaggatcaacgtgtcagctcgctttagaaaaccgcttcaggagccgtgcactatcttcttgattgcaaatggagacctcataaacccagcttctcgcctccttatccccagaaaaaccttgaatcagtgggatcatgtactacaaatggtcacagaaaaaatcactctgaggagcggggctgttcacaggctttatactttagaaggaaaacttgttgagagtggagcagagttggagaatgggcagttttatgtggctgttggcagagataagtttaagaaactgccttacagtgagttactttttgacaagtcaacgatgagaaggccttttggtcagaaagcttcttcactacctcctattgtaggatccagaaagtctaaagggagtggaaatgatcgccactctaagtcaacagttggatccagtgacaactcatctcctcagcccctgaagaggaaagggaaaaaagaagacgtgaattcagaaaaactgacgaaattgaaacaaaatgtaaaattaaagaattcacaagaaaccattccaaatagtgatgaaggcattttcaaagctggagcagagaggtctgaaacacggggggcagcagaagtccaagaagatgaagatactcaggttgaggttccagtcgatcagaggccagcagaaatagtagacgaggaagaagatggagagaaggcaaacaaggatgcagaacagaaagaagacttttcaggaatgaatggtgaccttgaagaggaaggaggtagggaggctacagatgcccctgagcaagtcgaggagattctggatcacagtgagcagcaggcacgccctgctcgtgtaaatggaggcaccgatgaggagaatggtgaggagctgcagcaggttaataatgagcttcaactggtcctagacaaggaaagaaagtctcaaggagctggcagtggacaagatgaggctgatgtagaccctcaaagaccaccaaggccagaagtaaaaattaccagtccagaagaaaatgaaaacaaccaacaaaacaaggactatgctgccgtggcttagaacatttttaaaaagagagtatatggatcgcaagaaaaatgaagggttatcatacttgaaagataagcacatagttattgctgaatataatgtgacactatggtcgaatactacctacgaattataacattagaagcctagtggaaagaccagataactttaaatggctactaaaggataattacttacttttattgcatgtgttttaaaagtcatatagaaatattaaataagacggacagaggagaatttgcactggaagacaattgccacttgtaaaggatgaaaaataggatcactcttattgtacgctttattataagtttagaaggcagtttattctaaataatttttctctaggaaggcgtagaattttaaagaactggtaataggaaagcatgtactattttcttaaagcaataaactcttgaatgaacagattgcgatttactttcagacataatttggagatggcagtagatcaaaatgtgtccatgacttgttaacatgcctttctttcttcctccttagccaaaatccacctttgaactacaaagacagagcaaggcgttcattttggtgggaggaagcattggttcagagtgttagtgactagtatcgccatgccgtcacttaaatgctttcaggcttgcatgcttgtggctccaatggcgcacactcaggaaggaattgtaaaggagcacccagttatattataaagcctggatgtatggtttgcagataatggaaatcctgtggattttcactgatccagtctatctttaccaatagtatctctctcttctcccttatgttattagagaacctgatattggctattccaaagattaaattattttcaaatagttttcaacaaaaataaaagtgtattaggaagaaaaaagtagactatatgaagagtttgtgactgctcaatttaacttgttttttgccttatttctattaagactgttttactatgtttttgccctagggatatcagcaaatatttatttttcctagcatgatatagttagaatttcaagcagatttctttgtaattagaaggcatctgatagaaattgtaaaactttagaagttattataatgaaaccaattcctgaatcacaacttcatggactgactaaattgatttatagttgccttgtgaggtatgtatggggaaaacataaaaacataattaaaacataatttcgtcctttttatgaattcttaagagatgttcttccataaatatagaaataatatatttttcttaaaggatatatttttaattatgtggaagttgtaagcttgaaattttaacttctagtgcttttctaaaattcacaattacaagtttaaaacattttttctcttccaggtttcatttggaataaagagttggcagttatataaagcacttaataatactatagaaaatagatgtgttttttcttaatatgattttggtattttccacagatcagaagtgtaaacagagagataatgtaacagtatttggaagagataatgacacaaggatatagtgatctgggagcatgaattagaaacagggtactatgtttctggtgtaaaatctaaattgtgctttctactagcgttactttttcaaatgggatgatataaagcactgtgggctataagcaacaatcttgggttggtaggcaaatagaccaattgatctttattattattattattattattattattattttttgagatgaagtcttgctcttgtcgcccaggctgggtgcagtggcatgatcttggcttactgcaacctctgcctcctgggttcaagcacctgagcctcccgagtagctgggattacaggcatctgccaccacacctggctaatttttgtattttttgtagagacagatgtttcaccatgttggccaggctggtctcaaactcctgacctcaggtgatccgcccgcctttgcatcccaaaatgctgggattacaggtgtgagccacagcacccggtcccagttggtcttttaatattaaatttgtgcactattactgggtctggagttaatgatttcaaatagtttctaaaaataactgattaaatgtaagaaattataactaattatcaaggtgattctcttttgtttcttcaatggagagtttctctttctcttttcctcctctaataaaaatatttctttttttcctgtccttttattcattatattatgaaacttaggttttaggaaacaccttaagcgtcattttaatgaagcacaacattgatattttacatgaataataacgtttggtattttaaatatacttcaagggggtaataagccacaataactgtaccaaaaaaacttaaaaatggggacatattcatcccttgtgtgtgcatattttaccacttgttgacaagatacaattgtgacctactttgaggggatgaataacgacttatcactttaagacactttgcaaacatgttactaaaaaaaggtgcctagccaaggaaaaaaccattcacttggaattaaaattgtggatgtcacttcagagatgactttaacataaatgctgaaagttcattcacctcacaaatgtggcagttttctctgtggagaatggtggtctccgtggcagactggctctccaaattaaatgaaactcattgacagacctgggaccttttatgtgagtggacagacaagatcttggtttggcttcatgtactgttttctagagagagtgctacgaaaaacttatgatgcttttatgtgataaccaatataatgctttaatatgttaattctttgtgatgctatatacatagtttttatagttttatgaaaccactttgttaaacttatctggattttaagacacttgtaaacaaatggtttgttagtaaaattggggcattaagagttttacagagcaaataaagaagattttgacaaaagtc

SEQ ID NO: 127974 - DNA, 339 bp, Homo sapiens
  Payload ID: 5057
  Gene Symbol: DCDC2
  Gene Name: doublecortin domain containing 2
  ENST ID: ENST00000436313
  CDS Start-End: 1-266
gcgtcgtcatccatgagaagaaggtgtccagcttcgaagtcttcctgaaggaggtgaccggcggcgttcaggcaccctttggggccgtcaggaacatctacaccccgcggactggccaccgaatccggaagctagaccagatccagagcgggggcaattacgtggctggaggccaggaagccttcaagaaactcaattacttggacataggagaaatcaagaaaagaccaatggaagttgttaatacagagctacatgttctctgattgaaatccatgggaaggttccctgtcaagtgagaagattctgagcgttgttaaataaatctttaccaaagct

SEQ ID NO: 127975 - DNA, 1349 bp, Homo sapiens
  Payload ID: 5058
  Gene Symbol: DCDC2B
  Gene Name: doublecortin domain containing 2B
  Uniprot ID: A2VCK2
  ENST ID: ENST00000409358
  CDS Start-End: 1-1050
atggcaggtggcagtccagcagccaagagggtagtggtgtaccggaatggggacccattcttcccaggctcccagctggtggtgactcaacgccgcttccccaccatggaggccttcctctgcgaggtgacatcagctgtgcaggccccactggctgtgcgtgccctctacacaccttgtcatggccaccctgtcaccaacctggcagacttgaagaacagagggcagtatgtggccgctggatttgaacgattccacaagctccactatttaccccatagagggaaggacccaggtgggaagagctgcagactacaaggtcctcccgtgactcgccacttgtgtgatggggccattggacggcagctgcctgcaggtgctcccagctatatccatgtgttcaggaatggggacctggtaagtcccccatttagtctgaagctgtcccaggctgccagccaggactgggaaactgtgttgaagctcctgactgagaaggtcaagttgcagagtggggctgtgtgcaaactctgcaccctagaggggctcccactgtcagcagggaaggagctggtaactggccattactatgtggctgtcggagaggatgagttcaaggaccttccctatctggagctgctggtgcccagcccctccctgcccaggggctgctggcaacctccaggctcgaagtctaggccccacaggcagggggcccaaggccacagggcccaggtaacccagccctctccaaaggaaccagaccgaattaagccatctgctttctatgccagaccccagcagaccattcagccaagaagcaagctccccacactctcattcccatcaggagttataggagtatatggagctccccaccgaaggaaggagacagcgggggccctggaagtagcagatgatgaagacactcagacagaggagcccttggatcagagggcagcacagatagtggaagaggccttgtccctggaaaaccagcctggggctggggctgctatctcagcctcagccccagctctgccatcttgagagccagcagctccagagggcaactggggaccactactctggccaccttttgtccttagcctccagcagcttgttcctcaggagccagcacctccgctgggctcacagggtacactgcggcctcctcagccctccccgttctcctgctcctaaacccacagcccagccttcccttcctctgagcagagcagccctggctgtgggggctatttccttatgggattctctggccagagaaaggagtagctgactaagcctgggagagggtttgtcacaataaaagaatacttactaacctc

SEQ ID NO: 127976 - DNA, 1480 bp, Homo sapiens
  Payload ID: 5059
  Gene Symbol: DCDC2C
  Gene Name: doublecortin domain containing 2C
  Uniprot ID: A8MYV0
  ENST ID: ENST00000399143
  CDS Start-End: 161-1255
gtccagcccccgtcccgtccccgtcccgtccccgtcctgcgccagcggctggagcggacctcccgtcggcggtgcccgggcctgggcgcggctctgcaggcgtcgctgcccgcgctgccgcagcctctcggccccggcgagcgaggagcggggcgcggctatgggaacccgcgggccctccgcgccggtggacaccacgcccgccaagaccatcgtggtgtaccgcaacggggacccgttctacgtgggcaagaagttcgtgctgtcgcggcgccgcgcggccaccttcgaggcgctgctggagcagctcacggagcaggtggacgtcccgttcggcgtgcgccgcctcttcacgcccacgcgtgggcaccgggtgctggggctggacgcgctgcaggcgggcggcaagtacgtggcggcgggccgcgagcgcttcaaggagctcgattatattcatatagttccccgaaaacctgcaaagataaggaagttgaaggaaatcaaaccagtggtgcattgtgatataaatgtgccttccaagtggcaaacatatcatcgtatatctcgacatataaatgtttttacaaatggaagattatttattccacctgcaaaaatcattatacccaaatttagtctgtccgattgggacatcgtgctggccacgatcggagaaaaagtcttccctctaggaggcgttcggaaattatttacaatgaatgggcatcttttgggcgactcaaaggatttgcaagacaatcacttttatgttgctgtgggactggagaccttcaaatattttccttactggaagtctccaagggtgcccagtgaggtccaacaaaggtatgcgaatgttgaaaaaaactcacagagaaagaaaaaagtggactccaaaggaaaagaaccttgtaaatatgatggcataccccctaaaacacaggattctgtttattatgccaaagaagaaaagaagaaaacattggcagaacctttagtccaaaggggtgcagaaggtgacgtgtataaagcaccgactcctagcaaggaaacccaaggggcgctggacgtcaaagaggagcacaatgtgcagctggaggtgcctgtggaccagagacaagctgagatagttaaagaagatgaagagatacatgagaacacccctgattttgagggcaacaaggataaagaagatgcaaggctttgtgaagacgttgaaagaaagatggcccgggagtggaaacctgtagattaacaaaaccacctttattattacctgaagtccacttttcttcaaccatggggcttccacgtcacatatggacattttaacagcaagaaaatcacatgtggggtgaaactaaagccccacacagtggtgtcttctcgaaagccaaagacgaggtttcataattgagctccatttcttcttattccctttctcagtgatatttctttttagtaaacattttaaagaatg

SEQ ID NO: 127977 - DNA, 895 bp, Homo sapiens
  Payload ID: 5059
  Gene Symbol: DCDC2C
  Gene Name: doublecortin domain containing 2C
  ENST ID: ENST00000423741
  CDS Start-End: 1-895
cgccgcgcggccaccttcgaggcgctgctggagcagctcacggagcaggtggacgtcccgttcggcgtgcgccgcctcttcacgcccacgcgtgggcaccgggtgctggggctggacgcgctgcaggcgggcggcaagtacgtggcggcgggccgcgagcgcttcaaggagctcgattatattcatatagttccccgaaaacctgcaaagataaggaagttgaaggaaatcaaaccagtggtgcattgtgatataaatgtgccttccaagtggcaaacatatcatcgtatatctcgacatataaatgtttttacaaatggaagattatttattccacctgcaaaaatcattatacccaaatttagtctgtccgattgggacatcgtgctggccacgatcggagaaaaagtcttccctctaggaggcgttcggaaattatttacaatgaatgggcatcttttgggcgactcaaaggatttgcaagacaatcacttttatgttgctgtgggactggagaccttcaaatattttccttactggaagtctccaagggtgcccagtgaggtccaacaaaggtatgcgaatgttgaaaaaaactcacagagaaagaaaaaagtggactccaaaggaaaagaaccttgtaaatatgatggcataccccctaaaacacaggattctgtttattatgccaaagaagaaaagaagaaaacattggcagaacctttagtccaaaggggtgcagaaggtgacgtgtataaagcaccgactcctagcaaggaaacccaaggggcgctggacgtcaaagaggagcacaatgtgcagctggaggtgcctgtggaccagagacaagctgagatagttaaagaagatgaagagatacatgagaacacccctg

SEQ ID NO: 127978 - DNA, 5703 bp, Homo sapiens
  Payload ID: 5060
  Gene Symbol: DCLK1
  Gene Name: doublecortin-like kinase 1
  Uniprot ID: O15075
  ENST ID: ENST00000255448
  CDS Start-End: 213-2402
gcacatccctgcactagtggccgcaaccgaggcgccgcgctccagcagctgctgccgcccagcccggccccgccgccgccccccagccctgcagccccgcagccccggccgcgcccagcccggcgaggacagcaccaggaggcggcccccagcgcggccacaaagacccccggcggcgtctctccgcggaccggtcctacttgaagtccatcatgtccttcggcagagacatggagctggagcacttcgacgagcgggataaggcgcagagatacagccgagggtcgcgggtgaacggcctgccgagcccgacgcacagcgcccactgcagcttctaccgcacccgcacgctgcagacgctcagctccgagaagaaggccaagaaagttcgtttctatcgaaacggagatcgatacttcaaagggattgtgtatgccatctccccagaccggttccgatcttttgaggccctgctggctgatttgacccgaactctgtcggataacgtgaatttgccccagggagtgagaacaatctacaccattgatgggctcaagaagatttccagcctggaccaactggtggaaggagagagttatgtatgtggctccatagagcccttcaagaaactggagtacaccaagaatgtgaaccccaactggtcggtgaacgtcaagaccacctcggcttctcgggcagtgtcttcactggccactgccaaaggaagcccttcagaggtgcgagagaataaggatttcattcggcccaagctggtcaccatcatcagaagtggcgtgaagccacggaaagctgtcaggattctgctgaacaagaaaacggctcattcctttgagcaggtcctcaccgatatcaccgatgccatcaagctggactcgggagtggtgaaacgcctgtacacgttggatgggaaacaggtgatgtgccttcaggacttttttggtgatgatgacatttttattgcatgtggaccggagaagttccgttaccaggatgatttcttgctagatgaaagtgaatgtcgagtggtaaagtccacttcttacaccaaaatagcttcatcatcccgcaggagcaccaccaagagcccaggaccgtccaggcgtagcaagtcccctgcctccaccagctcagttaatggaacccctggtagtcagctctctactccgcgctcaggcaagtcgccaagcccatcacccaccagcccaggaagcctgcggaagcagaggagctctcagcatggcggctcctctacgtcacttgcgtccaccaaagtctgcagctcgatggatgagaacgatggccctggagaagaagtgtcggaggaaggcttccagattccagctacaataacagaacgatataaagtcggaagaacaataggagatggaaattttgctgttgtcaaggaatgtgtagaaagatcgactgctagagagtatgctctgaaaattatcaagaaaagcaaatgtcgaggcaaagagcacatgatccagaatgaagtgtctattttaagaagagtgaagcatcccaatatcgttcttctgattgaggagatggatgtgccaactgaactgtatcttgtcatggaattagtaaaggggggagacctttttgatgccattacttccactaacaaatacaccgagagagacgccagtgggatgctgtacaacctagccagcgccatcaaatacctgcatagcctgaacatcgtccaccgtgatatcaagccagagaacctgctggtgtatgagcaccaagatggcagcaaatcactgaagctgggtgactttggactggccaccattgtagacggccccctgtacacagtctgtggcaccccaacatacgtggctccagaaatcattgcagagactggatacggcctcaaggtggacatctgggcagcaggtgtaatcacttatatcctgctgtgtggtttccctccattccgtggaagtggtgatgaccaggaggtgctttttgatcagattttgatggggcaggtggactttccttctccatactgggataatgtttccgattctgcaaaggagctcattaccatgatgctgttggtcgatgtagatcagcgattttctgctgttcaagtacttgagcatccctgggttaatgatgatggcctcccagaaaatgaacatcagctgtcagtagctggaaagataaagaagcatttcaacacaggccccaagccgaatagcacagcagctggagtttctgtcatagcactggaccacgggtttaccatcaagagatcagggtctttggactactaccagcaaccaggaatgtattggataagaccaccgctcttgataaggagaggcaggttttccgacgaagacgcaaccaggatgtgaggagccggtacaaggcgcagccagctcctcccgaactcaactcggaatcggaagactactccccaagctcctccgagactgttcgctcccctaactcgcccttttaataagacccttttactcaaagtcctagcttaaccctttgagactctgagatttttttcccccaaatttgtgtaaaacagtttcatctgatctatctagcgctcaatgcttgaatggcagaactgaaagtgttttcaggtatctttgtagcggtttccctttactgaataagatgacacgtggtgattgtgaagatggtaatttgctgctaatagagtcctcaaagggttaaggccaatttgcaatttttttttaaacttagaagcaatgaatgttttcatcagtcaagctaggatctgcagtatgtaatatagcacttgttaaccctctgagtgcatagaattttattgagaattcttgtttgggaatttttcaggcctttggatgtatacacacatgtttcttgattttactgcagatcaaggggtgttgttagatgctgaaatgtccagaaaagaaggacatttagaatgatatcttgtttgtccttttctgtgggtttagaacgtggcaggtttataacttcgacacacgcacggttctttcttcttcacaatcctattcagaaacagattttttttttcattagagatatgactgtcagttgcagtgagttctgcatcccaagtggagggaattgggtttgtggcaaagagcttgacccaggaaatagatggtgccccccaaattgtctccacatgaagatgtactgatgacgccccagaaatgctgcttccatatcagctgctgctagcgccagcgcagactctcagggagtcaccacagcttgtcttgtgcttggtgagtgagggtctctctactcagtgtcagacatctacaggaaagaaacaactggtggaaaagagcaataaattgcccggtgctctgcagggctggaatttcaaacagaaagagggaataagatcctgtgatttttctcacctgcttttccacgcactgtggtcatcactgtgcaatctacatctagtatgaaatccacacataggagagctggggcacaaggggactggaggcagttgctttgcaagatggctgaggagaaagcacactgggaacacaatccagaatgttctaacaataagttttcagtgaataaaccactggcaagacaattccatgtgcacctttaggttacctatatagtctcctaggaagatcaggatgaaagacctagatgatacccctgaggataaaacctccatcccctaaaatgattttttttaaataccactgtctttagctgtccaggaggtcagagtgttttttctgtctttgggccaagtcctgtctgagacctgtattttcactcttgttaccaaatctatctccctagtgcagtgtctccaggcctgagtttcttctggaacagattccattttagaatggggattcacaggttctgtgcatcaccacagtgctcagagaggattctcctggggtgtcttagaggcaggtgcccaactcaaatgtattcccaaggtttgctgggctctgggatccacgagacaaccagagagggatatctcatgaaatttgcatctggtggctgaacagtacctatgttctctgttttgaatatactttaatacctgagagtcttaaaatttgtgaacaacgtttctatagtcctttattttcaaatgcacattgatcttcacttgctgcatttttactcttcaaccctgaaactatggtctacattaatatggatttttaaatcacatgtcattacttttgcaacaccatcaccaaaattttttgctcttttacatttaggttcatctctgtggtctgtgttgtcctgacatgtaaaaagcatatcgtttattgaggtttttttcccccccttttagagcatccggaagtgataacacgcaaaatcacaaagtagcataaatcagtaaattagttgagttgtttttgggggggaggtgggggtagggggcacagaacaccagaaagagtgttggtgtgtaggtagattccatattaatgaggaacactgaactagttggaaattactgctttctctagaaatataaagcaaagcactattccaaggctatggagtagctctacagcctggcctcaactctaaaagtgtgaagaatgcaatgggcagagacctacctgcagtggactgtcattttcctttctttctctgaattactgctttttctgtgggcattaactatattgctacagcatctagtgtactgagcctgcggtgcatggctcaggccttttcccatcgacgtctagggggactctggaccgtgtgaagctagggggtgtttctcagcacactgcagaagggcagctcagaagaatgcagggcccattcagcatggggatcccagcacatcactgtagaatttgagtgatctatgctgaataaacagtggaatgtgaccagtcaagtagaaatcttgagtaatcagatggaatgcaatctttctaacattaagctaccaagatcctgaatgtcagagatgtactcagagggttaacagacaagcacaaggcatgctgactacattggtgtatccagattgctttgcttttagccagtgctttctaatttttttctcgacattcttgggatagttcaagtttgaaataattaagtggtggtgttctttaaggaatttctataaccaaattgatcttatttttgatttcacttatcatagaacaaatatgtatcattatggcagtgtatctatgtaattatcaatttaatcatcaccaccggtgtttccatattttttcccaagtatttaatatagctctcttatggtggtggcctggtgatggggaccgtctttcttttactgacacatgaccaatcatatggtattttcaagggaattttaagattcatcttttcagtttgatagtagactagttaaggaagaactctttcattacttgcatcgtgtaaatcatctctgtagacatgtgttcatattaatgaacacattttttctcaacattgtagcagaaatcattttattcgtcatgatcaatgaatatgtgatttgctccagatcgttagaaggaaaagtaagatttcagtcatcaaaaatgtttttaccgtagccctcatctaacttacacgtggtgcatattaaaataagcagagaaaaaaaaatgtgaataaactactgaaaac

SEQ ID NO: 127979 - DNA, 8007 bp, Homo sapiens
  Payload ID: 5060
  Gene Symbol: DCLK1
  Gene Name: doublecortin-like kinase 1
  Uniprot ID: O15075
  ENST ID: ENST00000360631
  CDS Start-End: 213-2435
gcacatccctgcactagtggccgcaaccgaggcgccgcgctccagcagctgctgccgcccagcccggccccgccgccgccccccagccctgcagccccgcagccccggccgcgcccagcccggcgaggacagcaccaggaggcggcccccagcgcggccacaaagacccccggcggcgtctctccgcggaccggtcctacttgaagtccatcatgtccttcggcagagacatggagctggagcacttcgacgagcgggataaggcgcagagatacagccgagggtcgcgggtgaacggcctgccgagcccgacgcacagcgcccactgcagcttctaccgcacccgcacgctgcagacgctcagctccgagaagaaggccaagaaagttcgtttctatcgaaacggagatcgatacttcaaagggattgtgtatgccatctccccagaccggttccgatcttttgaggccctgctggctgatttgacccgaactctgtcggataacgtgaatttgccccagggagtgagaacaatctacaccattgatgggctcaagaagatttccagcctggaccaactggtggaaggagagagttatgtatgtggctccatagagcccttcaagaaactggagtacaccaagaatgtgaaccccaactggtcggtgaacgtcaagaccacctcggcttctcgggcagtgtcttcactggccactgccaaaggaagcccttcagaggtgcgagagaataaggatttcattcggcccaagctggtcaccatcatcagaagtggcgtgaagccacggaaagctgtcaggattctgctgaacaagaaaacggctcattcctttgagcaggtcctcaccgatatcaccgatgccatcaagctggactcgggagtggtgaaacgcctgtacacgttggatgggaaacaggtgatgtgccttcaggacttttttggtgatgatgacatttttattgcatgtggaccggagaagttccgttaccaggatgatttcttgctagatgaaagtgaatgtcgagtggtaaagtccacttcttacaccaaaatagcttcatcatcccgcaggagcaccaccaagagcccaggaccgtccaggcgtagcaagtcccctgcctccaccagctcagttaatggaacccctggtagtcagctctctactccgcgctcaggcaagtcgccaagcccatcacccaccagcccaggaagcctgcggaagcagaggagctctcagcatggcggctcctctacgtcacttgcgtccaccaaagtctgcagctcgatggatgagaacgatggccctggagaagaagtgtcggaggaaggcttccagattccagctacaataacagaacgatataaagtcggaagaacaataggagatggaaattttgctgttgtcaaggaatgtgtagaaagatcgactgctagagagtatgctctgaaaattatcaagaaaagcaaatgtcgaggcaaagagcacatgatccagaatgaagtgtctattttaagaagagtgaagcatcccaatatcgttcttctgattgaggagatggatgtgccaactgaactgtatcttgtcatggaattagtaaaggggggagacctttttgatgccattacttccactaacaaatacaccgagagagacgccagtgggatgctgtacaacctagccagcgccatcaaatacctgcatagcctgaacatcgtccaccgtgatatcaagccagagaacctgctggtgtatgagcaccaagatggcagcaaatcactgaagctgggtgactttggactggccaccattgtagacggccccctgtacacagtctgtggcaccccaacatacgtggctccagaaatcattgcagagactggatacggcctcaaggtggacatctgggcagcaggtgtaatcacttatatcctgctgtgtggtttccctccattccgtggaagtggtgatgaccaggaggtgctttttgatcagattttgatggggcaggtggactttccttctccatactgggataatgtttccgattctgcaaaggagctcattaccatgatgctgttggtcgatgtagatcagcgattttctgctgttcaagtacttgagcatccctgggttaatgatgatggcctcccagaaaatgaacatcagctgtcagtagctggaaagataaagaagcatttcaacacaggccccaagccgaatagcacagcagctggagtttctgtcatagcaaccaccgctcttgataaggagaggcaggttttccgacgaagacgcaaccaggatgtgaggagccggtacaaggcgcagccagctcctcccgaactcaactcggaatcggaagactactccccaagctcctccgagactgttcgctcccctaactcgcccttttaataagacccttttactcaaagtcctagcttaaccctttgagactctgagatttttttcccccaaatttgtgtaaaacagtttcatctgatctatctagcgctcaatgcttgaatggcagaactgaaagtgttttcaggtatctttgtagcggtttccctttactgaataagatgacacgtggtgattgtgaagatggtaatttgctgctaatagagtcctcaaagggttaaggccaatttgcaatttttttttaaacttagaagcaatgaatgttttcatcagtcaagctaggatctgcagtatgtaatatagcacttgttaaccctctgagtgcatagaattttattgagaattcttgtttgggaatttttcaggcctttggatgtatacacacatgtttcttgattttactgcagatcaaggggtgttgttagatgctgaaatgtccagaaaagaaggacatttagaatgatatcttgtttgtccttttctgtgggtttagaacgtggcaggtttataacttcgacacacgcacggttctttcttcttcacaatcctattcagaaacagattttttttttcattagagatatgactgtcagttgcagtgagttctgcatcccaagtggagggaattgggtttgtggcaaagagcttgacccaggaaatagatggtgccccccaaattgtctccacatgaagatgtactgatgacgccccagaaatgctgcttccatatcagctgctgctagcgccagcgcagactctcagggagtcaccacagcttgtcttgtgcttggtgagtgagggtctctctactcagtgtcagacatctacaggaaagaaacaactggtggaaaagagcaataaattgcccggtgctctgcagggctggaatttcaaacagaaagagggaataagatcctgtgatttttctcacctgcttttccacgcactgtggtcatcactgtgcaatctacatctagtatgaaatccacacataggagagctggggcacaaggggactggaggcagttgctttgcaagatggctgaggagaaagcacactgggaacacaatccagaatgttctaacaataagttttcagtgaataaaccactggcaagacaattccatgtgcacctttaggttacctatatagtctcctaggaagatcaggatgaaagacctagatgatacccctgaggataaaacctccatcccctaaaatgattttttttaaataccactgtctttagctgtccaggaggtcagagtgttttttctgtctttgggccaagtcctgtctgagacctgtattttcactcttgttaccaaatctatctccctagtgcagtgtctccaggcctgagtttcttctggaacagattccattttagaatggggattcacaggttctgtgcatcaccacagtgctcagagaggattctcctggggtgtcttagaggcaggtgcccaactcaaatgtattcccaaggtttgctgggctctgggatccacgagacaaccagagagggatatctcatgaaatttgcatctggtggctgaacagtacctatgttctctgttttgaatatactttaatacctgagagtcttaaaatttgtgaacaacgtttctatagtcctttattttcaaatgcacattgatcttcacttgctgcatttttactcttcaaccctgaaactatggtctacattaatatggatttttaaatcacatgtcattacttttgcaacaccatcaccaaaattttttgctcttttacatttaggttcatctctgtggtctgtgttgtcctgacatgtaaaaagcatatcgtttattgaggtttttttcccccccttttagagcatccggaagtgataacacgcaaaatcacaaagtagcataaatcagtaaattagttgagttgtttttgggggggaggtgggggtagggggcacagaacaccagaaagagtgttggtgtgtaggtagattccatattaatgaggaacactgaactagttggaaattactgctttctctagaaatataaagcaaagcactattccaaggctatggagtagctctacagcctggcctcaactctaaaagtgtgaagaatgcaatgggcagagacctacctgcagtggactgtcattttcctttctttctctgaattactgctttttctgtgggcattaactatattgctacagcatctagtgtactgagcctgcggtgcatggctcaggccttttcccatcgacgtctagggggactctggaccgtgtgaagctagggggtgtttctcagcacactgcagaagggcagctcagaagaatgcagggcccattcagcatggggatcccagcacatcactgtagaatttgagtgatctatgctgaataaacagtggaatgtgaccagtcaagtagaaatcttgagtaatcagatggaatgcaatctttctaacattaagctaccaagatcctgaatgtcagagatgtactcagagggttaacagacaagcacaaggcatgctgactacattggtgtatccagattgctttgcttttagccagtgctttctaatttttttctcgacattcttgggatagttcaagtttgaaataattaagtggtggtgttctttaaggaatttctataaccaaattgatcttatttttgatttcacttatcatagaacaaatatgtatcattatggcagtgtatctatgtaattatcaatttaatcatcaccaccggtgtttccatattttttcccaagtatttaatatagctctcttatggtggtggcctggtgatggggaccgtctttcttttactgacacatgaccaatcatatggtattttcaagggaattttaagattcatcttttcagtttgatagtagactagttaaggaagaactctttcattacttgcatcgtgtaaatcatctctgtagacatgtgttcatattaatgaacacattttttctcaacattgtagcagaaatcattttattcgtcatgatcaatgaatatgtgatttgctccagatcgttagaaggaaaagtaagatttcagtcatcaaaaatgtttttaccgtagccctcatctaacttacacgtggtgcatattaaaataagcagagaaaaaaaaatgtgaataaactactgaaaacacttggtgttttgtgttcaatgagaccttcctgcaacctgctccccatgggtggcagttaacaggcccatcagatattgttgaaagaaagcaatatatccatgaatgaaggctaaaattgcaatcctttaccctttgaggcatatttcagttgaaaacaaaaagaaaagaaaatttggcttagagggtcacagagctcccatatgaccaagtctcaagcacattaaatcatggttgtttactggccaagggcgtccactagacaactctatcccttgcgctgaagctcaatcgtgctgagggagagctttcttaatattactgtgttgctcttagcccttctctgggttaggatctgtcagcatttctatgataaactcctattctcaaaggtttttaatttgaccataaaaatgtgccccaggctgaagtttgctatacagggctgtaccaaagagtgaaggtttacttccttctctttccaacttcttccccattctccaaggaaaagaacaacaaaaaaatctggtatggtccctccttaatagtgatttcagaattttggaaagcaccaagatccaagatggtagttttaatgtagttactcattcgcacacattttttaaatttaatgggtcacctggcatatattgtagataacatatcttttctataatttgtaagtcaataatttttttaactgctacatgatatttttttttgcccaaagattttaaaagacttgaagttggtcagttcaaaactcagatttttctacacattgtctgccatgtccattaggagtttggggaaaatactctcacacagacccttactttgcatgcagtttagagggtaagatacgtgcttcttttggggataaagatttccttacttaattgtcaaatttcatggagccattctagtctgttggggaaaatagtgattaaaagcacttccaaaattaacattttttgacaattcagatatgaaaagaagcaggggaaaataatacactttactcttttcttgcttaaaggcaaacaaatcaatgaaacttgaggacacactaaacatttgataactgcaaatgtgctttaaaaattggttcaatggtgcttacacatgaaacggtaacaaatggggttcctaggacgtcagaaggaatctttagtttgtatgtaattacacactagaggaggaggtgcttttaagccagtcttttatttttaatcatctcaaatatgcaaccatacatgcagtaacattaagggtcgtaaactggtgggaaacaggaacttcagtggagaggcttaaatgcctctggttagagtgggggtttttgtttgtttgtttattgttgggtttcaacactgagcatcatttctgtgatcaagtttctaactggcatgtgttttgatcatgaggtttaccatatcttgcccatacagacaaatgagagatctagtttcattttgttccctaaagaaagaacactctctaaaattaaatcatacctgtaaatttcttcagcatttgtttctgttcaatgaaattgagacccttaatgttgctttaatgtaaaattgaatattttgtctgtgatatactttaataatttaaagtaagtaatagttctaaagtcttcactgttgctactaagagaaaatagaattttaaaggtgatgataaagatgctataatgtcagttcactccagtccaatcaaatgtagtaagaaaaagtccttgaatagttctctagggacaatttctcacttgccattgacattaatctttggtgtattctcagaaaaaataaaaagaaattgaaactggtccaaggttatagtcatatcctcgataacttttgaaaaaaaattttattaggaaattaatactagcctttttcattctggctgaaagaaaattattaaaggattagttgagtgtgaaattcaacagtattttgctcatacatactaaaaaggtgcgtagggacttggcgcatttaaacaagtttctgaaaggtttcaatttgactcaagaaaaaaattcaatatttcttttgaaaatactgaatttatcacttgctgcatggatcagatggcataggttaatctttgattttcagaatcctaatgaaataactttcaaacaatttgtgtccttaattaaaggtggaatgagatccaatttttccccctaatccttcagtttaagctgatacatgtaggttaatgtggaatgaaatcatctgtgatatattatgttcatttatcaactgagcttttttgatgttgcctgtttttatgtaaaacatgttcttaaagttaataaaataatagtacttggtgtatgaactactacataatacctta

SEQ ID NO: 127980 - DNA, 2101 bp, Homo sapiens
  Payload ID: 5060
  Gene Symbol: DCLK1
  Gene Name: doublecortin-like kinase 1
  ENST ID: ENST00000379892
  CDS Start-End: 213-1304
gcacatccctgcactagtggccgcaaccgaggcgccgcgctccagcagctgctgccgcccagcccggccccgccgccgccccccagccctgcagccccgcagccccggccgcgcccagcccggcgaggacagcaccaggaggcggcccccagcgcggccacaaagacccccggcggcgtctctccgcggaccggtcctacttgaagtccatcatgtccttcggcagagacatggagctggagcacttcgacgagcgggataaggcgcagagatacagccgagggtcgcgggtgaacggcctgccgagcccgacgcacagcgcccactgcagcttctaccgcacccgcacgctgcagacgctcagctccgagaagaaggccaagaaagttcgtttctatcgaaacggagatcgatacttcaaagggattgtgtatgccatctccccagaccggttccgatcttttgaggccctgctggctgatttgacccgaactctgtcggataacgtgaatttgccccagggagtgagaacaatctacaccattgatgggctcaagaagatttccagcctggaccaactggtggaaggagagagttatgtatgtggctccatagagcccttcaagaaactggagtacaccaagaatgtgaaccccaactggtcggtgaacgtcaagaccacctcggcttctcgggcagtgtcttcactggccactgccaaaggaagcccttcagaggtgcgagagaataaggatttcattcggcccaagctggtcaccatcatcagaagtggcgtgaagccacggaaagctgtcaggattctgctgaacaagaaaacggctcattcctttgagcaggtcctcaccgatatcaccgatgccatcaagctggactcgggagtggtgaaacgcctgtacacgttggatgggaaacaggtgatgtgccttcaggacttttttggtgatgatgacatttttattgcatgtggaccggagaagttccgttaccaggatgatttcttgctagatgaaagtgaatgtcgagtggtaaagtccacttcttacaccaaaatagcttcatcatcccgcaggagcaccaccaagagcccaggaccgtccaggcgtagcaagtcccctgcctccaccagctcagttaatggaacccctggtagtcagctctctactccgcgctcaggcaagtcgccaagcccatcacccaccagcccaggaagcctgcggaagcagagggacctgtaccgccccctctcttcggatgacttggattcagtaggagactcagtgtaaaagaaacaatggagcaatgtatatggtttgtgattgggtgaaggtttcacatttctgaagcaaaagtcttacagcaaaatacacaaaagagttttgcataccttgaaatgataaaagaccaaatcatccaaaagtaaatatgtatgcattttgttttcgtgatgttcaaccttgaaattgagagatttttaaaaatatctcccacatggatttgattggggagagtttgaacacaaaatgctgagatttttgtacagggcctggctctagatgaatttcatacacggacccaatattgagtacaagaacacactaaccatgtggcaatatagagccagaatttctgcagatggagttttcttcttaattataagtagacatagagatataatttttctgtactttctgtaaagcatattaaaacggcactagcaggcatattttttctaaaggttatattgtttttaaaatttgaattgcttggtttttagaggtacttttattacaaaataataaaaatacttgggtagattttttttctccctagacagtagaaaaagctacttactgttttgtgggttagtacatccgagagaaaaagaaaaattatgacaacgacacatctcataaagactctgaagttaggctttaggaacttgccttgtttttgttgtcaagtaaattttattttttaaagttattttattagaaacagtataaatttagcttaagctatatgccaatatgaagaacttggccaatggcattgctatagattgtataattttttcttacaa

SEQ ID NO: 127981 - DNA, 4612 bp, Homo sapiens
  Payload ID: 5060
  Gene Symbol: DCLK1
  Gene Name: doublecortin-like kinase 1
  Uniprot ID: O15075
  ENST ID: ENST00000379893
  CDS Start-End: 115-1416
agccttagccatccttaaactcatccaaccgattcccatttccgcgggtgcttggcttagtgctgagacgggattccgccgttggtattcaggtccaacactaagactgtgtccatgttagaactcatagaagttaatggaacccctggtagtcagctctctactccgcgctcaggcaagtcgccaagcccatcacccaccagcccaggaagcctgcggaagcagaggagctctcagcatggcggctcctctacgtcacttgcgtccaccaaagtctgcagctcgatggatgagaacgatggccctggagaagaagtgtcggaggaaggcttccagattccagctacaataacagaacgatataaagtcggaagaacaataggagatggaaattttgctgttgtcaaggaatgtgtagaaagatcgactgctagagagtatgctctgaaaattatcaagaaaagcaaatgtcgaggcaaagagcacatgatccagaatgaagtgtctattttaagaagagtgaagcatcccaatatcgttcttctgattgaggagatggatgtgccaactgaactgtatcttgtcatggaattagtaaaggggggagacctttttgatgccattacttccactaacaaatacaccgagagagacgccagtgggatgctgtacaacctagccagcgccatcaaatacctgcatagcctgaacatcgtccaccgtgatatcaagccagagaacctgctggtgtatgagcaccaagatggcagcaaatcactgaagctgggtgactttggactggccaccattgtagacggccccctgtacacagtctgtggcaccccaacatacgtggctccagaaatcattgcagagactggatacggcctcaaggtggacatctgggcagcaggtgtaatcacttatatcctgctgtgtggtttccctccattccgtggaagtggtgatgaccaggaggtgctttttgatcagattttgatggggcaggtggactttccttctccatactgggataatgtttccgattctgcaaaggagctcattaccatgatgctgttggtcgatgtagatcagcgattttctgctgttcaagtacttgagcatccctgggttaatgatgatggcctcccagaaaatgaacatcagctgtcagtagctggaaagataaagaagcatttcaacacaggccccaagccgaatagcacagcagctggagtttctgtcatagcaaccaccgctcttgataaggagaggcaggttttccgacgaagacgcaaccaggatgtgaggagccggtacaaggcgcagccagctcctcccgaactcaactcggaatcggaagactactccccaagctcctccgagactgttcgctcccctaactcgcccttttaataagacccttttactcaaagtcctagcttaaccctttgagactctgagatttttttcccccaaatttgtgtaaaacagtttcatctgatctatctagcgctcaatgcttgaatggcagaactgaaagtgttttcaggtatctttgtagcggtttccctttactgaataagatgacacgtggtgattgtgaagatggtaatttgctgctaatagagtcctcaaagggttaaggccaatttgcaatttttttttaaacttagaagcaatgaatgttttcatcagtcaagctaggatctgcagtatgtaatatagcacttgttaaccctctgagtgcatagaattttattgagaattcttgtttgggaatttttcaggcctttggatgtatacacacatgtttcttgattttactgcagatcaaggggtgttgttagatgctgaaatgtccagaaaagaaggacatttagaatgatatcttgtttgtccttttctgtgggtttagaacgtggcaggtttataacttcgacacacgcacggttctttcttcttcacaatcctattcagaaacagattttttttttcattagagatatgactgtcagttgcagtgagttctgcatcccaagtggagggaattgggtttgtggcaaagagcttgacccaggaaatagatggtgccccccaaattgtctccacatgaagatgtactgatgacgccccagaaatgctgcttccatatcagctgctgctagcgccagcgcagactctcagggagtcaccacagcttgtcttgtgcttggtgagtgagggtctctctactcagtgtcagacatctacaggaaagaaacaactggtggaaaagagcaataaattgcccggtgctctgcagggctggaatttcaaacagaaagagggaataagatcctgtgatttttctcacctgcttttccacgcactgtggtcatcactgtgcaatctacatctagtatgaaatccacacataggagagctggggcacaaggggactggaggcagttgctttgcaagatggctgaggagaaagcacactgggaacacaatccagaatgttctaacaataagttttcagtgaataaaccactggcaagacaattccatgtgcacctttaggttacctatatagtctcctaggaagatcaggatgaaagacctagatgatacccctgaggataaaacctccatcccctaaaatgattttttttaaataccactgtctttagctgtccaggaggtcagagtgttttttctgtctttgggccaagtcctgtctgagacctgtattttcactcttgttaccaaatctatctccctagtgcagtgtctccaggcctgagtttcttctggaacagattccattttagaatggggattcacaggttctgtgcatcaccacagtgctcagagaggattctcctggggtgtcttagaggcaggtgcccaactcaaatgtattcccaaggtttgctgggctctgggatccacgagacaaccagagagggatatctcatgaaatttgcatctggtggctgaacagtacctatgttctctgttttgaatatactttaatacctgagagtcttaaaatttgtgaacaacgtttctatagtcctttattttcaaatgcacattgatcttcacttgctgcatttttactcttcaaccctgaaactatggtctacattaatatggatttttaaatcacatgtcattacttttgcaacaccatcaccaaaattttttgctcttttacatttaggttcatctctgtggtctgtgttgtcctgacatgtaaaaagcatatcgtttattgaggtttttttcccccccttttagagcatccggaagtgataacacgcaaaatcacaaagtagcataaatcagtaaattagttgagttgtttttgggggggaggtgggggtagggggcacagaacaccagaaagagtgttggtgtgtaggtagattccatattaatgaggaacactgaactagttggaaattactgctttctctagaaatataaagcaaagcactattccaaggctatggagtagctctacagcctggcctcaactctaaaagtgtgaagaatgcaatgggcagagacctacctgcagtggactgtcattttcctttctttctctgaattactgctttttctgtgggcattaactatattgctacagcatctagtgtactgagcctgcggtgcatggctcaggccttttcccatcgacgtctagggggactctggaccgtgtgaagctagggggtgtttctcagcacactgcagaagggcagctcagaagaatgcagggcccattcagcatggggatcccagcacatcactgtagaatttgagtgatctatgctgaataaacagtggaatgtgaccagtcaagtagaaatcttgagtaatcagatggaatgcaatctttctaacattaagctaccaagatcctgaatgtcagagatgtactcagagggttaacagacaagcacaaggcatgctgactacattggtgtatccagattgctttgcttttagccagtgctttctaatttttttctcgacattcttgggatagttcaagtttgaaataattaagtggtggtgttctttaaggaatttctataaccaaattgatcttatttttgatttcacttatcatagaacaaatatgtatcattatggcagtgtatctatgtaattatcaatttaatcatcaccaccggtgtttccatattttttcccaagtatttaatatagctctcttatggtggtggcctggtgatggggaccgtctttcttttactgacacatgaccaatcatatggtattttcaagggaattttaagattcatcttttcagtttgatagtagactagttaaggaagaactctttcattacttgcatcgtgtaaatcatctctgtagacatgtgttcatattaatgaacacattttttctcaacattgtagcagaaatcattttattcgtcatgatcaatgaatatgtgatttgctccagatcgttagaaggaaaagtaagatttcagtcatcaaaaatgtttttaccgtagccctcatctaacttacacgtggtgcatattaaaataagcagagaaaaaaaaatgtgaataaactactgaaaacac

SEQ ID NO: 127982 - DNA, 7592 bp, Homo sapiens
  Payload ID: 5060
  Gene Symbol: DCLK1
  Gene Name: doublecortin-like kinase 1
  Uniprot ID: O15075
  ENST ID: ENST00000615680
  CDS Start-End: 334-1602
acttcattatgattcagtgcaaagtactgacagcactggggcttccggaagggagtggtgtcgggatgggggttgctgttggcaagaggcttaattgacacctttgatgtagcctaagacagaacctgcacctcccactgctgcttgggagacgtcagctttacgcagaaaaggcatctgctgatgaatcctgcatctcattcagcctgctctgggagcagccttagccatccttaaactcatccaaccgattcccatttccgcgggtgcttggcttagtgctgagacgggattccgccgttggtattcaggtccaacactaagactgtgtccatgttagaactcatagaagttaatggaacccctggtagtcagctctctactccgcgctcaggcaagtcgccaagcccatcacccaccagcccaggaagcctgcggaagcagaggagctctcagcatggcggctcctctacgtcacttgcgtccaccaaagtctgcagctcgatggatgagaacgatggccctggagaagaagtgtcggaggaaggcttccagattccagctacaataacagaacgatataaagtcggaagaacaataggagatggaaattttgctgttgtcaaggaatgtgtagaaagatcgactgctagagagtatgctctgaaaattatcaagaaaagcaaatgtcgaggcaaagagcacatgatccagaatgaagtgtctattttaagaagagtgaagcatcccaatatcgttcttctgattgaggagatggatgtgccaactgaactgtatcttgtcatggaattagtaaaggggggagacctttttgatgccattacttccactaacaaatacaccgagagagacgccagtgggatgctgtacaacctagccagcgccatcaaatacctgcatagcctgaacatcgtccaccgtgatatcaagccagagaacctgctggtgtatgagcaccaagatggcagcaaatcactgaagctgggtgactttggactggccaccattgtagacggccccctgtacacagtctgtggcaccccaacatacgtggctccagaaatcattgcagagactggatacggcctcaaggtggacatctgggcagcaggtgtaatcacttatatcctgctgtgtggtttccctccattccgtggaagtggtgatgaccaggaggtgctttttgatcagattttgatggggcaggtggactttccttctccatactgggataatgtttccgattctgcaaaggagctcattaccatgatgctgttggtcgatgtagatcagcgattttctgctgttcaagtacttgagcatccctgggttaatgatgatggcctcccagaaaatgaacatcagctgtcagtagctggaaagataaagaagcatttcaacacaggccccaagccgaatagcacagcagctggagtttctgtcatagcactggaccacgggtttaccatcaagagatcagggtctttggactactaccagcaaccaggaatgtattggataagaccaccgctcttgataaggagaggcaggttttccgacgaagacgcaaccaggatgtgaggagccggtacaaggcgcagccagctcctcccgaactcaactcggaatcggaagactactccccaagctcctccgagactgttcgctcccctaactcgcccttttaataagacccttttactcaaagtcctagcttaaccctttgagactctgagatttttttcccccaaatttgtgtaaaacagtttcatctgatctatctagcgctcaatgcttgaatggcagaactgaaagtgttttcaggtatctttgtagcggtttccctttactgaataagatgacacgtggtgattgtgaagatggtaatttgctgctaatagagtcctcaaagggttaaggccaatttgcaatttttttttaaacttagaagcaatgaatgttttcatcagtcaagctaggatctgcagtatgtaatatagcacttgttaaccctctgagtgcatagaattttattgagaattcttgtttgggaatttttcaggcctttggatgtatacacacatgtttcttgattttactgcagatcaaggggtgttgttagatgctgaaatgtccagaaaagaaggacatttagaatgatatcttgtttgtccttttctgtgggtttagaacgtggcaggtttataacttcgacacacgcacggttctttcttcttcacaatcctattcagaaacagattttttttttcattagagatatgactgtcagttgcagtgagttctgcatcccaagtggagggaattgggtttgtggcaaagagcttgacccaggaaatagatggtgccccccaaattgtctccacatgaagatgtactgatgacgccccagaaatgctgcttccatatcagctgctgctagcgccagcgcagactctcagggagtcaccacagcttgtcttgtgcttggtgagtgagggtctctctactcagtgtcagacatctacaggaaagaaacaactggtggaaaagagcaataaattgcccggtgctctgcagggctggaatttcaaacagaaagagggaataagatcctgtgatttttctcacctgcttttccacgcactgtggtcatcactgtgcaatctacatctagtatgaaatccacacataggagagctggggcacaaggggactggaggcagttgctttgcaagatggctgaggagaaagcacactgggaacacaatccagaatgttctaacaataagttttcagtgaataaaccactggcaagacaattccatgtgcacctttaggttacctatatagtctcctaggaagatcaggatgaaagacctagatgatacccctgaggataaaacctccatcccctaaaatgattttttttaaataccactgtctttagctgtccaggaggtcagagtgttttttctgtctttgggccaagtcctgtctgagacctgtattttcactcttgttaccaaatctatctccctagtgcagtgtctccaggcctgagtttcttctggaacagattccattttagaatggggattcacaggttctgtgcatcaccacagtgctcagagaggattctcctggggtgtcttagaggcaggtgcccaactcaaatgtattcccaaggtttgctgggctctgggatccacgagacaaccagagagggatatctcatgaaatttgcatctggtggctgaacagtacctatgttctctgttttgaatatactttaatacctgagagtcttaaaatttgtgaacaacgtttctatagtcctttattttcaaatgcacattgatcttcacttgctgcatttttactcttcaaccctgaaactatggtctacattaatatggatttttaaatcacatgtcattacttttgcaacaccatcaccaaaattttttgctcttttacatttaggttcatctctgtggtctgtgttgtcctgacatgtaaaaagcatatcgtttattgaggtttttttcccccccttttagagcatccggaagtgataacacgcaaaatcacaaagtagcataaatcagtaaattagttgagttgtttttgggggggaggtgggggtagggggcacagaacaccagaaagagtgttggtgtgtaggtagattccatattaatgaggaacactgaactagttggaaattactgctttctctagaaatataaagcaaagcactattccaaggctatggagtagctctacagcctggcctcaactctaaaagtgtgaagaatgcaatgggcagagacctacctgcagtggactgtcattttcctttctttctctgaattactgctttttctgtgggcattaactatattgctacagcatctagtgtactgagcctgcggtgcatggctcaggccttttcccatcgacgtctagggggactctggaccgtgtgaagctagggggtgtttctcagcacactgcagaagggcagctcagaagaatgcagggcccattcagcatggggatcccagcacatcactgtagaatttgagtgatctatgctgaataaacagtggaatgtgaccagtcaagtagaaatcttgagtaatcagatggaatgcaatctttctaacattaagctaccaagatcctgaatgtcagagatgtactcagagggttaacagacaagcacaaggcatgctgactacattggtgtatccagattgctttgcttttagccagtgctttctaatttttttctcgacattcttgggatagttcaagtttgaaataattaagtggtggtgttctttaaggaatttctataaccaaattgatcttatttttgatttcacttatcatagaacaaatatgtatcattatggcagtgtatctatgtaattatcaatttaatcatcaccaccggtgtttccatattttttcccaagtatttaatatagctctcttatggtggtggcctggtgatggggaccgtctttcttttactgacacatgaccaatcatatggtattttcaagggaattttaagattcatcttttcagtttgatagtagactagttaaggaagaactctttcattacttgcatcgtgtaaatcatctctgtagacatgtgttcatattaatgaacacattttttctcaacattgtagcagaaatcattttattcgtcatgatcaatgaatatgtgatttgctccagatcgttagaaggaaaagtaagatttcagtcatcaaaaatgtttttaccgtagccctcatctaacttacacgtggtgcatattaaaataagcagagaaaaaaaaatgtgaataaactactgaaaacacttggtgttttgtgttcaatgagaccttcctgcaacctgctccccatgggtggcagttaacaggcccatcagatattgttgaaagaaagcaatatatccatgaatgaaggctaaaattgcaatcctttaccctttgaggcatatttcagttgaaaacaaaaagaaaagaaaatttggcttagagggtcacagagctcccatatgaccaagtctcaagcacattaaatcatggttgtttactggccaagggcgtccactagacaactctatcccttgcgctgaagctcaatcgtgctgagggagagctttcttaatattactgtgttgctcttagcccttctctgggttaggatctgtcagcatttctatgataaactcctattctcaaaggtttttaatttgaccataaaaatgtgccccaggctgaagtttgctatacagggctgtaccaaagagtgaaggtttacttccttctctttccaacttcttccccattctccaaggaaaagaacaacaaaaaaatctggtatggtccctccttaatagtgatttcagaattttggaaagcaccaagatccaagatggtagttttaatgtagttactcattcgcacacattttttaaatttaatgggtcacctggcatatattgtagataacatatcttttctataatttgtaagtcaataatttttttaactgctacatgatatttttttttgcccaaagattttaaaagacttgaagttggtcagttcaaaactcagatttttctacacattgtctgccatgtccattaggagtttggggaaaatactctcacacagacccttactttgcatgcagtttagagggtaagatacgtgcttcttttggggataaagatttccttacttaattgtcaaatttcatggagccattctagtctgttggggaaaatagtgattaaaagcacttccaaaattaacattttttgacaattcagatatgaaaagaagcaggggaaaataatacactttactcttttcttgcttaaaggcaaacaaatcaatgaaacttgaggacacactaaacatttgataactgcaaatgtgctttaaaaattggttcaatggtgcttacacatgaaacggtaacaaatggggttcctaggacgtcagaaggaatctttagtttgtatgtaattacacactagaggaggaggtgcttttaagccagtcttttatttttaatcatctcaaatatgcaaccatacatgcagtaacattaagggtcgtaaactggtgggaaacaggaacttcagtggagaggcttaaatgcctctggttagagtgggggtttttgtttgtttgtttattgttgggtttcaacactgagcatcatttctgtgatcaagtttctaactggcatgtgttttgatcatgaggtttaccatatcttgcccatacagacaaatgagagatctagtttcattttgttccctaaagaaagaacactctctaaaattaaatcatacctgtaaatttcttcagcatttgtttctgttcaatgaaattgagacccttaatgttgctttaatgtaaaattgaatattttgtctgtgatatactttaataatttaaagtaagtaatagttctaaagtcttcactgttgctactaagagaaaatagaattttaaaggtgatgataaagatgctataatgtcagttcactccagtccaatcaaatgtagtaagaaaaagtccttgaatagttctctagggacaatttctcacttgccattgacattaatctttggtgtattctcagaaaaaataaaaagaaattgaaactggtccaaggttatagtcatatcctcgataacttttgaaaaaaaattttattaggaaattaatactagcctttttcattctggctgaaagaaaattattaaaggattagttgagtgtgaaattcaacagtattttgctcatacatactaaaaaggtgcgtagggacttggcgcatttaaacaagtttctgaaaggtttcaatttgactcaagaaaaaaattcaatatttcttttgaaaatactgaatttatcacttgctgcatggatcagatggcataggttaatctttgattttcagaatcctaatgaaataactttcaaacaatttgtgtccttaattaaaggtggaatgagatccaatttttccccctaatccttcagtttaagctgatacatgtaggttaatgtggaatgaaatcatctgtgatatattatgttcatttatcaactgagcttttttgatgttgcctgtttttatgtaaaacatgttcttaaagttaataaaataatagtacttggtgtatgaactactacataataccttagctgaagggtacgctcctcagttcatttgccatattggagtaaaatttcaccttagttcaattcacaattgacacattcagttcacgaaggaatagcccagctgtgttcttagggggaattctctctatgcaaggctttaaaaattagtcatgcggtcagagtgtagctttcccacatgtcctccatagcacagtgtgtatttcatgagcataattcaaaaacagctatttcaaaaatgtcccttgtcatatattacgttcctgcctgggccactgacttggataaatacaaataaaccaaataccattca

SEQ ID NO: 127983 - DNA, 4265 bp, Homo sapiens
  Payload ID: 5061
  Gene Symbol: DCLK2
  Gene Name: doublecortin-like kinase 2
  Uniprot ID: Q8N568
  ENST ID: ENST00000296550
  CDS Start-End: 755-3055
ccgcggtttggcatccccggggccgggaagcctcctccagcgctgacagcctgtcggcggcggagggaggccagagcgcggatgcttgccagtgggccgggcctgaccgctgcgtgggaggcgggctgcattatttcccgctagggccgcgctccagggaaggaaggggccagacacggccctctcagccccgaacggcgcgcgctgcccggcgggcgggatccgggcgcggccgaggcggcggcgctgcaccccgggcctgggcccgcgcgactcccccgggggcctctcccacgctccgcgccccgccccacccttccttccttcctcccctcggcgctcccgggagcgctcggcagacgcccgagctttgtgggcgcccgcgggcccagcgcgagcctcgggcggcccaactttgcctctcccggtcggctcccgagcgggacttgtgaggcgtggccgggtggaggaggcgcttgcgggggcgtggggctccccggcaggcgggaggcacggagcaagtcgcactggacaatgacctgggcagctcggcgctgcggacacttttagctgagggcgcgggcgggtcggctcctccgcggctcctcggccccacctgcgcggagagggcgggatgccagagccaggtgtcccggcgcgttaagggccctcgcagtcagacgtccctgcaccggcgctcgcacccttagtcggcccggaacgtctttttgcggacgccctcggagcagccgcgatggccagcaccaggagtatcgagctggagcactttgaggaacgggacaaaaggccgcggccggggtcgcggagaggggcccccagctcctccgggggcagcagcagctcgggccccaaggggaacgggctcatccccagtccggcgcacagtgcccactgcagcttctaccgcacgcggaccctgcaggccctcagctcggagaagaaggccaagaaggcgcgcttctaccggaacggggaccgctacttcaagggcctggtgtttgccatctccagcgaccgcttccggtccttcgatgcgctcctcatagagctcacccgctccctgtcggacaacgtgaacctgccccagggtgtccgcactatctacaccatcgacggcagccggaaggtcaccagcctggacgagctgctggaaggtgagagttacgtgtgtgcatccaatgaaccatttcgtaaagtcgattacaccaaaaatattaatccaaactggtctgtgaacatcaagggtgggacatcccgagcgctggctgctgcctcctctgtgaaaagtgaagtaaaagaaagtaaagatttcatcaaacccaagttagtgactgtgattcgaagtggagtgaagcctagaaaagccgtgcggatccttctgaataaaaagactgctcattcctttgaacaagtcttaacagatatcaccgaagccattaaactagactcaggagtcgtcaagaggctctgcaccctggatggaaagcaggttacttgtctgcaagacttttttggtgatgacgatgtttttattgcatgtggaccagaaaaatttcgttatgcccaagatgactttgtcctggatcatagtgaatgtcgtgtcctgaagtcatcttattctcgatcctcagctgttaagtattctggatccaaaagccctgggccctctcgacgcagcaaatcaccagcttcagttaatggaactcccagcagccaactttctactcctaaatctacgaaatcctccagttcctctccaactagtccaggaagtttcagaggattaaagcagatttctgctcatggcagatcttcttccaatgtaaacggtggacctgagcttgaccgttgcataagtcctgaaggtgtgaatggaaacagatgctctgaatcatcaactcttcttgagaaatacaaaattggaaaggtcattggtgatggcaattttgcagtagtcaaagagtgtatagacaggtccactggaaaggagtttgccctaaagattatagacaaagccaaatgttgtggaaaggaacacctgattgagaatgaagtgtcaatactgcgccgagtgaaacatcccaatatcattatgctggtcgaggagatggaaacagcaactgagctctttctggtgatggaattggtcaaaggtggagatctctttgatgcaattacttcgtcgaccaagtacactgagagagatggcagtgccatggtgtacaacttagccaatgccctcaggtatctccatggcctcagcatcgtgcacagagacatcaaaccagagaatctcttggtgtgtgaatatcctgatggaaccaagtctttgaaactgggagactttgggcttgcgactgtggtagaaggccctttatacacagtctgtggcacacccacttatgtggctccagaaatcattgctgaaactggctatggcctgaaggtggacatttgggcagctggtgtgatcacatacatacttctctgtggattcccaccattccgaagtgagaacaatctccaggaagatctcttcgaccagatcttggctgggaagctggagtttccggccccctactgggataacatcacggactctgccaaggaattaatcagtcaaatgcttcaggtaaatgttgaagctcggtgtaccgcgggacaaatcctgagtcacccctgggtgtcagatgatgcctcccaggagaataacatgcaagctgaggtgacaggtaaactaaaacagcactttaataatgcgctccccaaacagaacagcactaccaccggggtctccgtcatcatgaacacggctctagataaggaggggcagattttctgcagcaagcactgtcaagacagcggcaggcctgggatggagcccatctctccagttcctccctcagtggaggagatccctgtgcctggggaagcagtcccggcccccacccctccggaatctcccaccccccaccctcctcccgctgccccgggtggtgagcgggcaggaacctggcgccgccaccgagactgagcctcctgcagacgggcgaagccgcctgctgcagcccaggaagccagccctctgctcggcctcgccggcctccctgctgcaggcctccctctcttcaccgcctgcgcctgagttcgcgggtcctccgcaggccgcctgggaaccggagcctggcgtgccggagcctggcctggtgctctgggctctgccttctggttcctggaggcatcaaaggctgcatccgttctgccaacagctgttcggagagactcgttccagatcatcccgtcattttcagtttgttggacattttacagcttcaccaggagaatgtgcaactttattccagcattcgatgcatttttatagaaacactttggaaacactttggatgaaccaaggccttttccttatttaagtagactcagaacactccctttcttttcttttctctctctctctctcttttttttttacgaaagacttagaattgcatttgtccttttgtgggtgtcctgtgagaggtgatatgggggctaagaggactggctttctaatagaagaagtgagcgcctgagaggacaatttggtcattggacacggattgcaggctttgagaagcgctcagaggcccagggcggcgggctcagccattcggcttggggcaccaggctccccagagacaatgctcagtattcattcatacacagacgatggaagaagccacttcttccctgggcggtgtgggtttcccccagctcttcccacacgtgtgttaggaaatgcccgtgaacttgccctctgggctttttaatgagaggcttggcgcatgcggcacccagcggctgcttccctgcaagccagcgacttgccgagcagaatgagctctgctcctgagccccggtagctgcttcctcatctgcatttcatctggagcagggcaggtaaccacaggaggaggcatgcccgaggcagccaggactgggcgggaaggtgctccctggatatactctgtgaaccttctggaaggctgctggcagtttttcctttttgtccaccaccctgctctttttaataattgtacataatccgtgtatttgttttacctgctcatcttctaaactggcgagccctatagttcgttctcattgttagattttgccttttacaagtgtccccaacctgcaataaacttttccctcttgaaaaaaagtaatcagggatgggcaaa

SEQ ID NO: 127984 - DNA, 3543 bp, Homo sapiens
  Payload ID: 5061
  Gene Symbol: DCLK2
  Gene Name: doublecortin-like kinase 2
  Uniprot ID: Q8N568
  ENST ID: ENST00000302176
  CDS Start-End: 1-2352
atggccagcaccaggagtatcgagctggagcactttgaggaacgggacaaaaggccgcggccggggtcgcggagaggggcccccagctcctccgggggcagcagcagctcgggccccaaggggaacgggctcatccccagtccggcgcacagtgcccactgcagcttctaccgcacgcggaccctgcaggccctcagctcggagaagaaggccaagaaggcgcgcttctaccggaacggggaccgctacttcaagggcctggtgtttgccatctccagcgaccgcttccggtccttcgatgcgctcctcatagagctcacccgctccctgtcggacaacgtgaacctgccccagggtgtccgcactatctacaccatcgacggcagccggaaggtcaccagcctggacgagctgctggaaggtgagagttacgtgtgtgcatccaatgaaccatttcgtaaagtcgattacaccaaaaatattaatccaaactggtctgtgaacatcaagggtgggacatcccgagcgctggctgctgcctcctctgtgaaaagtgaagtaaaagaaagtaaagatttcatcaaacccaagttagtgactgtgattcgaagtggagtgaagcctagaaaagccgtgcggatccttctgaataaaaagactgctcattcctttgaacaagtcttaacagatatcaccgaagccattaaactagactcaggagtcgtcaagaggctctgcaccctggatggaaagcaggttacttgtctgcaagacttttttggtgatgacgatgtttttattgcatgtggaccagaaaaatttcgttatgcccaagatgactttgtcctggatcatagtgaatgtcgtgtcctgaagtcatcttattctcgatcctcagctgttaagtattctggatccaaaagccctgggccctctcgacgcagcaaatcaccagcttcagtaaagcggggtggccactactccagtgcctattctacagccaaatccccagttaatggaactcccagcagccaactttctactcctaaatctacgaaatcctccagttcctctccaactagtccaggaagtttcagaggattaaagcagatttctgctcatggcagatcttcttccaatgtaaacggtggacctgagcttgaccgttgcataagtcctgaaggtgtgaatggaaacagatgctctgaatcatcaactcttcttgagaaatacaaaattggaaaggtcattggtgatggcaattttgcagtagtcaaagagtgtatagacaggtccactggaaaggagtttgccctaaagattatagacaaagccaaatgttgtggaaaggaacacctgattgagaatgaagtgtcaatactgcgccgagtgaaacatcccaatatcattatgctggtcgaggagatggaaacagcaactgagctctttctggtgatggaattggtcaaaggtggagatctctttgatgcaattacttcgtcgaccaagtacactgagagagatggcagtgccatggtgtacaacttagccaatgccctcaggtatctccatggcctcagcatcgtgcacagagacatcaaaccagagaatctcttggtgtgtgaatatcctgatggaaccaagtctttgaaactgggagactttgggcttgcgactgtggtagaaggccctttatacacagtctgtggcacacccacttatgtggctccagaaatcattgctgaaactggctatggcctgaaggtggacatttgggcagctggtgtgatcacatacatacttctctgtggattcccaccattccgaagtgagaacaatctccaggaagatctcttcgaccagatcttggctgggaagctggagtttccggccccctactgggataacatcacggactctgccaaggaattaatcagtcaaatgcttcaggtaaatgttgaagctcggtgtaccgcgggacaaatcctgagtcacccctgggtgtcagatgatgcctcccaggagaataacatgcaagctgaggtgacaggtaaactaaaacagcactttaataatgcgctccccaaacagaacagcactaccaccggggtctccgtcatcatgaacacggctctagataaggaggggcagattttctgcagcaagcactgtcaagacagcggcaggcctgggatggagcccatctctccagttcctccctcagtggaggagatccctgtgcctggggaagcagtcccggcccccacccctccggaatctcccaccccccaccctcctcccgctgccccgggtggtgagcgggcaggaacctggcgccgccaccgagactgagcctcctgcagacgggcgaagccgcctgctgcagcccaggaagccagccctctgctcggcctcgccggcctccctgctgcaggcctccctctcttcaccgcctgcgcctgagttcgcgggtcctccgcaggccgcctgggaaccggagcctggcgtgccggagcctggcctggtgctctgggctctgccttctggttcctggaggcatcaaaggctgcatccgttctgccaacagctgttcggagagactcgttccagatcatcccgtcattttcagtttgttggacattttacagcttcaccaggagaatgtgcaactttattccagcattcgatgcatttttatagaaacactttggaaacactttggatgaaccaaggccttttccttatttaagtagactcagaacactccctttcttttcttttctctctctctctctcttttttttttacgaaagacttagaattgcatttgtccttttgtgggtgtcctgtgagaggtgatatgggggctaagaggactggctttctaatagaagaagtgagcgcctgagaggacaatttggtcattggacacggattgcaggctttgagaagcgctcagaggcccagggcggcgggctcagccattcggcttggggcaccaggctccccagagacaatgctcagtattcattcatacacagacgatggaagaagccacttcttccctgggcggtgtgggtttcccccagctcttcccacacgtgtgttaggaaatgcccgtgaacttgccctctgggctttttaatgagaggcttggcgcatgcggcacccagcggctgcttccctgcaagccagcgacttgccgagcagaatgagctctgctcctgagccccggtagctgcttcctcatctgcatttcatctggagcagggcaggtaaccacaggaggaggcatgcccgaggcagccaggactgggcgggaaggtgctccctggatatactctgtgaaccttctggaaggctgctggcagtttttcctttttgtccaccaccctgctctttttaataattgtacataatccgtgtatttgttttacctgctcatcttctaaactggcgagccctatagttcgttctcattgttagattttgccttttacaagtgtccccaacctgcaataaacttttccctcttgaaaaaaa

SEQ ID NO: 127985 - DNA, 3611 bp, Homo sapiens
  Payload ID: 5061
  Gene Symbol: DCLK2
  Gene Name: doublecortin-like kinase 2
  ENST ID: ENST00000411937
  CDS Start-End: 40-2127
ccggaacgtctttttgcggacgccctcggagcagccgcgatggccagcaccaggagtatcgagctggagcactttgaggaacgggacaaaaggccgcggccggggtcgcggagaggggcccccagctcctccgggggcagcagcagctcgggccccaaggggaacgggctcatccccagtccggcgcacagtgcccactgcagcttctaccgcacgcggaccctgcaggccctcagctcggagaagaaggccaagaaggcgcgcttctaccggaacggggaccgctacttcaagggcctggtgtttgccatctccagcgaccgcttccggtccttcgatgcgctcctcatagagctcacccgctccctgtcggacaacgtgaacctgccccagggtgtccgcactatctacaccatcgacggcagccggaaggtcaccagcctggacgagctgctggaaggtgagagttacgtgtgtgcatccaatgaaccatttcgtaaagtcgattacaccaaaaatattaatccaaactggtctgtgaacatcaagggtgggacatcccgagcgctggctgctgcctcctctgtgaaaagtgaagtaaaagaaagtaaagatttcatcaaacccaagttagtgactgtgattcgaagtggagtgaagcctagaaaagccgtgcggatccttctgaataaaaagactgctcattcctttgaacaagtcttaacagatatcaccgaagccattaaactagactcaggagtcgtcaagaggctctgcaccctggatggaaagcaggttacttgtctgcaagacttttttggtgatgacgatgtttttattgcatgtggaccagaaaaatttcgttatgcccaagatgactttgtcctggatcatagtgaatgtcgtgtcctgaagtcatcttattctcgatcctcagctgttaagtattctggatccaaaagccctgggccctctcgacgcagcaaatcaccagcttcagttaatggaactcccagcagccaactttctactcctaaatctacgaaatcctccagttcctctccaactagtccaggaagtttcagaggattaaagatttctgctcatggcagatcttcttccaatgtaaacggtggacctgagcttgaccgttgcataagtcctgaaggtgtgaatggaaacagatgctctgaatcatcaactcttcttgagaaatacaaaattggaaaggtcattggtgatggcaattttgcagtagtcaaagagtgtatagacaggtccactggaaaggagtttgccctaaagattatagacaaagccaaatgttgtggaaaggaacacctgattgagaatgaagtgtcaatactgcgccgagtgaaacatcccaatatcattatgctggtcgaggagatggaaacagcaactgagctctttctggtgatggaattggtcaaaggtggagatctctttgatgcaattacttcgtcgaccaagtacactgagagagatggcagtgccatggtgtacaacttagccaatgccctcaggtatctccatggcctcagcatcgtgcacagagacatcaaaccagagaatctcttggtgtgtgaatatcctgatggaaccaagtctttgaaactgggagactttgggcttgcgactgtggtagaaggccctttatacacagtctgtggcacacccacttatgtggctccagaaatcattgctgaaactggctatggcctgaaggtggacatttgggcagctggtgtgatcacatacatacttctctgtggattcccaccattccgaagtgagaacaatctccaggaagatctcttcgaccagatcttggctgggaagctggagtttccggccccctactgggataacatcacggactctgccaaggaattaatcagtcaaatgcttcaggtaaatgttgaagctcggtgtaccgcgggacaaatcctgagtcacccctgggtgtcagatgatgcctcccaggagaataacatgcaagctgaggtgacaggtaaactaaaacagcactttaataatgcgctccccaaacagaacagcactaccaccggggtctccgtcatcatgtttgatttgacagtttgagaggcacctcagagtttccttctttaccccgctgagacagtgggagagcctgaagcagaatcctgaacacggctctagataaggaggggcagattttctgcagcaagcactgtcaagacagcggcaggcctgggatggagcccatctctccagttcctccctcagtggaggagatccctgtgcctggggaagcagtcccggcccccacccctccggaatctcccaccccccaccctcctcccgctgccccgggtggtgagcgggcaggaacctggcgccgccaccgagactgagcctcctgcagacgggcgaagccgcctgctgcagcccaggaagccagccctctgctcggcctcgccggcctccctgctgcaggcctccctctcttcaccgcctgcgcctgagttcgcgggtcctccgcaggccgcctgggaaccggagcctggcgtgccggagcctggcctggtgctctgggctctgccttctggttcctggaggcatcaaaggctgcatccgttctgccaacagctgttcggagagactcgttccagatcatcccgtcattttcagtttgttggacattttacagcttcaccaggagaatgtgcaactttattccagcattcgatgcatttttatagaaacactttggaaacactttggatgaaccaaggccttttccttatttaagtagactcagaacactccctttcttttcttttctctctctctctctcttttttttttacgaaagacttagaattgcatttgtccttttgtgggtgtcctgtgagaggtgatatgggggctaagaggactggctttctaatagaagaagtgagcgcctgagaggacaatttggtcattggacacggattgcaggctttgagaagcgctcagaggcccagggcggcgggctcagccattcggcttggggcaccaggctccccagagacaatgctcagtattcattcatacacagacgatggaagaagccacttcttccctgggcggtgtgggtttcccccagctcttcccacacgtgtgttaggaaatgcccgtgaacttgccctctgggctttttaatgagaggcttggcgcatgcggcacccagcggctgcttccctgcaagccagcgacttgccgagcagaatgagctctgctcctgagccccggtagctgcttcctcatctgcatttcatctggagcagggcaggtaaccacaggaggaggcatgcccgaggcagccaggactgggcgggaaggtgctccctggatatactctgtgaaccttctggaaggctgctggcagtttttcctttttgtccaccaccctgctctttttaataattgtacataatccgtgtatttgttttacctgctcatcttctaaactggcgagccctatagttcgttctcattgttagattttgccttttacaagtgtccccaacctgcaataaacttttccctcttgaaaaaaa

SEQ ID NO: 127986 - DNA, 2298 bp, Homo sapiens
  Payload ID: 5061
  Gene Symbol: DCLK2
  Gene Name: doublecortin-like kinase 2
  Uniprot ID: Q8N568
  ENST ID: ENST00000506325
  CDS Start-End: 1-2298
atggccagcaccaggagtatcgagctggagcactttgaggaacgggacaaaaggccgcggccggggtcgcggagaggggcccccagctcctccgggggcagcagcagctcgggccccaaggggaacgggctcatccccagtccggcgcacagtgcccactgcagcttctaccgcacgcggaccctgcaggccctcagctcggagaagaaggccaagaaggcgcgcttctaccggaacggggaccgctacttcaagggcctggtgtttgccatctccagcgaccgcttccggtccttcgatgcgctcctcatagagctcacccgctccctgtcggacaacgtgaacctgccccagggtgtccgcactatctacaccatcgacggcagccggaaggtcaccagcctggacgagctgctggaaggtgagagttacgtgtgtgcatccaatgaaccatttcgtaaagtcgattacaccaaaaatattaatccaaactggtctgtgaacatcaagggtgggacatcccgagcgctggctgctgcctcctctgtgaaaagtgaagtaaaagaaagtaaagatttcatcaaacccaagttagtgactgtgattcgaagtggagtgaagcctagaaaagccgtgcggatccttctgaataaaaagactgctcattcctttgaacaagtcttaacagatatcaccgaagccattaaactagactcaggagtcgtcaagaggctctgcaccctggatggaaagcaggttacttgtctgcaagacttttttggtgatgacgatgtttttattgcatgtggaccagaaaaatttcgttatgcccaagatgactttgtcctggatcatagtgaatgtcgtgtcctgaagtcatcttattctcgatcctcagctgttaagtattctggatccaaaagccctgggccctctcgacgcagcaaatcaccagcttcagttaatggaactcccagcagccaactttctactcctaaatctacgaaatcctccagttcctctccaactagtccaggaagtttcagaggattaaagatttctgctcatggcagatcttcttccaatgtaaacggtggacctgagcttgaccgttgcataagtcctgaaggtgtgaatggaaacagatgctctgaatcatcaactcttcttgagaaatacaaaattggaaaggtcattggtgatggcaattttgcagtagtcaaagagtgtatagacaggtccactggaaaggagtttgccctaaagattatagacaaagccaaatgttgtggaaaggaacacctgattgagaatgaagtgtcaatactgcgccgagtgaaacatcccaatatcattatgctggtcgaggagatggaaacagcaactgagctctttctggtgatggaattggtcaaaggtggagatctctttgatgcaattacttcgtcgaccaagtacactgagagagatggcagtgccatggtgtacaacttagccaatgccctcaggtatctccatggcctcagcatcgtgcacagagacatcaaaccagagaatctcttggtgtgtgaatatcctgatggaaccaagtctttgaaactgggagactttgggcttgcgactgtggtagaaggccctttatacacagtctgtggcacacccacttatgtggctccagaaatcattgctgaaactggctatggcctgaaggtggacatttgggcagctggtgtgatcacatacatacttctctgtggattcccaccattccgaagtgagaacaatctccaggaagatctcttcgaccagatcttggctgggaagctggagtttccggccccctactgggataacatcacggactctgccaaggaattaatcagtcaaatgcttcaggtaaatgttgaagctcggtgtaccgcgggacaaatcctgagtcacccctgggtgtcagatgatgcctcccaggagaataacatgcaagctgaggtgacaggtaaactaaaacagcactttaataatgcgctccccaaacagaacagcactaccaccggggtctccgtcatcatgaacacggctctagataaggaggggcagattttctgcagcaagcactgtcaagacagcggcaggcctgggatggagcccatctctccagttcctccctcagtggaggagatccctgtgcctggggaagcagtcccggcccccacccctccggaatctcccaccccccaccctcctcccgctgccccgggtggtgagcgggcaggaacctggcgccgccaccgagactga

SEQ ID NO: 127987 - DNA, 2153 bp, Homo sapiens
  Payload ID: 5061
  Gene Symbol: DCLK2
  Gene Name: doublecortin-like kinase 2
  ENST ID: ENST00000635524
  CDS Start-End: 3-2153
cgatggccagcaccaggagtatcgagctggagcactttgaggaacgggacaaaaggccgcggccggggtcgcggagaggggcccccagctcctccgggggcagcagcagctcgggccccaaggggaacgggctcatccccagtccggcgcacagtgcccactgcagcttctaccgcacgcggaccctgcaggccctcagctcggagaagaaggccaagaaggcgcgcttctaccggaacggggaccgctacttcaagggcctggtgtttgccatctccagcgaccgcttccggtccttcgatgcgctcctcatagagctcacccgctccctgtcggacaacgtgaacctgccccagggtgtccgcactatctacaccatcgacggcagccggaaggtcaccagcctggacgagctgctggaaggtgagagttacgtgtgtgcatccaatgaaccatttcgtaaagtcgattacaccaaaaatattaatccaaactggtctgtgaacatcaagggtgggacatcccgagcgctggctgctgcctcctctgtgaaaagtgaagtaaaagaaagtaaagatttcatcaaacccaagttagtgactgtgattcgaagtggagtgaagcctagaaaagccgtgcggatccttctgaataaaaagactgctcattcctttgaacaagtcttaacagatatcaccgaagccattaaactagactcaggagtcgtcaagaggctctgcaccctggatggaaagcaggttacttgtctgcaagacttttttggtgatgacgatgtttttattgcatgtggaccagaaaaatttcgttatgcccaagatgactttgtcctggatcatagtgaatgtcgtgtcctgaagtcatcttattctcgatcctcagctgttaagtattctggatccaaaagccctgggccctctcgacgcagcaaatcaccagcttcagtaaagcggggtggccactactccagtgcctattctacagccaaatccccagttaatggaactcccagcagccaactttctactcctaaatctacgaaatcctccagttcctctccaactagtccaggaagtttcagaggattaaagatttctgctcatggcagatcttcttccaatgtaaacggtggacctgagcttgaccgttgcataagtcctgaaggtgtgaatggaaacagatgctctgaatcatcaactcttcttgagaaatacaaaattggaaaggtcattggtgatggcaattttgcagtagtcaaagagtgtatagacaggtccactggaaaggagtttgccctaaagattatagacaaagccaaatgttgtggaaaggaacacctgattgagaatgaagtgtcaatactgcgccgagtgaaacatcccaatatcattatgctggtcgaggagatggaaacagcaactgagctctttctggtgatggaattggtcaaaggtggagatctctttgatgcaattacttcgtcgaccaagtacactgagagagatggcagtgccatggtgtacaacttagccaatgccctcaggtatctccatggcctcagcatcgtgcacagagacatcaaaccagagaatctcttggtgtgtgaatatcctgatggaaccaagtctttgaaactgggagactttgggcttgcgactgtggtagaaggccctttatacacagtctgtggcacacccacttatgtggctccagaaatcattgctgaaactggctatggcctgaaggtggacatttgggcagctggtgtgatcacatacatacttctctgtggattcccaccattccgaagtgagaacaatctccaggaagatctcttcgaccagatcttggctgggaagctggagtttccggccccctactgggataacatcacggactctgccaaggaattaatcagtcaaatgcttcaggtaaatgttgaagctcggtgtaccgcgggacaaatcctgagtcacccctgggtgtcagatgatgcctcccaggagaataacatgcaagctgaggtgacaggtaaactaaaacagcactttaataatgcgctccccaaacagaacagcactaccaccggggtctccgtcatcatggtccaaggccatgaacacggctctagataa

SEQ ID NO: 127988 - DNA, 402 bp, Homo sapiens
  Payload ID: 5061
  Gene Symbol: DCLK2
  Gene Name: doublecortin-like kinase 2
  ENST ID: ENST00000634233
  CDS Start-End: 1-237
cgaagtgagaacaatctccaggaagatctcttcgaccagatcttggctgggaagctggagtttccggccccctactgggataacatcacggactctgccaaggatgatgcctcccaggagaataacatgcaagctgaggtgacaggtaaactaaaacagcactttaataatgcgctccccaaacagaacagcactaccaccggggtctccgtcatcatgtttgatttgacagtttgagaggcacctcagagtttccttctttaccccgctgagacagtgggagagcctgaagcagaatcctgaacacggctctagataaggaggggcagattttctgcagcaagcactgtcaagacagcggcaggcctgggatggagcccatctctccagttcctccctcag

SEQ ID NO: 127989 - DNA, 5344 bp, Homo sapiens
  Payload ID: 5062
  Gene Symbol: DCLK3
  Gene Name: doublecortin-like kinase 3
  Uniprot ID: Q9C098
  ENST ID: ENST00000416516
  CDS Start-End: 492-2438
gactcttgttggtgtttcatgggcagcaaaactggccctttttatctcagctgtagatccttgaaggacagcaaggcctatgtgaccattctctaaaatatttaagctcgagaatcacagagcggaagctgcaaggctcctggctgcctgccagccgagggaatctggagaaaccattcctggggccgcgtggccccgtcgtgcccttgttctgccctcggaatggccttcactcagcacatcctgagaacagccctctgaagcccagggtcgtgaccgtagtgaagctgggtgggcagcgcccccgaaagatcactctgctcctcaacaggcgatcagtgcagacgttcgagcagctcttagctgacatctcagaagccttgggctctcccagatggaagaatgaccgtgtgaggaaactgtttaacctcaagggcagggaaatcaggagcgtctctgatttcttcagggaaggggatgctttcatagctatgggcaaagaaccactgacactgaagagcattcaggtggctgtagaagaactgtaccccaacaaagcccgggccctgacactggcccagcacagccgtgccccttctccaaggctgaggagcaggctgtttagcaaggctctgaaaggagaccaccgctgtggggagaccgagacccccaagagctgcagcgaagttgcaggatgcaaggcagccatgaggcaccaggggaagatccccgaggagctttcactagatgacagagcgaggacccagaagaagtgggggagggggaaatgggagccagaacccagtagcaagccccccagggaagccactctggaagagaggcacgcaaggggagagaagcatcttggggtggagattgaaaagacctcgggtgaaattatcagatgcgagaagtgcaagagagagagggagctccagcagagcctggagcgtgagaggctttctctggggaccagtgagctggatatggggaagggcccaatgtatgatgtggagaagctggtgaggaccagaagctgcaggaggtctcccgaggcaaatcctgcaagtggggaggaagggtggaagggtgacagccacaggagcagccccaggaatcccactcaagagctgaggagacccagcaagagcatggacaagaaagaggacagaggcccagaggatcaagaaagccatgctcagggagcagccaaggccaagaaggaccttgtggaagttcttcctgtcacagaggaggggctgagggaggtgaagaaggacaccaggcccatgagcaggagcaaacatggtggctggctcctgagagagcaccaggcgggctttgagaagctccgcaggacccgaggagaagagaaggaggcagagaaggagaaaaagccatgtatgtctggaggcagaaggatgactctcagagatgaccaacctgcaaagctagaaaaggagcccaagacgaggccagaagagaacaagccagagcggcccagcggtcggaagccacggcccatgggcatcattgccgccaatgtggaaaagcattatgagactggccgggtcattggggatgggaactttgctgtcgtgaaggagtgcagacaccgcgagaccaggcaggcctatgcgatgaagatcattgacaagtccagactcaagggcaaggaggacatggtggacagtgagatcttgatcatccagagcctctctcaccccaacatcgtgaaattgcatgaagtctacgaaacagacatggaaatctacctgatcctggagtacgtgcagggaggagacctttttgacgccatcatagaaagtgtgaagttcccggagcccgatgctgccctcatgatcatggacttatgcaaagccctcgtccacatgcacgacaagagcattgtccaccgggacctcaagccggaaaaccttttggttcagcgaaatgaggacaaatctactaccttgaaattggctgattttggacttgcaaagcatgtggtgagacctatatttactgtgtgtgggaccccaacttacgtagctcccgaaattctttctgagaaaggttatggactggaggtggacatgtgggctgctggcgtgatcctctatatcctgctgtgtggctttcccccattccgcagccctgagagggaccaggacgagctctttaacatcatccagctgggccactttgagttcctccccccttactgggacaatatctctgatgctgctaaagatctggtgagccggttgctggtggtagaccccaaaaagcgctacacagctcatcaggttcttcagcacccctggatcgaaacagctggcaagaccaatacagtgaaacgacagaagcaggtgtcccccagcagcgagggtcacttccggagccagcacaagagggttgtggagcaggtatcatagtcaccaccttgggaatctgtccagcccccagttctgctcaaggacagagaaaaggatagaagtttgagagaaaaacaatgaaagaggcttcttcacataattggtgaatcagagggagagacactgagtatattttaaagcatattaaaaaaattaagtcaatgttaaatgtcacaacatatttttagatttgtatatttaaagcctttaatacatttttggggggtaagcattgtcatcagtgaggaattttggtaataatgatgtgttttgcttcccctttgtaaccaagtttattctgtactacaggagtggtgcttaccagggtctaaactccccctgtgagattaataaggtgcattgtggtctttctgtgttaataaaatgtgctctgaataacagaagtgggcctgtattctgattacttctttgtgctggtgatgacagcacaaaaattcaaaaatgaattatagttcaggcatatctcctgaagctgatatgactacatatagatgtgaaggacacttgattagttgacaagacctgtttatttaggatgcactaatcttggtctcttgcatttcagtcttaccaaaaatcagttttggtgcagtctgagacatggaaagaaaaaaaacaaaccattgaatcattcttgctcctgcaataccgttatactgcttttcagccccaattatccctgagcctgagtcatttctatgtgaagtcaggcgctcaggctgtgaccgtgttaacattttcagatcacgagggagccatttagtacattaatatgtcagaaatgcagtaaatggattacactggggctcgaaggagctcagagttcaagcacattcctacctgcagggcatacacccaggacacattccagatttctgtgctgaaatattggtctttgcagatgattctgggagtctgtgtgagctgacagcaagacatatcctaatatttcccaaattgaccttcctagattatgaatgacctggttagtaggccacaaaatctagtcaagagtgtggctttttcacgtctaccttccctaacagttttggagccatctgggcggaggcgtgtgttagttaggaaaaccggaatagtactagagaattcaacataaggaattgcttaatcaggttttggaaaatggaagaagcacaaaggaggctctggtataatttagagatagtaactgcaggaagtggctcctgttctttggagaaccaagggaagaagttggggttattagaacctattgaaggagaaatttcttgtagtggacactgtagtatgccactcaggtcctccaagactgaagggaataagctccttggggtgctgctggatgatggctctcagctttcagccctctacaggaattaccctccactggaagagacacctttcagctccctcctgaagcaggctatatcaaatgactagtccctgtagggtatggtggctcagctcctttgtcccaaacagggacaatactgaagggccatccaactacggacctgcccatgggggttggctgaactgttggttgagactgcatcatagcccactttctcccttgcccaatcctgcttctttcctttcccttccagaggtaatgatcctgagaccactccctaataagccttttggatgctaatctggattttagagttggcttctcgggaaaccaaaccgttgacaccccctagaaacttgaaaccacatcaaagaagtaccagctggtgctttaacctcagaagcttggagaaggggccctgtggagcagggactcagacccctgaggagtgggtgctgcccagcaggcagtgtaatgggactcattctgaacacgtgaaagaggctggaagctggattcagttgctactagaacatattttgataaagacaccagtaaccttcatttcactaaatccaaaagagaattttcaatcctcaaattagcatcacttgaccctattgaccactttctctttgaataatttctcctgttgactaccatgatgtcacatttttctggtttttttttctcctatacctttggatctcttgtatagattcagtcttcttccagttgctaaaagctgtagttgcatccttagtggctagggaaatgcaaattaaaatcacaatgaaatatcactatacacccattagaatagctaaaattaaatggctaaaatgagaagactgaccttaccaactactagcgaggatgcagagtgactggaacttcccgtacattgctgctgggagtataaaatgggacttctcctttggagaatggtttggtagttcctttaaaagttaaacatgtacctaccatatgatattccacttctagatgtttacccagcagaaattcaagcatatgtcctatgaagacttcacaatatttataggtgctttatttgtagtagccccaaagtggaaacatcttgaatgggcatgatttggtgcatggataaacagattgtatatccacacaatgaataacagccacaaaaaagggatgaactattcatacacgaacaacatggatggactgccaaagaattaggctgaatgaaagaagaaaaaaaagactacattttgattatttcatttacatactattccagaaaatacaagtgaatctatagtgacagaaagtgatcagggggtttgctggagatggaaatggggagaggagggacagaaggattgcaagggaacacttggtaactttggggaagagggacgtgttcattttcttgaatgtaataatggatttatgggggtatatatgtcaaaacttaccaaattgtacacttttgttatgtgcagtttattgtgtgtcaattatacctcaataaagttgttaaaaatat

SEQ ID NO: 127990 - DNA, 2222 bp, Homo sapiens
  Payload ID: 5063
  Gene Symbol: DMRT1
  Gene Name: doublesex and mab-3 related transcription factor 1
  Uniprot ID: Q9Y5R6
  ENST ID: ENST00000382276
  CDS Start-End: 150-1271
cctcgccactccagctgcgcctccggctgcagcgcacacgtctcctgcgcctcctcctccggagcgtcgctgtccgtcgggttcatccctcgcagcagtctccaggcgagagagggggccagagtgctcgcacttctcctaggggcaccatgcccaacgacgaggcattcagcaagccctctacaccgtcggaagcccctcacgcccccggggtaccgccgcagggcagagccgggggctttggcaaagcgtctggggcgctagtgggggcggccagcggctcgagcgccgggggcagcagcagaggaggcggctccggctccggggcgtcggacctgggtgccgggagcaagaagtccccgcggctgcccaagtgcgcacgctgcaggaaccacggctacgcctcgccgctcaagggccacaagcgcttctgcatgtggcgcgactgccagtgcaagaagtgcaacctgatcgccgagaggcagcgcgtgatggccgcgcaggtggccctgagaaggcagcaggcccaggaggaggaattgggtatcagccaccccatcccactgcccagtgcggccgagctgcttgtcaaaagagagaacaatggcagtaacccgtgcctcatgactgagtgcagtggcacctctcagccaccgccggccagtgtccccaccactgcagcttcagagggacgtatggtcatccaggatattcctgctgtcaccagcagagggcatgtggagaacacacctgacctggtttcagactccacctactacagcagcttctaccagccgtctctgtttccttattacaacaatctatacaactgcccgcagtactccatggccttggctgctgattctgcttctggggaggtgggaaatcccctcgggggatcccctgtgaagaacagccttcggggcctccccggaccttatgtgcctggtcagacaggaaaccagtggcagatgaagaacatggagaaccgccatgcaatgagctcccagtacaggatgcattcttactacccgcctccctcttacctgggccagagcgtgccccagttcttcacttttgaggatgctccctcttacccggaagccagggcgagcgtattctcgccgcccagcagtcaagattctggcttggtttccctctcgagcagctctcctattagtaacaagagcacaaaggcagtgcttgaatgtgagcctgcgtcggagcccagcagcttcacagtcactcccgtcatcgaggaggacgagtgagcagtgcctgctgccgatggcggttcacttggagtaacaggcttattccactttccatggggtttgttaatattttgcattgactcatactatcttaactgttgagaacgtatttggtttatattccttagagtttagtccagaggctgtaacacatttgtaatactttagggtccgtgactaccatctgcatggtttaagtgctttactcacggagtttaaataatagtgttcatttttttaatgacactggtttcatgtagttttcaagaaataaaagaattcattcaagtgaagccatttgtgtgcctctaaatgagtcatctaattagatgttacttttagttttaaaatgaaatcttaggtgccttaggggttttttttttttttaagtattttttaaaaacctgcaaagatataaatttagccaagttacctgacgggtgagaagaaaagagcaggcaaaattagtgatttttttagaagtctgctaaatggatatattgtgtgtgttgctgttggaaatagccccaccccatcctcccaatccaaaacgtaactgaaatataatcagaaacattaaagcctgtaaaaaaaaattgctgcgtttttggtaaagggtgtaatttgtaaacagtgcaatttaaagtgaccttagtgatgcagagttcctgagtggtgtttgtagaatgagtttatcatacattctttctactactggaaaaaaatggatgcagtctggactgttgtaaccttaggttgtaatctgatttggaaataagtacatctttaaaagttgctacagatttgagttcatgattttgttaaaaattgctatggagtactttgttatataacagaagccatcctgaaatgaaactagtctaaaaaaattcattgttctacttagttgcagctgtacctgaaataaaaatgttattgatgactgaa

SEQ ID NO: 127991 - DNA, 1385 bp, Homo sapiens
  Payload ID: 5063
  Gene Symbol: DMRT1
  Gene Name: doublesex and mab-3 related transcription factor 1
  ENST ID: ENST00000569227
  CDS Start-End: 362-1009
agagttgcgggcttcgctcggctcggggttccccacgatctctcaccctgtgtttcggcggagttgcgggggttccctctgctcccgggtccctgagatccctgatcccgctctcagggcagggaattccggggttcgcccctctgggcttccccgcgatcccagagcccgcgttccaacagaattgggagggtttattgcgctagaggagtcttcaggatcttcgctcccgccctccgaggtggccctgagaaggcagcaggcccaggaggaggaattgggtatcagccaccccatcccactgcccagtgcggccgagctgcttgtcaaaagagagaacaatggcagtaacccgtgcctcatgactgagtgcagtggcacctctcagccaccgccggccagtgtccccaccactgcagcttcagagggacgtatggtcatccaggatattcctgctgtcaccagcagagggcatgtggagaacacacctgacctggtttcagactccacctactacagcagcttctaccagccgtctctgtttccttattacaacaatctatacaactgcccgcagtactccatggccttggctgctgattctgcttctggggaggtgggaaatcccctcgggggatcccctgtgaagaacagccttcggggcctccccggaccttatgtgcctggtcagacaggaaaccagtggcagatgaagaacatggagaaccgccatgcaatgagctcccagtacaggatgcattcttactacccgcctccctcttacctgggccagagcgtgccccagttcttcacttttgaggatgctccctcttacccggaagccagggcgagcgtattctcgccgcccagcagtcaagattctggcttggtttccctctcgagcagctctcctattagtaacaagagcacaaaggcagtgcttgaatgtgagcctgcgtcggagcccagcagcttcacagtcactcccgtcatcgaggaggacgagtgagcagtgcctgctgccgatggcggttcacttggagtaacaggcttattccactttccatggggtttgttaatattttgcattgactcatactatcttaactgttgagaacgtatttggtttatattccttagagtttagtccagaggctgtaacacatttgtaatactttagggtccgtgactaccatctgcatggtttaagtgctttactcacggagtttaaataatagtgttcatttttttaatgacactggtttcatgtagttttcaagaaataaaagaattcattcaagtgaagccatttgtgtgcctctaaatgagtcatctaattagatgttacttttagttttaaaatgaaatcttaggtgccttagggg

SEQ ID NO: 127992 - DNA, 2459 bp, Homo sapiens
  Payload ID: 5064
  Gene Symbol: DMRT2
  Gene Name: doublesex and mab-3 related transcription factor 2
  Uniprot ID: Q9Y5R5
  ENST ID: ENST00000259622
  CDS Start-End: 1-681
atggccgacccgcaggctggctccgcggccggggactgggagatcgatgtcgagagcctggagctggaagaggacgtctgcggggcgccgcggtccacgccccccgggcccagcccgccgccggcggacggggactgcgaggacgacgaagatgacgacggggtggacgaagacgcggaagaagagggcgacggcgaggaggcaggcgcgtcccccgggatgcccggccagccggagcagcgggggggaccgcagccgaggccgccgctcgcgcctcaggcctcacccgccggcaccggtccccgagagcgctgcactcccgcgggcggcggcgcggagccgcgcaagctgagccgcacgcccaagtgcgcgcgctgccgcaaccacggcgtggtgtcctgcctgaagggccacaagcgcttctgtcgctggcgcgactgccagtgcgccaactgcctgctggtggtggagcggcagcgcgtcatggccgcccaggtggcgctccggaggcagcaggccaccgaggacaagaaggggctttccgggaaacagaataatttcgagcgcaaagctgtgtaccagaggcaagtcagagcccccagtttgctggccaaaagcattttagaagttctccttggattattctacagctattatgtgtacataatgaaccatctttagaaaataaaagtgacatcagctctaggtatagatatattttttaataatgaaaaaagatgacatggataataataaaacattgattgatacaagataaatagtcttgtctcttaatgcgtagggggcctgggaagaatattaaaattttaatcaataaagtatgtctgttgaagcaagcaagcaaacaaatccataacaaccacaacaagcaacaagaacaagaacaacaacaagaagaagttgcagtatggatatctttcaccctcccaggaaactctttcaaacctaatctgtacttttgcatctgtataaaaatatcagtgagatggaactgtaaataattgttctgctgatctgtagtgttgctgttaccttctgggtttccacatttttattccgtagatgttaatctctttcatgtgcaatctttgcttcttgtaggctatcgccccattccagcggagacttatgtaggagggaccttccctctacctcccccagttagtgacaggatgaggaaaagaagagcctttgctgataaagagttggagaacattatgctggagagagaatataaagaaagggagatgttggaaacttctcaagctgctgctctgtttctgcccaaccgcatggtgcctggacctgactacaattcctacaaaagtgcctacagccccagcccagtggaaccaccaagcaaggacttctgtaattttttgcccacctgccttgatttaaccatgcagtattcagggtctgggaatatggaactaatttcttctaatgtcagcgtggccacaacttatagacagtatcccttgtcctcaagatttttagtttggcccaagtgtggccccattagcgacaccctcctctaccagcaatgcctgctaaatgccaccacctcagttcaagccctgaagcctggggccagctgggacttgaagggagcacgagtccaggatggactcagtgcagagcaggacatgatgccatcgaaattggaaggttccctggtgctgcctcacactcctgagatccagaccacgagaagtgaccttcagggtcatcaggctgtcccagagaggtccgcgttctccccaccccgacggaatttctctcccattgttgacacggactccctggcagctcaagggcatgtcttaacgaagatcagcaaagaaaacaccaggcaccctctgccacttagacataatccattccactcattattccagcaaacacttactgacaaatcgggtcctgagttgaaaacaccatttgtcaaagaggcctttgaagagacccctaagaaacacagagagtgtttagttaaggacaaccagaagtacacatttacaatagatagatgtgcaaaagacctttttgtagccaaacaagttggaacaaaactctcggtgaatgaaccactgtcattttctgttgagtctattcttaagaggccttcatctgccatcactcgtgtctctcagtgaaaggctgcttaaacagaaagctggattttctgcagtcttagagcattatagccatttgctactttttttaaaagttaagatgtttgtgtaaagaaatttctaatgtaaagatgatgattttgaaaaattttatatattcctaatatgcatgtactttttcttatcacatatatttaaacttacagatggaaattgcccaatgtgcaaattgttaagtaccacactttacacagcatttcaaaaagcaataaaattgacactgtcttctcaaagacccaa

SEQ ID NO: 127993 - DNA, 1495 bp, Homo sapiens
  Payload ID: 5064
  Gene Symbol: DMRT2
  Gene Name: doublesex and mab-3 related transcription factor 2
  ENST ID: ENST00000302441
  CDS Start-End: 1-1218
atggccgacccgcaggctggctccgcggccggggactgggagatcgatgccaccgaggacaagaaggggctttccgggaaacagaataatttcgagcgcaaagctgtgtaccagaggcaagtcagagcccccagtttgctggccaaaagcattttagaaggctatcgccccattccagcggagacttatgtaggagggaccttccctctacctcccccagttagtgacaggatgaggaaaagaagagcctttgctgataaagagttggagaacattatgctggagagagaatataaagaaagggagatgttggaaacttctcaagctgctgctctgtttctgcccaaccgcatggtgcctggacctgactacaattcctacaaaagtgcctacagccccagcccagtggaaccaccaagcaaggacttctgtaattttttgcccacctgccttgatttaaccatgcagtattcagggtctgggaatatggaactaatttcttctaatgtcagcgtggccacaacttatagacagtatcccttgtcctcaagatttttagtttggcccaagtgtggccccattagcgacaccctcctctaccagcaatgcctgctaaatgccaccacctcagttcaagccctgaagcctggggccagctgggacttgaagggagcacgagtccaggatggactcagtgcagagcaggacatgatgccatcgaaattggaaggttccctggtgctgcctcacactcctgagatccagaccacgagaagtgaccttcagggtcatcaggctgtcccagagaggtccgcgttctccccaccccgacggaatttctctcccattgttgacacggactccctggcagctcaagggcatgtcttaacgaagatcagcaaagaaaacaccaggcaccctctgccacttagacataatccattccactcattattccagcaaacacttactgacaaatcgggtcctgagttgaaaacaccatttgtcaaagaggcctttgaagagacccctaagaaacacagagagtgtttagttaaggacaaccagaagtacacatttacaatagatagatgtgcaaaagacctttttgtagccaaacaagttggaacaaaactctcggtgaatgaaccactgtcattttctgttgagtctattcttaagaggccttcatctgccatcactcgtgtctctcagtgaaaggctgcttaaacagaaagctggattttctgcagtcttagagcattatagccatttgctactttttttaaaagttaagatgtttgtgtaaagaaatttctaatgtaaagatgatgattttgaaaaattttatatattcctaatatgcatgtactttttcttatcacatatatttaaacttacagatggaaattgcccaatgtgcaaattgttaagtaccacactttacacagcatttcaaaaagcaataaaattgacactgtcttctcaaagaccc

SEQ ID NO: 127994 - DNA, 1965 bp, Homo sapiens
  Payload ID: 5064
  Gene Symbol: DMRT2
  Gene Name: doublesex and mab-3 related transcription factor 2
  Uniprot ID: Q9Y5R5
  ENST ID: ENST00000358146
  CDS Start-End: 1-1686
atggccgacccgcaggctggctccgcggccggggactgggagatcgatgtcgagagcctggagctggaagaggacgtctgcggggcgccgcggtccacgccccccgggcccagcccgccgccggcggacggggactgcgaggacgacgaagatgacgacggggtggacgaagacgcggaagaagagggcgacggcgaggaggcaggcgcgtcccccgggatgcccggccagccggagcagcgggggggaccgcagccgaggccgccgctcgcgcctcaggcctcacccgccggcaccggtccccgagagcgctgcactcccgcgggcggcggcgcggagccgcgcaagctgagccgcacgcccaagtgcgcgcgctgccgcaaccacggcgtggtgtcctgcctgaagggccacaagcgcttctgtcgctggcgcgactgccagtgcgccaactgcctgctggtggtggagcggcagcgcgtcatggccgcccaggtggcgctccggaggcagcaggccaccgaggacaagaaggggctttccgggaaacagaataatttcgagcgcaaagctgtgtaccagaggcaagtcagagcccccagtttgctggccaaaagcattttagaaggctatcgccccattccagcggagacttatgtaggagggaccttccctctacctcccccagttagtgacaggatgaggaaaagaagagcctttgctgataaagagttggagaacattatgctggagagagaatataaagaaagggagatgttggaaacttctcaagctgctgctctgtttctgcccaaccgcatggtgcctggacctgactacaattcctacaaaagtgcctacagccccagcccagtggaaccaccaagcaaggacttctgtaattttttgcccacctgccttgatttaaccatgcagtattcagggtctgggaatatggaactaatttcttctaatgtcagcgtggccacaacttatagacagtatcccttgtcctcaagatttttagtttggcccaagtgtggccccattagcgacaccctcctctaccagcaatgcctgctaaatgccaccacctcagttcaagccctgaagcctggggccagctgggacttgaagggagcacgagtccaggatggactcagtgcagagcaggacatgatgccatcgaaattggaaggttccctggtgctgcctcacactcctgagatccagaccacgagaagtgaccttcagggtcatcaggctgtcccagagaggtccgcgttctccccaccccgacggaatttctctcccattgttgacacggactccctggcagctcaagggcatgtcttaacgaagatcagcaaagaaaacaccaggcaccctctgccacttagacataatccattccactcattattccagcaaacacttactgacaaatcgggtcctgagttgaaaacaccatttgtcaaagaggcctttgaagagacccctaagaaacacagagagtgtttagttaaggacaaccagaagtacacatttacaatagatagatgtgcaaaagacctttttgtagccaaacaagttggaacaaaactctcggtgaatgaaccactgtcattttctgttgagtctattcttaagaggccttcatctgccatcactcgtgtctctcagtgaaaggctgcttaaacagaaagctggattttctgcagtcttagagcattatagccatttgctactttttttaaaagttaagatgtttgtgtaaagaaatttctaatgtaaagatgatgattttgaaaaattttatatattcctaatatgcatgtactttttcttatcacatatatttaaacttacagatggaaattgcccaatgtgcaaattgttaagtaccacactttacacagcatttcaaaaagcaataaaattgacactgtcttctcaaagacccaa

SEQ ID NO: 127995 - DNA, 2292 bp, Homo sapiens
  Payload ID: 5064
  Gene Symbol: DMRT2
  Gene Name: doublesex and mab-3 related transcription factor 2
  Uniprot ID: Q9Y5R5
  ENST ID: ENST00000382251
  CDS Start-End: 330-2015
gccagtggcgctgcgctgaatgcaactgcgcgcgcccgccgggtgagccagcgatctgagccaggcgggggcggcccgacctttcccgcccagcctgggtcagaggaagccgaaagcggcctcagcaagtgggttcgttccgggcctccagctatcagctcccgatctcgtgtttgagggtagcgaccccgatttctgtttgcatgcacagccagcagccctagcgccagatcctaaagctggatatcttttaactgggctaccagcccgggcctcaaagttttgagtgagggccgccaggctcaggccccagcgaagccccgagcgccatggccgacccgcaggctggctccgcggccggggactgggagatcgatgtcgagagcctggagctggaagaggacgtctgcggggcgccgcggtccacgccccccgggcccagcccgccgccggcggacggggactgcgaggacgacgaagatgacgacggggtggacgaagacgcggaagaagagggcgacggcgaggaggcaggcgcgtcccccgggatgcccggccagccggagcagcgggggggaccgcagccgaggccgccgctcgcgcctcaggcctcacccgccggcaccggtccccgagagcgctgcactcccgcgggcggcggcgcggagccgcgcaagctgagccgcacgcccaagtgcgcgcgctgccgcaaccacggcgtggtgtcctgcctgaagggccacaagcgcttctgtcgctggcgcgactgccagtgcgccaactgcctgctggtggtggagcggcagcgcgtcatggccgcccaggtggcgctccggaggcagcaggccaccgaggacaagaaggggctttccgggaaacagaataatttcgagcgcaaagctgtgtaccagaggcaagtcagagcccccagtttgctggccaaaagcattttagaaggctatcgccccattccagcggagacttatgtaggagggaccttccctctacctcccccagttagtgacaggatgaggaaaagaagagcctttgctgataaagagttggagaacattatgctggagagagaatataaagaaagggagatgttggaaacttctcaagctgctgctctgtttctgcccaaccgcatggtgcctggacctgactacaattcctacaaaagtgcctacagccccagcccagtggaaccaccaagcaaggacttctgtaattttttgcccacctgccttgatttaaccatgcagtattcagggtctgggaatatggaactaatttcttctaatgtcagcgtggccacaacttatagacagtatcccttgtcctcaagatttttagtttggcccaagtgtggccccattagcgacaccctcctctaccagcaatgcctgctaaatgccaccacctcagttcaagccctgaagcctggggccagctgggacttgaagggagcacgagtccaggatggactcagtgcagagcaggacatgatgccatcgaaattggaaggttccctggtgctgcctcacactcctgagatccagaccacgagaagtgaccttcagggtcatcaggctgtcccagagaggtccgcgttctccccaccccgacggaatttctctcccattgttgacacggactccctggcagctcaagggcatgtcttaacgaagatcagcaaagaaaacaccaggcaccctctgccacttagacataatccattccactcattattccagcaaacacttactgacaaatcgggtcctgagttgaaaacaccatttgtcaaagaggcctttgaagagacccctaagaaacacagagagtgtttagttaaggacaaccagaagtacacatttacaatagatagatgtgcaaaagacctttttgtagccaaacaagttggaacaaaactctcggtgaatgaaccactgtcattttctgttgagtctattcttaagaggccttcatctgccatcactcgtgtctctcagtgaaaggctgcttaaacagaaagctggattttctgcagtcttagagcattatagccatttgctactttttttaaaagttaagatgtttgtgtaaagaaatttctaatgtaaagatgatgattttgaaaaattttatatattcctaatatgcatgtactttttcttatcacatatatttaaacttacagatggaaattgcccaatgtgcaaattgttaagtaccacactttacacagcatttcaaaaagcaataaaattgacactgtcttctcaaagaccc

SEQ ID NO: 127996 - DNA, 2367 bp, Homo sapiens
  Payload ID: 5064
  Gene Symbol: DMRT2
  Gene Name: doublesex and mab-3 related transcription factor 2
  Uniprot ID: Q9Y5R5
  ENST ID: ENST00000382255
  CDS Start-End: 330-1010
gccagtggcgctgcgctgaatgcaactgcgcgcgcccgccgggtgagccagcgatctgagccaggcgggggcggcccgacctttcccgcccagcctgggtcagaggaagccgaaagcggcctcagcaagtgggttcgttccgggcctccagctatcagctcccgatctcgtgtttgagggtagcgaccccgatttctgtttgcatgcacagccagcagccctagcgccagatcctaaagctggatatcttttaactgggctaccagcccgggcctcaaagttttgagtgagggccgccaggctcaggccccagcgaagccccgagcgccatggccgacccgcaggctggctccgcggccggggactgggagatcgatgtcgagagcctggagctggaagaggacgtctgcggggcgccgcggtccacgccccccgggcccagcccgccgccggcggacggggactgcgaggacgacgaagatgacgacggggtggacgaagacgcggaagaagagggcgacggcgaggaggcaggcgcgtcccccgggatgcccggccagccggagcagcgggggggaccgcagccgaggccgccgctcgcgcctcaggcctcacccgccggcaccggtccccgagagcgctgcactcccgcgggcggcggcgcggagccgcgcaagctgagccgcacgcccaagtgcgcgcgctgccgcaaccacggcgtggtgtcctgcctgaagggccacaagcgcttctgtcgctggcgcgactgccagtgcgccaactgcctgctggtggtggagcggcagcgcgtcatggccgcccaggtggcgctccggaggcagcaggccaccgaggacaagaaggggctttccgggaaacagaataatttcgagcgcaaagctgtgtaccagaggcaagtcagagcccccagtttgctggccaaaagcattttagaagttctccttggattattctacagctattatgtgtacataatgaaccatctttagaaaataaaagtgacatcagctctaggctatcgccccattccagcggagacttatgtaggagggaccttccctctacctcccccagttagtgacaggatgaggaaaagaagagcctttgctgataaagagttggagaacattatgctggagagagaatataaagaaagggagatgttggaaacttctcaagctgctgctctgtttctgcccaaccgcatggtgcctggacctgactacaattcctacaaaagtgcctacagccccagcccagtggaaccaccaagcaaggacttctgtaattttttgcccacctgccttgatttaaccatgcagtattcagggtctgggaatatggaactaatttcttctaatgtcagcgtggccacaacttatagacagtatcccttgtcctcaagatttttagtttggcccaagtgtggccccattagcgacaccctcctctaccagcaatgcctgctaaatgccaccacctcagttcaagccctgaagcctggggccagctgggacttgaagggagcacgagtccaggatggactcagtgcagagcaggacatgatgccatcgaaattggaaggttccctggtgctgcctcacactcctgagatccagaccacgagaagtgaccttcagggtcatcaggctgtcccagagaggtccgcgttctccccaccccgacggaatttctctcccattgttgacacggactccctggcagctcaagggcatgtcttaacgaagatcagcaaagaaaacaccaggcaccctctgccacttagacataatccattccactcattattccagcaaacacttactgacaaatcgggtcctgagttgaaaacaccatttgtcaaagaggcctttgaagagacccctaagaaacacagagagtgtttagttaaggacaaccagaagtacacatttacaatagatagatgtgcaaaagacctttttgtagccaaacaagttggaacaaaactctcggtgaatgaaccactgtcattttctgttgagtctattcttaagaggccttcatctgccatcactcgtgtctctcagtgaaaggctgcttaaacagaaagctggattttctgcagtcttagagcattatagccatttgctactttttttaaaagttaagatgtttgtgtaaagaaatttctaatgtaaagatgatgattttgaaaaattttatatattcctaatatgcatgtactttttcttatcacatatatttaaacttacagatggaaattgcccaatgtgcaaattgttaagtaccacactttacacagcatttcaaaaagcaataaaattgacactgtcttctcaaaga

SEQ ID NO: 127997 - DNA, 1244 bp, Homo sapiens
  Payload ID: 5064
  Gene Symbol: DMRT2
  Gene Name: doublesex and mab-3 related transcription factor 2
  Uniprot ID: Q9Y5R5
  ENST ID: ENST00000412350
  CDS Start-End: 466-1146
ccagtggcgctgcgctgaatgcaactgcgcgcgcccgccgggtgagccagcgatctgagccaggcgggggcggcccgacctttcccgcccagcctgggtcagaggaagccgaaagcggcctcagcaaggtgaggcgcccgaggctgcagaagaccgagcagaactttgcagagttcgggatgtgctgggctaggtcgctgaggacttgactggcttcctccctccttccctccacctaccttctccctccccctccaccatccagtgggttcgttccgggcctccagctatcagctcccgatctcgtgtttgagggtagcgaccccgatttctgtttgcatgcacagccagcagccctagcgccagatcctaaagctggatatcttttaactgggctaccagcccgggcctcaaagttttgagtgagggccgccaggctcaggccccagcgaagccccgagcgccatggccgacccgcaggctggctccgcggccggggactgggagatcgatgtcgagagcctggagctggaagaggacgtctgcggggcgccgcggtccacgccccccgggcccagcccgccgccggcggacggggactgcgaggacgacgaagatgacgacggggtggacgaagacgcggaagaagagggcgacggcgaggaggcaggcgcgtcccccgggatgcccggccagccggagcagcgggggggaccgcagccgaggccgccgctcgcgcctcaggcctcacccgccggcaccggtccccgagagcgctgcactcccgcgggcggcggcgcggagccgcgcaagctgagccgcacgcccaagtgcgcgcgctgccgcaaccacggcgtggtgtcctgcctgaagggccacaagcgcttctgtcgctggcgcgactgccagtgcgccaactgcctgctggtggtggagcggcagcgcgtcatggccgcccaggtggcgctccggaggcagcaggccaccgaggacaagaaggggctttccgggaaacagaataatttcgagcgcaaagctgtgtaccagaggcaagtcagagcccccagtttgctggccaaaagcattttagaagttctccttggattattctacagctattatgtgtacataatgaaccatctttagaaaataaaagtgacatcagctctaggtatagatatattttttaataatgaaaaaagatgacatggataataataaaacattgattgatacaagataaa

SEQ ID NO: 127998 - DNA, 2190 bp, Homo sapiens
  Payload ID: 5064
  Gene Symbol: DMRT2
  Gene Name: doublesex and mab-3 related transcription factor 2
  ENST ID: ENST00000635183
  CDS Start-End: 670-1350
attgatgtactcttgcaggagaaagaaggatgtcgctgtacgccccgaaagagaggcatcatttttacgcccagtttggattaatgattgattgagtcgcagaaatgcttgtgatgctgatagaggccaatactggtctttctgatctcttcctcgtcgtttattaccttctcttgtggacaacgcattcctaagaatgtatctctgcttgtttcccagtccgcgagataaatggtgacttctctcttgcaggcaccgtcatacctcgggtttagattctggacaggcgagccggctgcaccgaaggcccggtaggcggactctggcggagcgcttcagagagaagagtgtagaccgcgggaggcggagggctccctgccagcgtgcctcggccaatcagtattcacaccgcctgacaaccggccaatcagaggacgtaaagctccggggcctgagcggacagtactaggaaggggagcgcagtctgcagactgaagccagtggcgctgcgctgaatgcaactgcgcgcgcccgccgggtgagccagcgatctgagccaggcgggggcggcccgacctttcccgcccagcctgggtcagaggaagccgaaagcggcctcagcaagagtgagggccgccaggctcaggccccagcgaagccccgagcgccatggccgacccgcaggctggctccgcggccggggactgggagatcgatgtcgagagcctggagctggaagaggacgtctgcggggcgccgcggtccacgccccccgggcccagcccgccgccggcggacggggactgcgaggacgacgaagatgacgacggggtggacgaagacgcggaagaagagggcgacggcgaggaggcaggcgcgtcccccgggatgcccggccagccggagcagcgggggggaccgcagccgaggccgccgctcgcgcctcaggcctcacccgccggcaccggtccccgagagcgctgcactcccgcgggcggcggcgcggagccgcgcaagctgagccgcacgcccaagtgcgcgcgctgccgcaaccacggcgtggtgtcctgcctgaagggccacaagcgcttctgtcgctggcgcgactgccagtgcgccaactgcctgctggtggtggagcggcagcgcgtcatggccgcccaggtggcgctccggaggcagcaggccaccgaggacaagaaggggctttccgggaaacagaataatttcgagcgcaaagctgtgtaccagaggcaagtcagagcccccagtttgctggccaaaagcattttagaagttctccttggattattctacagctattatgtgtacataatgaaccatctttagaaaataaaagtgacatcagctctaggctatcgccccattccagcggagacttatgtaggagggaccttccctctacctcccccagttagtgacaggatgaggaaaagaagagcctttgctgataaagagttggagaacattatgctggagagagaatataaagaaagggagatgttggaaacttctcaagctgctgctctgtttctgcccaaccgcatggtgcctggacctgactacaattcctacaaaagtgcctacagccccagcccagtggaaccaccaagcaaggacttctgtaattttttgcccacctgccttgatttaaccatgcagtattcagggtctgggaatatggaactaatttcttctaatgtcagcgtggccacaacttatagacagtatcccttgtcctcaagatttttagtttggcccaagtgtggccccattagcgacaccctcctctaccagcaatgcctgctaaatgccaccacctcagttcaagccctgaagcctggggccagctgggacttgaagggagcacgagtccaggatggactcagtgcagagcaggacatgatgccatcgaaattggaaggttccctggtgctgcctcacactcctgagatccagaccacgagaagtccgcgttctccccaccccgacggaatttctctcccattgttgacacggactccctggcagctcaagggcatgtcttaacgaagatcagcaaagaaaacaccaggcaccctctgccacttagacataatccattccactcattattccagcaaacacttactgacaaatcgggtcctgagttgaaaacaccatttgtca

SEQ ID NO: 127999 - DNA, 2183 bp, Homo sapiens
  Payload ID: 5065
  Gene Symbol: DMRT3
  Gene Name: doublesex and mab-3 related transcription factor 3
  Uniprot ID: Q9NQL9
  ENST ID: ENST00000190165
  CDS Start-End: 39-1457
ccgcagccaggctgccaactcattcgggagcccggggcatgaacggctacggctccccctacctgtacatgggcggcccggtgtcgcagccgccacgggcgcccctgcagcgcacgcccaagtgcgcgcgctgccgcaaccatggcgtcctgtcctggctcaagggccacaagcgttactgccgcttcaaggactgcacctgcgagaagtgcatcctcatcatcgagcggcagcgggtcatggctgcgcaggtggcgctgcgccggcagcaggccaacgagagcttggagagcctcatccccgactcgctgcgcgctctgccagggcccccgccgccgggggacgccgtcgccgccccgcagccgccgccagcctctcagccgtcgcagccgcagccgccgcgccctgctgccgagttggccgcggccgccgcgctgcgttggactgccgagccgcagcccggggctctgcaggcgcagctcgccaagccagatttgactgaagaacgacttggagacggcaagtcggcagacaatacagaggtcttcagtgacaaagacactgaccagaggagttccccagatgtggcaaagagtaagggctgcttcacccctgagagccctgagatagtgtccgtggaggaagggggatacgctgtccagaaaaacggaggcaaccccgagagccgccctgacagccccaagtgtcacgcggagcagaatcacctcctgattgagggcccctcggggactgtttctctgcccttcagcttgaaagccaacagaccgccgcttgaagtgttaaaaaagatattccccaaccagaagccaacggtgcttgagctcatcctcaagggctgtggcggggacctggtgagcgccgtggaagtccttctgtccagccgatcctcagtcacgggagcagagcgaacttccgcagaacctgagagtctagcgttgccctccaatgggcacatctttgaacacaccttgagctcctaccccatctcgtcttccaaatggtctgtgggatcagcctttcgagtcccagacacgttgaggttttctgccgactctagcaacgttgtccccagtcccttggctgggcctctgcagccccctttcccccagccaccccggtacccgctgatgctgaggaatactttggcgagaagccagtcgagcccctttttgcccaatgatgtcaccctgtggaacaccatgacgctgcagcagcagtatcagctgaggtcccagtatgtcagtcctttccccagtaactctaccagcgtcttcagaagctcgcccgtccttcctgcccgcgccacggaagaccctcggatttccatccctgatgatgggtgtccatttgtgtcaaagcagtccatttacaccgaggacgactatgacgagaggtctgactcctcagactctagaacactcaacacatcatcttaaagtggtgctggatgggtggtggccaggtgacattttctgtgcgttttgaccctgaggcatctgaggagaggccacatcttgtgtatgccctttccttctgtttgacaaagtgactgtgcttgattctatacattagcaataaaaacataacttatttaacttcttgcacttcactggaaaatgccaaatagctctgttctgtggctttagtgctgaatgtttattgtaaaagagagtctaatgttaagaatagtcttgggaaggctgggtccgtggaagatttatttggggatgtaaagctgaaggtcagccttgcacctaaacccaacctggaatgttaaatgaaataatatacttgaatgcaattttgtaaaagtggattcctcaggatatgtgaaacctaaaggaagtggttctgttgcaaatggactataaacagggacattatattcttacactaaaaatccttgcattttaaagagagatgcacttaagaatagagtgaactgctcatatgcttatttaagcttggacagttttcagagacaaaccccattaagaattactcttttcacatggctgaatcgaaacatgtgtaatgtcaatgtaaaaccaatcacagctgtgaactgcatgaaatgtattgtgaaacgaacacaagattaagctttgtcaggttaatgtagcatgttaaggactctagaaaaaaataaactaaggagacga

SEQ ID NO: 128000 - DNA, 497 bp, Homo sapiens
  Payload ID: 5065
  Gene Symbol: DMRT3
  Gene Name: doublesex and mab-3 related transcription factor 3
  ENST ID: ENST00000417254
  CDS Start-End: 162-497
tgatttctagatctttatttacagggtttttgtttcatttgccagtgatatagttcgaatttttttaaaaaggcttgtagtatattatgacccattgagatgcatttgctcttccaaaaagcacgtgtacaggtctcttctgagcacatctgctcctctttatgcacaccaggaaaagattaactcagctgttctgttttccagatttgactgaagaacgacttggagacggcaagtcggcagacaatacagaggtcttcagtgacaaagacactgaccagaggagttccccagatgtggcaaagagtaagggctgcttcacccctgagagccctgagatagtgtccgtggaggaagggggatacgctgtccagaaaaacggaggcaaccccgagagccgccctgacagccccaagtgtcacgcggagcagaatcacctcctgattgagggcccctcggggactgtttctctgcccttcagcttgaaagccaacaga

SEQ ID NO: 128001 - DNA, 8552 bp, Homo sapiens
  Payload ID: 5066
  Gene Symbol: DSCAM
  Gene Name: Down syndrome cell adhesion molecule
  Uniprot ID: O60469
  ENST ID: ENST00000400454
  CDS Start-End: 479-6517
agggaaggttggcagagggatccatgtgactgaggccggagcacggcaaagatgagcctgcccgcccgcctgctgcctggatgcggagggtgagggctggcgcacgggaggccgctggctgcgcattctgggcgccgagtgcccgggatgagctcacgcccgcgtctgcggctctctccacctgccgacctgccgggggcccactgagctgacggcgcacctgggctccggccgcagcgtggggcgcggcgcccgggagcaggtgtgcaggagcgcagcgcgcggcgagcgcagccctcgctccggagcccggccgcgccgcgtgcccgggcggctaggcagcggcggcggcggcggcgggcggcgggcgggcggcggcccccgggcaggtgccgagcggcgagcggagccgggccgggcggagcgcggggggcgaggccggcgcgtcgctcgcgggaggccggggagcggcaggggcatgtggatactggctctctccttgttccagagcttcgcgaatgttttcagtgaagacctacactccagcctctactttgtcaatgcatctctgcaagaggtagtgtttgccagcaccacggggactctggtgccctgccccgcagcaggcatccctcctgtgactctcagatggtacctagccacgggcgaggagatctacgatgtccccgggatccgccacgtccaccccaacggcactctccaaattttccccttccctccttcaagcttcagtaccttaatccatgataatacttattattgcacagctgaaaatccttcagggaaaattagaagtcaggatgtccacatcaaggctgttttacgggagccctatacagtccgtgtggaggaccagaaaaccatgagaggcaatgttgcggtcttcaagtgcattatcccctcctcggtggaggcgtacatcactgtcgtctcatgggagaaagacactgtttcacttgtctcaggatctagatttctcatcacatccacgggagccttgtatattaaagatgtacagaatgaagatggattgtataactaccgctgcatcacgcggcatcgatacaccggagagacgaggcagagcaacagcgccagactttttgtatcagacccagcgaactcagccccatccatactggatgggtttgaccatcgcaaagccatggctgggcagcgtgtggagctgccttgcaaagcgctcgggcaccctgagccagattaccgctggctgaaggacaacatgcccctggaactttcagggaggttccagaagaccgtgacggggctgctcattgagaacattcgcccctcggactcaggcagctatgtttgtgaagtgtccaacagatacggaactgctaaggtgataggccgcctgtacgtgaaacagccactgaaagccaccatcagtcccaggaaggttaaaagcagcgtgggtagccaagtttccttgtcctgcagcgtgacaggaactgaggaccaggaactctcctggtaccgcaatggtgaaatcctcaaccctggaaaaaatgtgaggatcacagggatcaaccacgaaaaccttataatggatcacatggtcaaaagtgacgggggcgcataccagtgctttgtgcgcaaggacaagctgtccgctcaagactatgtgcaggtggtccttgaagatggaactcccaaaattatttctgcctttagtgaaaaggtggtgagtccagcagagccggtttcccttatgtgcaacgtgaagggaacacctttgcccacgatcacgtggaccctggacgatgacccgattctcaagggtggcagtcaccgcatcagccagatgatcacgtcggaggggaacgtggtcagctacctgaacatctccagctcccaggtccgggacgggggagtctaccgctgcactgccaacaactcggcgggagtcgtcctgtaccaggctcgaataaacgtaagagggcctgcaagcattcgaccaatgaaaaacatcacagcaatagcaggacgggacacatacattcactgtcgtgtgattggctatccgtattactccattaaatggtacaagaactctaacctgcttcctttcaaccaccgccaagtggcatttgagaacaatggaactcttaaactttcagatgtgcaaaaggaagtggacgagggggagtacacgtgcaacgtgttggttcaaccacaactctccaccagccagagcgtccacgtgaccgtgaaagttccgcctttcatacaaccctttgagtttccaagattctccattgggcagcgggtcttcatcccctgtgttgtggtctcaggggacttacccatcacgatcacctggcagaaggatggccggccaatccctgggagccttggggtgaccattgacaatattgacttcacgagctccttgaggatttccaatctctcgctcatgcacaatgggaattacacctgcatagcccggaatgaggccgccgctgtggagcaccaaagccagttgattgtcagagttcctcccaagtttgtggttcagccacgggaccaggacgggatttatggcaaagcagtcatcctcaattgttctgctgagggttaccctgtacctaccatcgtgtggaaattctctaaaggtgctggggttccccagttccagccaattgccctaaatggccgaatccaagttctcagcaatgggtcgttgctgatcaagcatgtcgtggaggaagacagtggctactacctctgcaaggtcagcaacgatgtgggcgcagacgtcagcaagtccatgtacctcacggttaaaattcctgcgatgataacatcctatccaaatactaccctggccacgcaggggcagaaaaaggagatgagctgcacggcgcatggtgagaagcccattatagtccgctgggagaaggaggaccgaatcattaaccctgagatggcccgttatcttgtgtccaccaaggaggtgggagaagaggtgatttctactctgcagattttgccaactgtgagagaagattctggtttcttttcctgccatgctattaattcttatggggaggaccgtggaataattcagctcacagtgcaagagcccccagaccctcccgaaattgagatcaaagatgtcaaagcacgcacaattacgctcaggtggaccatggggtttgatggaaacagtcccatcacaggctacgatattgaatgcaaaaataaatcagactcctgggattctgctcagagaaccaaagatgtttcccctcagctgaactcggccaccatcattgatatccacccttcctccacctacagcatccgcatgtacgccaagaaccggattggcaagagcgagcccagcaacgagctcaccatcacggcggacgaggcagctcctgatggtccacctcaggaagttcacctggagcctatatcatctcagagcatcagggtcacatggaaggctcccaagaaacatttgcaaaatgggattatccgtggctaccaaataggttaccgagagtacagcactgggggtaacttccaattcaacattatcagtgtcgacaccagcggggacagtgaggtttacaccctggacaacctgaataagttcactcagtacggcctggtggtgcaggcctgtaaccgggccggcacggggccttcttctcaggaaatcatcaccaccactctcgaggatgtgcccagttacccccccgaaaatgtccaagccatagcaacatcaccagaaagcatatcaatatcctggtccacactttccaaggaagccttgaatggaattctccaggggttcagagtcatttactgggccaacctcatggacggagagctgggtgagattaaaaacatcaccaccacacagccttcactggagctggacgggctggaaaagtacaccaactacagcatccaggtgctggccttcacccgcgcaggagacggggtcaggagtgagcagatcttcacccggaccaaagaggatgttccaggtcctcccgcgggtgtgaaggcagcggcggcctcagcctccatggtctttgtgtcctggcttccccctctcaagctgaacggcatcatccgaaagtacactgtattctgctcccacccctatcccacagtgatcagcgagtttgaggcctctcccgactcgttttcctacagaattcccaacctgagtaggaatcgtcagtacagcgtctgggtggtggctgttacttcagccggaagaggcaacagcagtgaaatcatcacagtcgagccactagcaaaagctcctgcacgaatcctgaccttcagtgggacagtgactactccatggatgaaagacattgtcttgccttgtaaggctgttggggacccttctcctgcagtcaaatggatgaaagacagtaacgggacacccagtctagtaacgattgatgggcggaggagcatctttagcaacggaagcttcattattcgcacggtgaaagcagaagactccggctattacagctgcattgccaataacaactggggatctgatgaaattattttaaacttacaagtacaagttccaccagatcagcctcggcttacagtctccaagaccacgtcttcctccatcaccctttcttggctccctggagacaacgggggcagctctatcagaggatacatactgcagtactccgaggacaatagtgagcagtgggggagttttccaatcagccccagcgaacgttcctatcgcttggaaaatctcaaatgtgggacttggtataagttcacactgacagcccaaaatggagtgggcccagggcgcataagtgaaatcatagaagcaaagaccttaggaaaagagccccagttctcaaaggagcaggagctgtttgccagcatcaacaccacacgcgtgaggctgaacctcattggctggaatgatggcggctgccccatcacctccttcacactagagtacaggccctttgggaccacagtttggaccacagctcagaggacctctctctccaagtcctacatcctgtatgacctgcaggaagccacctggtatgagctgcagatgcgggtgtgcaacagtgcgggctgcgcggagaagcaggccaacttcgctacgctgaactacgatggcagtacaattcctccactcattaagtcagttgtccaaaacgaagaagggctgacgaccaacgaggggctcaagatgctggtgaccatctcctgtatcctggtgggggtcttgctgctgtttgtgctcctgctggttgtgcggaggaggcggcgggagcagaggctaaagaggctgcgagatgcaaagagtttagctgaaatgctcatgagtaagaatacccggacttcagatacgttaagcaagcaacagcagaccctgcgaatgcacatcgacatacccagggctcagcttttgattgaagagagagacacgatggagaccattgatgatcgctccacggttctgttgacggatgctgactttggagaggcagctaagcagaagtccctgacggtcactcacacggtccattaccaatcggtgtctcaggccactgggcccttagtggatgtttcagacgctcggccgggaacgaatcccaccaccaggaggaatgccaaggctgggcccacagcgagaaaccgctatgccagccagtggaccctcaaccgaccccaccccaccatctcagcacacaccctcaccacagactggaggctgccaacacccagggctgcaggatcagtagacaaagagagcgacagttacagcgtcagcccctcgcaagacacagatcgagcaagaagcagcatggtctccacagaaagtgcctcctccacttacgaagaactggccagggcctacgaacacgccaagatggaagagcaactgaggcacgccaagttcaccatcacggagtgcttcatatcagacacgtcatcggagcagttgacggcagggacaaatgagtacacggacagtctgacctccagcaccccttccgaatcgggaatctgcaggttcactgcatctccccccaaacctcaggatggaggaagagtaatgaatatggcagttccaaaggcacatcggccaggtgacctcatacatttgcctccataccttagaatggactttttgttaaaccgaggtggtccaggcaccagcagggacctgagcttaggacaagcatgcttggaacctcagaaaagccggaccctgaagcgccccacggtcctggagcccatcccgatggaagccgcctcctccgcctcctccacgagagaaggacagtcgtggcagccgggggccgtggccacattacctcagcgggagggagcagagctgggacaggcagctaaaatgagcagctcccaagaatcactgctcgactcccggggccatttgaaaggaaacaatccttacgcaaaatcttacaccctggtataacagacagcatgactggacagcggttgtaaatacaattcaaacaattcaatcaaagctaccttttttttacggaattccaatatttataattaaagaaaattgccaaaatatattaaaaaaaaaaaagagaaaatactgaaaccacagacagtgcaaagactctcctgctttttttctgtctgagtgtgagctccatccgcctgggcatctgattttttgggaaagaagtccagttttatgatcttcacaggctattgcatttttactgattttctacaaaagtgcatgggggggattaattaaaccttctgactggaagttctatcacacaagaggcaagaaagaaaacagggtgggtgggaaatcagcctatttgtgaatttaaaaggaacaccgatttgcgggcaggggaaaacttcagtcacgtttgcacacctttctttcccattagaaaccgggttctcaatttggtcttcttttgttgttaattaggatgagtgccgtcagtgaaggggtggggggaatcaatttggttttctctcttgtttcttttttaatttaatgagacactctttgcattttgtctaagcgaaataaaaaagaaaaggttgtctgcctttatttccatgtctgcttctctcgtcttctgccagtggcctggtcctccttcccattgacacttctgtttggaaacaccaggcctgaacccagagcccaattcaataaaccagagtcgatactaacaccctgaactcctcaggaatctccaggaagcacaaagaaggtgcagctcctgctctcaagctggagaggacaaaatgcaggctggtctccaccgcaaccagaggccagcccaagtattcgaagcccgtcgcaaagctctgccccttgcctgcccatggccagagttcaactgactgtggcctatgggccaaatccagcctcctgctgttttttaaataaagttttattgaaacaaggccacatgcactatttgctattgtctatggctgctttcatggcacaatggtagagctgaatagttgcagcagagatggtatagcccatgaagcctaaaatatttattacctggcccattacaggaaacatttgccagacccgtgctctggagtctgaaatgtagccccagcttgcgtgacaaggggcaagatcgtgcatcttaccctccatgacttttcctatctccactatgcctggtatgcaaatttgtgatagaccatcttaataaacattgcctgaatcctctgtaaccagaggaaagtgatgttcctctaaaatctaagtttttactttcctttccctcactttatctcccatgtggctcatcctaagagagaatttactcataaatagtcggaactgcattctttatcccacaaccctcacagggtttgctttatgaaagaggatgtaatcctcccctggctgcaacactccattccaggctcacttccataaaatggaaagataaacaggtctttgtgtcagagatttggcattaaccagaaaacatgatcaaatatccacagctgctcagtctcccaggctgaagattctctacaggcttccattaaggccaccaacatagactggtgccagttattaccatcttgggaacatattcagaaatgtctttccttccctccctccctccttctttcccatcctttcttccttctatttattttccaggcaggcccatttgtctgcttagattcagtgacacagaatgggtccaggaccatgtcaagaccacctgctgatgctagtgttagatgactccaggaatgtgaggtgtgcatccatggtttcagaatgtaatccgtgttgacgtgtactgtttgcatactctcagactgttttttttttatgcaaaagaaatgttactttctgggggaaaaaattaaaagtctatctttcatcaacctaaaacttctatatcccccaaacatagaagtttacctttttaacatttttctctcaacctgtacaaaaataaaaaaattctacatta

SEQ ID NO: 128002 - DNA, 5374 bp, Homo sapiens
  Payload ID: 5066
  Gene Symbol: DSCAM
  Gene Name: Down syndrome cell adhesion molecule
  ENST ID: ENST00000404019
  CDS Start-End: 1-5241
ctcgggcaccctgagccagattaccgctggctgaaggacaacatgcccctggaactttcagggaggttccagaagaccgtgacggggctgctcattgagaacattcgcccctcggactcaggcagctatgtttgtgaagtgtccaacagatacggaactgctaaggtgataggccgcctgtacgtgaaacagccactgaaagccaccatcagtcccaggaaggttaaaagcagcgtgggtagccaagtttccttgtcctgcagcgtgacaggaactgaggaccaggaactctcctggtaccgcaatggtgaaatcctcaaccctggaaaaaatgtgaggatcacagggatcaaccacgaaaaccttataatggatcacatggtcaaaagtgacgggggcgcataccagtgctttgtgcgcaaggacaagctgtccgctcaagactatgtgcaggtggtccttgaagatggaactcccaaaattatttctgcctttagtgaaaaggtggtgagtccagcagagccggtttcccttatgtgcaacgtgaagggaacacctttgcccacgatcacgtggaccctggacgatgacccgattctcaagggtggcagtcaccgcatcagccagatgatcacgtcggaggggaacgtggtcagctacctgaacatctccagctcccaggtccgggacgggggagtctaccgctgcactgccaacaactcggcgggagtcgtcctgtaccaggctcgaataaacgtaagagggcctgcaagcattcgaccaatgaaaaacatcacagcaatagcaggacgggacacatacattcactgtcgtgtgattggctatccgtattactccattaaatggtacaagaactctaacctgcttcctttcaaccaccgccaagtggcatttgagaacaatggaactcttaaactttcagatgtgcaaaaggaagtggacgagggggagtacacgtgcaacgtgttggttcaaccacaactctccaccagccagagcgtccacgtgaccgtgaaagttccgcctttcatacaaccctttgagtttccaagattctccattgggcagcgggtcttcatcccctgtgttgtggtctcaggggacttacccatcacgatcacctggcagaaggatggccggccaatccctgggagccttggggtgaccattgacaatattgacttcacgagctccttgaggatttccaatctctcgctcatgcacaatgggaattacacctgcatagcccggaatgaggccgccgctgtggagcaccaaagccagttgattgtcagagttcctcccaagtttgtggttcagccacgggaccaggacgggatttatggcaaagcagtcatcctcaattgttctgctgagggttaccctgtacctaccatcgtgtggaaattctctaaaggtgctggggttccccagttccagccaattgccctaaatggccgaatccaagttctcagcaatgggtcgttgctgatcaagcatgtcgtggaggaagacagtggctactacctctgcaaggtcagcaacgatgtgggcgcagacgtcagcaagtccatgtacctcacggttaaaattcctgcgatgataacatcctatccaaatactaccctggccacgcaggggcagaaaaaggagatgagctgcacggcgcatggtgagaagcccattatagtccgctgggagaaggaggaccgaatcattaaccctgagatggcccgttatcttgtgtccaccaaggaggtgggagaagaggtgatttctactctgcagattttgccaactgtgagagaagattctggtttcttttcctgccatgctattaattcttatggggaggaccgtggaataattcagctcacagtgcaagagcccccagaccctcccgaaattgagatcaaagatgtcaaagcacgcacaattacgctcaggtggaccatggggtttgatggaaacagtcccatcacaggctacgatattgaatgcaaaaataaatcagactcctgggattctgctcagagaaccaaagatgtttcccctcagctgaactcggccaccatcattgatatccacccttcctccacctacagcatccgcatgtacgccaagaaccggattggcaagagcgagcccagcaacgagctcaccatcacggcggacgaggcagctcctgatggtccacctcaggaagttcacctggagcctatatcatctcagagcatcagggtcacatggaaggctcccaagaaacatttgcaaaatgggattatccgtggctaccaaataggttaccgagagtacagcactgggggtaacttccaattcaacattatcagtgtcgacaccagcggggacagtgaggtttacaccctggacaacctgaataagttcactcagtacggcctggtggtgcaggcctgtaaccgggccggcacggggccttcttctcaggaaatcatcaccaccactctcgaggatgtgcccagttacccccccgaaaatgtccaagccatagcaacatcaccagaaagcatatcaatatcctggtccacactttccaaggaagccttgaatggaattctccaggggttcagagtcatttactgggccaacctcatggacggagagctgggtgagattaaaaacatcaccaccacacagccttcactggagctggacgggctggaaaagtacaccaactacagcatccaggtgctggccttcacccgcgcaggagacggggtcaggagtgagcagatcttcacccggaccaaagaggatgttccaggtcctcccgcgggtgtgaaggcagcggcggcctcagcctccatggtctttgtgtcctggcttccccctctcaagctgaacggcatcatccgaaagtacactgtattctgctcccacccctatcccacagtgatcagcgagtttgaggcctctcccgactcgttttcctacagaattcccaacctgagtaggaatcgtcagtacagcgtctgggtggtggctgttacttcagccggaagaggcaacagcagtgaaatcatcacagtcgagccactagcaaaagctcctgcacgaatcctgaccttcagtgggacagtgactactccatggatgaaagacattgtcttgccttgtaaggctgttggggacccttctcctgcagtcaaatggatgaaagacagtaacgggacacccagtctagtaacgattgatgggcggaggagcatctttagcaacggaagcttcattattcgcacggtgaaagcagaagactccggctattacagctgcattgccaataacaactggggatctgatgaaattattttaaacttacaagtacaagttccaccagatcagcctcggcttacagtctccaagaccacgtcttcctccatcaccctttcttggctccctggagacaacgggggcagctctatcagaggatacatactgcagtactccgaggacaatagtgagcagtgggggagttttccaatcagccccagcgaacgttcctatcgcttggaaaatctcaaatgtgggacttggtataagttcacactgacagcccaaaatggagtgggcccagggcgcataagtgaaatcatagaagcaaagaccttaggaaaagagccccagttctcaaaggagcaggagctgtttgccagcatcaacaccacacgcgtgaggctgaacctcattggctggaatgatggcggctgccccatcacctccttcacactagagtacaggccctttgggaccacagtttggaccacagctcagaggacctctctctccaagtcctacatcctgtatgacctgcaggaagccacctggtatgagctgcagatgcgggtgtgcaacagtgcgggctgcgcggagaagcaggccaacttcgctacgctgaactacgatggcagtacaattcctccactcattaagtcagttgtccaaaacgaagaagggctgacgaccaacgaggggctcaagatgctggtgaccatctcctgtatcctggtgggggtcttgctgctgtttgtgctcctgctggttgtgcggaggaggcggcgggagcagaggctaaagaggctgcgagatgcaaagagtttagctgaaatgctcatgagtaagaatacccggacttcagatacgttaagcaagcaacagcagaccctgcgaatgcacatcgacatacccagggctcagcttttgattgaagagagagacacgatggagaccattgatgatcgctccacggttctgttgacggatgctgactttggagaggcagctaagcagaagtccctgacggtcactcacacggtccattaccaatcggtgtctcaggccactgggcccttagtggatgtttcagacgctcggccgggaacgaatcccaccaccaggaggaatgccaaggctgggcccacagcgagaaaccgctatgccagccagtggaccctcaaccgaccccaccccaccatctcagcacacaccctcaccacagactggaggctgccaacacccagggctgcaggatcagtagacaaagagagcgacagttacagcgtcagcccctcgcaagacacagatcgagcaagaagcagcatggtctccacagaaagtgcctcctccacttacgaagaactggccagggcctacgaacacgccaagatggaagagcaactgaggcacgccaagttcaccatcacggagtgcttcatatcagacacgtcatcggagcagttgacggcagggacaaatgagtacacggacagtctgacctccagcaccccttccgaatcgggaatctgcaggttcactgcatctccccccaaacctcaggatggaggaagagtaatgaatatggcagttccaaaggcacatcggccaggtggtccaggcaccagcagggacctgagcttaggacaagcatgcttggaacctcagaaaagccggaccctgaagcgccccacggtcctggagcccatcccgatggaagccgcctcctccgcctcctccacgagagaaggacagtcgtggcagccgggggccgtggccacattacctcagcgggagggagcagagctgggacaggcagctaaaatgagcagctcccaagaatcactgctcgactcccggggccatttgaaaggaaacaatccttacgcaaaatcttacaccctggtataacagacagcatgactggacagcggttgtaaatacaattcaaacaattcaatcaaagctaccttttttttacggaattccaatatttataattaaagaaaattgccaaaatatattaaaaaaaaaaaagagaaaa

SEQ ID NO: 128003 - DNA, 6176 bp, Homo sapiens
  Payload ID: 5066
  Gene Symbol: DSCAM
  Gene Name: Down syndrome cell adhesion molecule
  ENST ID: ENST00000617870
  CDS Start-End: 13-5556
aagccactgttttcctctatttcaggatctagatttctcatcacatccacgggagccttgtatattaaagatgtacagaatgaagatggattgtataactaccgctgcatcacgcggcatcgatacaccggagagacgaggcagagcaacagcgccagactttttgtatcagacccagcgaactcagccccatccatactggatgggtttgaccatcgcaaagccatggctgggcagcgtgtggagctgccttgcaaagcgctcgggcaccctgagccagattaccgctggctgaaggacaacatgcccctggaactttcagggaggttccagaagaccgtgacggggctgctcattgagaacattcgcccctcggactcaggcagctatgtttgtgaagtgtccaacagatacggaactgctaaggtgataggccgcctgtacgtgaaacagccactgaaagccaccatcagtcccaggaaggttaaaagcagcgtgggtagccaagtttccttgtcctgcagcgtgacaggaactgaggaccaggaactctcctggtaccgcaatggtgaaatcctcaaccctggaaaaaatgtgaggatcacagggatcaaccacgaaaaccttataatggatcacatggtcaaaagtgacgggggcgcataccagtgctttgtgcgcaaggacaagctgtccgctcaagactatgtgcaggtggtccttgaagatggaactcccaaaattatttctgcctttagtgaaaaggtggtgagtccagcagagccggtttcccttatgtgcaacgtgaagggaacacctttgcccacgatcacgtggaccctggacgatgacccgattctcaagggtggcagtcaccgcatcagccagatgatcacgtcggaggggaacgtggtcagctacctgaacatctccagctcccaggtccgggacgggggagtctaccgctgcactgccaacaactcggcgggagtcgtcctgtaccaggctcgaataaacgtaagagggcctgcaagcattcgaccaatgaaaaacatcacagcaatagcaggacgggacacatacattcactgtcgtgtgattggctatccgtattactccattaaatggtacaagaactctaacctgcttcctttcaaccaccgccaagtggcatttgagaacaatggaactcttaaactttcagatgtgcaaaaggaagtggacgagggggagtacacgtgcaacgtgttggttcaaccacaactctccaccagccagagcgtccacgtgaccgtgaaagttccgcctttcatacaaccctttgagtttccaagattctccattgggcagcgggtcttcatcccctgtgttgtggtctcaggggacttacccatcacgatcacctggcagaaggatggccggccaatccctgggagccttggggtgaccattgacaatattgacttcacgagctccttgaggatttccaatctctcgctcatgcacaatgggaattacacctgcatagcccggaatgaggccgccgctgtggagcaccaaagccagttgattgtcagagttcctcccaagtttgtggttcagccacgggaccaggacgggatttatggcaaagcagtcatcctcaattgttctgctgagggttaccctgtacctaccatcgtgtggaaattctctaaaggtgctggggttccccagttccagccaattgccctaaatggccgaatccaagttctcagcaatgggtcgttgctgatcaagcatgtcgtggaggaagacagtggctactacctctgcaaggtcagcaacgatgtgggcgcagacgtcagcaagtccatgtacctcacggttaaaattcctgcgatgataacatcctatccaaatactaccctggccacgcaggggcagaaaaaggagatgagctgcacggcgcatggtgagaagcccattatagtccgctgggagaaggaggaccgaatcattaaccctgagatggcccgttatcttgtgtccaccaaggaggtgggagaagaggtgatttctactctgcagattttgccaactgtgagagaagattctggtttcttttcctgccatgctattaattcttatggggaggaccgtggaataattcagctcacagtgcaagagcccccagaccctcccgaaattgagatcaaagatgtcaaagcacgcacaattacgctcaggtggaccatggggtttgatggaaacagtcccatcacaggctacgatattgaatgcaaaaataaatcagactcctgggattctgctcagagaaccaaagatgtttcccctcagctgaactcggccaccatcattgatatccacccttcctccacctacagcatccgcatgtacgccaagaaccggattggcaagagcgagcccagcaacgagctcaccatcacggcggacgaggcagctcctgatggtccacctcaggaagttcacctggagcctatatcatctcagagcatcagggtcacatggaaggctcccaagaaacatttgcaaaatgggattatccgtggctaccaaataggttaccgagagtacagcactgggggtaacttccaattcaacattatcagtgtcgacaccagcggggacagtgaggtttacaccctggacaacctgaataagttcactcagtacggcctggtggtgcaggcctgtaaccgggccggcacggggccttcttctcaggaaatcatcaccaccactctcgaggatgtgcccagttacccccccgaaaatgtccaagccatagcaacatcaccagaaagcatatcaatatcctggtccacactttccaaggaagccttgaatggaattctccaggggttcagagtcatttactgggccaacctcatggacggagagctgggtgagattaaaaacatcaccaccacacagccttcactggagctggacgggctggaaaagtacaccaactacagcatccaggtgctggccttcacccgcgcaggagacggggtcaggagtgagcagatcttcacccggaccaaagaggatgttccaggtcctcccgcgggtgtgaaggcagcggcggcctcagcctccatggtctttgtgtcctggcttccccctctcaagctgaacggcatcatccgaaagtacactgtattctgctcccacccctatcccacagtgatcagcgagtttgaggcctctcccgactcgttttcctacagaattcccaacctgagtaggaatcgtcagtacagcgtctgggtggtggctgttacttcagccggaagaggcaacagcagtgaaatcatcacagtcgagccactagcaaaagctcctgcacgaatcctgaccttcagtgggacagtgactactccatggatgaaagacattgtcttgccttgtaaggctgttggggacccttctcctgcagtcaaatggatgaaagacagtaacgggacacccagtctagtaacgattgatgggcggaggagcatctttagcaacggaagcttcattattcgcacggtgaaagcagaagactccggctattacagctgcattgccaataacaactggggatctgatgaaattattttaaacttacaagtacaagttccaccagatcagcctcggcttacagtctccaagaccacgtcttcctccatcaccctttcttggctccctggagacaacgggggcagctctatcagaggatacatactgcagtactccgaggacaatagtgagcagtgggggagttttccaatcagccccagcgaacgttcctatcgcttggaaaatctcaaatgtgggacttggtataagttcacactgacagcccaaaatggagtgggcccagggcgcataagtgaaatcatagaagcaaagaccttaggaaaagagccccagttctcaaaggagcaggagctgtttgccagcatcaacaccacacgcgtgaggctgaacctcattggctggaatgatggcggctgccccatcacctccttcacactagagtacaggccctttgggaccacagtttggaccacagctcagaggacctctctctccaagtcctacatcctgtatgacctgcaggaagccacctggtatgagctgcagatgcgggtgtgcaacagtgcgggctgcgcggagaagcaggccaacttcgctacgctgaactacgatggcagtacaattcctccactcattaagtcagttgtccaaaacgaagaagggctgacgaccaacgaggggctcaagatgctggtgaccatctcctgtatcctggtgggggtcttgctgctgtttgtgctcctgctggttgtgcggaggaggcggcgggagcagaggctaaagaggctgcgagatgcaaagagtttagctgaaatgctcatgagtaagaatacccggacttcagatacgttaagcaagcaacagcagaccctgcgaatgcacatcgacatacccagggctcagcttttgattgaagagagagacacgatggagaccattgatgatcgctccacggttctgttgacggatgctgactttggagaggcagctaagcagaagtccctgacggtcactcacacggtccattaccaatcggtgtctcaggccactgggcccttagtggatgtttcagacgctcggccgggaacgaatcccaccaccaggaggaatgccaaggctgggcccacagcgagaaaccgctatgccagccagtggaccctcaaccgaccccaccccaccatctcagcacacaccctcaccacagactggaggctgccaacacccagggctgcaggatcagtagacaaagagagcgacagttacagcgtcagcccctcgcaagacacagatcgagcaagaagcagcatggtctccacagaaagtgcctcctccacttacgaagaactggccagggcctacgaacacgccaagatggaagagcaactgaggcacgccaagttcaccatcacggagtgcttcatatcagacacgtcatcggagcagttgacggcagggacaaatgagtacacggacagtctgacctccagcaccccttccgaatcgggaatctgcaggttcactgcatctccccccaaacctcaggatggaggaagagtaatgaatatggcagttccaaaggcacatcggccaggtgacctcatacatttgcctccataccttagaatggactttttgttaaaccgaggtggtccaggcaccagcagggacctgagcttaggacaagcatgcttggaacctcagaaaagccggaccctgaagcgccccacggtcctggagcccatcccgatggaagccgcctcctccgcctcctccacgagagaaggacagtcgtggcagccgggggccgtggccacattacctcagcgggagggagcagagctgggacaggcagctaaaatgagcagctcccaagaatcactgctcgactcccggggccatttgaaaggaaacaatccttacgcaaaatcttacaccctggtataacagacagcatgactggacagcggttgtaaatacaattcaaacaattcaatcaaagctaccttttttttacggaattccaatatttataattaaagaaaattgccaaaatatattaaaaaaaaaaaagagaaaatactgaaaccacagacagtgcaaagactctcctgctttttttctgtctgagtgtgagctccatccgcctgggcatctgattttttgggaaagaagtccagttttatgatcttcacaggctattgcatttttactgattttctacaaaagtgcatgggggggattaattaaaccttctgactggaagttctatcacacaagaggcaagaaagaaaacagggtgggtgggaaatcagcctatttgtgaatttaaaaggaacaccgatttgcgggcaggggaaaacttcagtcacgtttgcacacctttctttcccattagaaaccgggttctcaatttggtcttcttttgttgttaattaggatgagtgccgtcagtgaaggggtggggggaatcaatttggttttctctcttgtttcttttttaatttaatgagacactctttgcattttgtctaagcgaaataaaaaagaaaaggttgtctgccttt

SEQ ID NO: 128004 - DNA, 6899 bp, Homo sapiens
  Payload ID: 5067
  Gene Symbol: DSCAML1
  Gene Name: Down syndrome cell adhesion molecule like 1
  Uniprot ID: Q8TD84
  ENST ID: ENST00000321322
  CDS Start-End: 3-6344
ggatgacaggagccggggagccgaggagggaggagccgccgccgcagccgagcgctgggctgaggagcagagagagcggggcgccgagtgcgggcggctgggagcgcgctgagcgggggagaggcgctgccgcacggccggccacaggaccacctccccggagaatagggcctctttatggcatgtggctggtaactttcctcctgctcctggactctttacacaaagcccgccctgaagatgttggcaccagcctctactttgtaaatgactccttgcagcaggtgaccttttccagctccgtgggggtggtggtgccctgcccggccgcgggctcccccagcgcggcccttcgatggtacctggccacaggggacgacatctacgacgtgccgcacatccggcacgtccacgccaacgggacgctgcagctctaccccttctccccctccgccttcaatagctttatccacgacaatgactacttctgcaccgcggagaacgctgccggcaagatccggagccccaacatccgcgtcaaagcagttttcagggaaccctacaccgtccgggtggaggatcaaaggtcaatgcgtggcaacgtggccgtcttcaagtgcctcatcccctcttcagtgcaggaatatgttagcgttgtatcttgggagaaagacacagtctccatcatcccagaacacaggttttttattacctaccacggcgggctgtacatctctgacgtacagaaggaggacgccctctccacctatcgctgcatcaccaagcacaagtatagcggggagacccggcagagcaatggggcacgcctctctgtgacagaccctgctgagtcgatccccaccatcctggatggcttccactcccaggaagtgtgggccggccacaccgtggagctgccctgcaccgcctcgggctaccctatccccgccatccgctggctcaaggatggccggcccctcccggctgacagccgctggaccaagcgcatcacagggctgaccatcagcgacttgcggaccgaggacagcggcacctacatttgtgaggtcaccaacaccttcggttcggcagaggccacaggcatcctcatggtcattgatccccttcatgtgaccctgacaccaaagaagctgaagaccggcattggcagcacggtcatcctctcctgtgccctgacgggctccccagagttcaccatccgctggtatcgcaacacggagctggtgctgcctgacgaggccatctccatccgcgggctcagcaacgagacgctgctcatcacctcggcccagaagagccattccggggcctaccagtgcttcgctacccgcaaggcccagaccgcccaggactttgccatcattgcacttgaggatggcacgccccgcatcgtctcgtccttcagcgagaaggtggtcaaccccggggagcagttctcactgatgtgtgcggccaagggcgccccgccccccacggtcacctgggccctcgacgatgagcccatcgtgcgggatggcagccaccgcaccaaccagtacaccatgtcggacggcaccaccatcagccacatgaacgtcacaggcccccagatccgcgacgggggcgtgtaccggtgcacagcgcggaacttggtgggcagtgctgaatatcaggcgcgaataaacgtaagaggcccacccagcatccgggctatgcggaacatcacagcagtcgccgggcgggacacccttatcaactgcagggtcatcggctatccctactactccatcaagtggtacaaggatgccctgctgctgccagacaaccaccgccaggtggtgtttgagaatgggaccctcaagctgactgacgtgcagaagggcatggatgagggggagtacctgtgcagtgtcctcatccagccccagctctccatcagccagagcgttcacgtagccgtcaaagtgccccctctgatccagcccttcgaattcccacccgcctccatcggccagctgctctacattccctgtgtggtgtcctcgggggacatgcccatccgtatcacctggaggaaggacggacaggtgatcatctcaggctcgggcgtgaccatcgagagcaaggaattcatgagctccctgcagatctctagcgtctccctcaagcacaacggcaactatacatgcatcgccagcaacgcagccgccaccgtgagccgggagcgccagctcatcgtgcgtgtgccccctcgatttgtggtgcaacccaacaaccaggatggcatctacggcaaagctggtgtgctcaactgctcggtggacggctaccccccacccaaggtcatgtggaagcatgccaaggggagcgggaacccccagcagtaccaccctgtgcccctcactggccgcatccagatcctgcccaacagctcgctgctgatccgccacgtcctagaagaggacatcggctactacctctgccaggccagcaacggcgtaggcaccgacatcagcaagtccatgttcctcacagtcaagatcccggccatgatcacttcccaccccaacaccaccatcgccatcaagggccatgcgaaggagctaaactgcacggcacggggtgagcggcccatcatcatccgctgggagaagggggacacagtcatcgaccctgaccgcgtcatgcggtatgccatcgccaccaaggacaacggcgacgaggtcgtctccacactgaagctcaagcccgctgaccgtggggactctgtgttcttcagctgccatgccatcaactcgtatggggaggaccggggcttgatccaactcactgtgcaagagccccccgaccccccagagctggagatccgggaggtgaaggcccggagcatgaacctgcgctggacccagcgattcgacgggaacagcatcatcacgggcttcgacattgaatacaagaacaaatcagattcctgggacttcaagcagtccacacgcaacatctcccccaccatcaaccaggccaacattgtggacttgcacccggcatctgtgtacagcatccgcatgtactctttcaacaagattggccgcagtgaaccaagcaaggagctcaccatcagcactgaggaggccgctcccgatgggccccccatggatgttaccttgcagccagtgacctcacagagcatccaggtgacctggaaggcacccaagaaggagctgcagaacggtgtcatccggggctaccagattggctacagagagaacagccccggcagcaacgggcagtacagcatcgtggagatgaaggccacgggggacagcgaggtctacaccctggacaacctcaagaagttcgcccagtatggggtggtggtccaagccttcaatcgggctggcacggggccctcttccagcgagatcaatgccaccactctggaggatgtgcccagccagccccctgagaacgtccgggccctgtccatcacttctgacgtggccgtcatctcctggtcagagcccccgcgcagcaccctcaatggcgtcctcaaaggctatcgggtcatcttctggtccctctatgttgatggggagtggggcgagatgcagaacatcaccaccacgcgggagcgggtggagctgcggggcatggagaagttcaccaactacagcgtccaggtgctggcctacacccaggctggggacggcgtacgcagcagtgtgctctacatccagaccaaggaggacgttccaggtccccctgctggcatcaaagctgtcccttcatcagctagcagtgtggttgtgtcttggctcccccctaccaagcccaacggggtgatccgcaagtacaccatcttctgttccagccccgggtctggccagccggctcccagcgagtacgagacgagtccagagcagctcttctaccggatcgcccacctaaaccgcggtcagcagtatctgctgtgggtggccgccgtcacctctgccggccggggcaacagcagcgagaaggtgaccatcgagcctgctggcaaggccccagcaaagatcatctcctttgggggcaccgtgacaacaccttggatgaaagatgttcggctgccttgcaattcagtgggagatccagcccctgctgtgaagtggaccaaggacagtgaagactcggccattccagtgtccatggatgggcaccggctcatccacaccaatggcacactgctgctgcgtgcagtgaaggctgaggactctggctactacacgtgcacggccaccaacactggtggctttgacaccatcatcgtcaaccttctggtgcaagttcccccggaccagccccgcctcactgtctccaaaacctcagcttcgtccatcaccctgacctggattccaggtgacaatgggggcagctccatccgaggcttcgtgctacagtactcggtggacaacagcgaggagtggaaggatgtgttcatcagctccagcgagcgctccttcaagctggacagcctcaagtgtggcacgtggtacaaggtgaagctggcagccaagaacagcgtgggctctgggcgcatcagcgagatcatcgaggccaagacccacgggcgggagccctccttcagcaaagaccaacacctcttcacccacatcaactccacgcatgctcggcttaacctgcagggctggaacaatgggggctgccctatcacagccatcgttctggagtaccggcccaaggggacctgggcctggcagggcctccgggccaacagctccggggaggtgtttctgacggaactgcgagaggccacgtggtacgagctgcgcatgagggcttgcaacagtgcgggctgcggcaatgaaacagcccagttcgccaccctggactacgatggcagcaccattccacccatcaagtctgctcaaggtgaaggggatgatgtgaagaagctgttcaccatcggctgccctgtcatcctggccacactgggggtggcactgctcttcatcgtacgcaagaagaggaaggagaaacggctgaagcgactccgagatgcaaagagtttggcagaaatgttgataagcaagaacaatagaagctttgacacccctgtgaaagggccaccccagggcccacggctacacattgacatccccagggtccagctgctcatcgaggacaaagaaggcatcaagcaactgggagatgacaaggccaccatccctgtgacagatgctgagttcagccaagctgtcaacccacagagcttctgtactggcgtctccttgcaccacccaaccctcatccagagcacaggacccctcatcgacatgtctgacatccggccaggaaccaatccagtgtccaggaagaatgtgaagtcagcccacagcacccggaaccggtactcaagccagtggaccctgaccaagtgccaggcctccacacctgcccgcaccctcacctccgactggcgcaccgtgggctcccagcatggtgtcacggtcactgagagtgacagctacagtgccagcctgtcccaggacacagacaaaggaaggaacagcatggtgtccactgagagtgcctcttccacctacgaggagctggcccgggcctatgagcatgccaagctggaggagcagctgcagcacgccaagtttgagatcaccgagtgcttcatctctgacagttcctctgaccagatgaccacaggcaccaacgagaacgccgacagcatgacatccatgagcacaccctcagagcctggcatctgccgctttaccgcctcaccacccaagccccaggatgcggaccggggcaaaaacgtggctgtgcccatccctcaccgggccaacaagagtgactactgcaacctgcccctgtatgccaagtcagaggccttctttcgaaaggcagatggacgtgagccctgccccgtggtcccaccccgtgaggcctccatccggaacctggctcgaacctaccacacccaggctcgccacctgaccctggaccctgccagcaagtccttgggccttccccacccaggggcccccgctgccgcctccacagccaccttacctcagaggactctggccatgccagcccccccagccggcacagcccccccagcccccggccccacccctgctgagccacccaccgcccccagcgctgcccctccggcccccagcaccgagcctccacgagccgggggcccacacaccaaaatggggggctccagggactcgcttctcgagatgagcacatcgggggtagggaggtctcagaagcagggggccggggcctactccaaatcctacaccctggtgtagggcccgcaggaagagcagccacgcctggaccgcgccgcgccgcagccccacacgccagctcggctgtttttctgcattatttatattcaactgacagacaaaaaccaaccaacgacaaaacaaaaacccccaatcatgaacgcctgtacatagaactcttttgtacaaatgaaactattttcttcttctccatgaagccagggcacaaagaatttgacagtacaagtcaaatcccccaccccacaaaatatgtgtggagatatatatacatatatagacagacaggaacgcgtccacgagctatatatctatatatttctctcaccctattttgagacagaggcacaaagactcagcaatttttttccctcctcctcaccttccccccagtctaggtggttttgacaaagaccaaaatcccaactcagagacactgcatgcgattttactgttccaagaaaaccaggagttgcttcaatttgcagatgcttatgtgttaatacctttttctatgaaaaaagacccagcgccgtgtgcaataaaggttatgtttct

SEQ ID NO: 128005 - DNA, 6099 bp, Homo sapiens
  Payload ID: 5067
  Gene Symbol: DSCAML1
  Gene Name: Down syndrome cell adhesion molecule like 1
  ENST ID: ENST00000527706
  CDS Start-End: 13-5544
cctctttatggcatgtggctggtaactttcctcctgctcctggactctttacacaaagcccgccctgaagatgttggcaccagcctctactttgtaaatgactccttgcagcagctgccctgcaccgcctcgggctaccctatccccgccatccgctggctcaaggatggccggcccctcccggctgacagccgctggaccaagcgcatcacagggctgaccatcagcgacttgcggaccgaggacagcggcacctacatttgtgaggtcaccaacaccttcggttcggcagaggccacaggcatcctcatggtcattgatccccttcatgtgaccctgacaccaaagaagctgaagaccggcattggcagcacggtcatcctctcctgtgccctgacgggctccccagagttcaccatccgctggtatcgcaacacggagctggtgctgcctgacgaggccatctccatccgcgggctcagcaacgagacgctgctcatcacctcggcccagaagagccattccggggcctaccagtgcttcgctacccgcaaggcccagaccgcccaggactttgccatcattgcacttgaggatggcacgccccgcatcgtctcgtccttcagcgagaaggtggtcaaccccggggagcagttctcactgatgtgtgcggccaagggcgccccgccccccacggtcacctgggccctcgacgatgagcccatcgtgcgggatggcagccaccgcaccaaccagtacaccatgtcggacggcaccaccatcagccacatgaacgtcacaggcccccagatccgcgacgggggcgtgtaccggtgcacagcgcggaacttggtgggcagtgctgaatatcaggcgcgaataaacgtaagaggcccacccagcatccgggctatgcggaacatcacagcagtcgccgggcgggacacccttatcaactgcagggtcatcggctatccctactactccatcaagtggtacaaggatgccctgctgctgccagacaaccaccgccaggtggtgtttgagaatgggaccctcaagctgactgacgtgcagaagggcatggatgagggggagtacctgtgcagtgtcctcatccagccccagctctccatcagccagagcgttcacgtagccgtcaaagtgccccctctgatccagcccttcgaattcccacccgcctccatcggccagctgctctacattccctgtgtggtgtcctcgggggacatgcccatccgtatcacctggaggaaggacggacaggtgatcatctcaggctcgggcgtgaccatcgagagcaaggaattcatgagctccctgcagatctctagcgtctccctcaagcacaacggcaactatacatgcatcgccagcaacgcagccgccaccgtgagccgggagcgccagctcatcgtgcgtgtgccccctcgatttgtggtgcaacccaacaaccaggatggcatctacggcaaagctggtgtgctcaactgctcggtggacggctaccccccacccaaggtcatgtggaagcatgccaaggggagcgggaacccccagcagtaccaccctgtgcccctcactggccgcatccagatcctgcccaacagctcgctgctgatccgccacgtcctagaagaggacatcggctactacctctgccaggccagcaacggcgtaggcaccgacatcagcaagtccatgttcctcacagtcaagatcccggccatgatcacttcccaccccaacaccaccatcgccatcaagggccatgcgaaggagctaaactgcacggcacggggtgagcggcccatcatcatccgctgggagaagggggacacagtcatcgaccctgaccgcgtcatgcggtatgccatcgccaccaaggacaacggcgacgaggtcgtctccacactgaagctcaagcccgctgaccgtggggactctgtgttcttcagctgccatgccatcaactcgtatggggaggaccggggcttgatccaactcactgtgcaagagccccccgaccccccagagctggagatccgggaggtgaaggcccggagcatgaacctgcgctggacccagcgattcgacgggaacagcatcatcacgggcttcgacattgaatacaagaacaaatcagattcctgggacttcaagcagtccacacgcaacatctcccccaccatcaaccaggccaacattgtggacttgcacccggcatctgtgtacagcatccgcatgtactctttcaacaagattggccgcagtgaaccaagcaaggagctcaccatcagcactgaggaggccgctcccgatgggccccccatggatgttaccttgcagccagtgacctcacagagcatccaggtgacctggaaggcacccaagaaggagctgcagaacggtgtcatccggggctaccagattggctacagagagaacagccccggcagcaacgggcagtacagcatcgtggagatgaaggccacgggggacagcgaggtctacaccctggacaacctcaagaagttcgcccagtatggggtggtggtccaagccttcaatcgggctggcacggggccctcttccagcgagatcaatgccaccactctggaggatgtgcccagccagccccctgagaacgtccgggccctgtccatcacttctgacgtggccgtcatctcctggtcagagcccccgcgcagcaccctcaatggcgtcctcaaaggctatcgggtcatcttctggtccctctatgttgatggggagtggggcgagatgcagaacatcaccaccacgcgggagcgggtggagctgcggggcatggagaagttcaccaactacagcgtccaggtgctggcctacacccaggctggggacggcgtacgcagcagtgtgctctacatccagaccaaggaggacgttccaggtccccctgctggcatcaaagctgtcccttcatcagctagcagtgtggttgtgtcttggctcccccctaccaagcccaacggggtgatccgcaagtacaccatcttctgttccagccccgggtctggccagccggctcccagcgagtacgagacgagtccagagcagctcttctaccggatcgcccacctaaaccgcggtcagcagtatctgctgtgggtggccgccgtcacctctgccggccggggcaacagcagcgagaaggtgaccatcgagcctgctggcaaggccccagcaaagatcatctcctttgggggcaccgtgacaacaccttggatgaaagatgttcggctgccttgcaattcagtgggagatccagcccctgctgtgaagtggaccaaggacagtgaagactcggccattccagtgtccatggatgggcaccggctcatccacaccaatggcacactgctgctgcgtgcagtgaaggctgaggactctggctactacacgtgcacggccaccaacactggtggctttgacaccatcatcgtcaaccttctggtgcaagttcccccggaccagccccgcctcactgtctccaaaacctcagcttcgtccatcaccctgacctggattccaggtgacaatgggggcagctccatccgaggcttcgtgctacagtactcggtggacaacagcgaggagtggaaggatgtgttcatcagctccagcgagcgctccttcaagctggacagcctcaagtgtggcacgtggtacaaggtgaagctggcagccaagaacagcgtgggctctgggcgcatcagcgagatcatcgaggccaagacccacgggcgggagccctccttcagcaaagaccaacacctcttcacccacatcaactccacgcatgctcggcttaacctgcagggctggaacaatgggggctgccctatcacagccatcgttctggagtaccggcccaaggggacctgggcctggcagggcctccgggccaacagctccggggaggtgtttctgacggaactgcgagaggccacgtggtacgagctgcgcatgagggcttgcaacagtgcgggctgcggcaatgaaacagcccagttcgccaccctggactacgatggcagcaccattccacccatcaagtctgctcaaggtgaaggggatgatgtgaagaagctgttcaccatcggctgccctgtcatcctggccacactgggggtggcactgctcttcatcgtacgcaagaagaggaaggagaaacggctgaagcgactccgagatgcaaagagtttggcagaaatgttgataagcaagaacaatagaagctttgacacccctgtgaaagggccaccccagggcccacggctacacattgacatccccagggtccagctgctcatcgaggacaaagaaggcatcaagcaactgggagatgacaaggccaccatccctgtgacagatgctgagttcagccaagctgtcaacccacagagcttctgtactggcgtctccttgcaccacccaaccctcatccagagcacaggacccctcatcgacatgtctgacatccggccaggaaccaatccagtgtccaggaagaatgtgaagtcagcccacagcacccggaaccggtactcaagccagtggaccctgaccaagtgccaggcctccacacctgcccgcaccctcacctccgactggcgcaccgtgggctcccagcatggtgtcacggtcactgagagtgacagctacagtgccagcctgtcccaggacacagacaaaggaaggaacagcatggtgtccactgagagtgcctcttccacctacgaggagctggcccgggcctatgagcatgccaagctggaggagcagctgcagcacgccaagtttgagatcaccgagtgcttcatctctgacagttcctctgaccagatgaccacaggcaccaacgagaacgccgacagcatgacatccatgagcacaccctcagagcctggcatctgccgctttaccgcctcaccacccaagccccaggatgcggaccggggcaaaaacgtggctgtgcccatccctcaccgggccaacaagagtgactactgcaacctgcccctgtatgccaagtcagaggccttctttcgaaaggcagatggacgtgagccctgccccgtggtcccaccccgtgaggcctccatccggaacctggctcgaacctaccacacccaggctcgccacctgaccctggaccctgccagcaagtccttgggccttccccacccaggggcccccgctgccgcctccacagccaccttacctcagaggactctggccatgccagcccccccagccggcacagcccccccagcccccggccccacccctgctgagccacccaccgcccccagcgctgcccctccggcccccagcaccgagcctccacgagccgggggcccacacaccaaaatggggggctccagggactcgcttctcgagatgagcacatcgggggtagggaggtctcagaagcagggggccggggcctactccaaatcctacaccctggtgtagggcccgcaggaagagcagccacgcctggaccgcgccgcgccgcagccccacacgccagctcggctgtttttctgcattatttatattcaactgacagacaaaaaccaaccaacgacaaaacaaaaacccccaatcatgaacgcctgtacatagaactcttttgtacaaatgaaactattttcttcttctccatgaagccagggcacaaagaatttgacagtacaagtcaaatcccccaccccacaaaatatgtgtggagatatatatacatatatagacagacaggaacgcgtccacgagctatatatctatatatttctctcaccctattttgagacagaggcacaaagactcagcaatttttttccctcctcctcaccttccccccagtctaggtggttttgacaaagaccaaaatcccaactcagagacactgcatgcgattttactgttccaagaaaaccaggagttgcttcaatttgcagatgcttatgtgttaatacctttttctatgaaaaaagacccagcgccgtgtgcaataaaggttatgtttct

SEQ ID NO: 128006 - DNA, 583 bp, Homo sapiens
  Payload ID: 5067
  Gene Symbol: DSCAML1
  Gene Name: Down syndrome cell adhesion molecule like 1
  ENST ID: ENST00000525836
  CDS Start-End: 386-583
aaagaggctttgcctcagtagctcttctcaaccccagctgccgtgagtctgattcaactgatggggcatcggtggttgttcagcctccccaggtgaactcgaagtggagcaaaaggtgacagtcacagcttagtagcccgccctgaagatgttggcaccagcctctactttgtaaatgactccttgcagcaggtgaccttttccagctccgtgggggtggtggtgccctgcccggccgcgggctcccccagcgcggcccttcgatggtacctggccacaggggacgacatctacgacgtgccgcacatccggcacgtccacgccaacgggacgctgcagctctaccccttctccccctccgccttcaatagctttatccacgacaatgactacttctgcaccgcggagaacgctgccggcaagatccggagccccaacatccgcgtcaaagcagttttcagggaaccctacaccgtccgggtggaggatcaaaggtcaatgcgtggcaacgtggccgtcttcaagtgcctcatcccctcttcagtgcaggaatatgttagcgttgtatcttgggagaaagaca

SEQ ID NO: 128007 - DNA, 3256 bp, Homo sapiens
  Payload ID: 5068
  Gene Symbol: DSCR3
  Gene Name: Down syndrome critical region 3
  Uniprot ID: O14972
  ENST ID: ENST00000309117
  CDS Start-End: 239-1132
ggggtgaaccgtgacagcgcttcggcccgcactaaggccggctcttgtgccggaaggaggaaggcgtgggcattcgcccctcggagctagggagtgtgtgcgacgccgctgcgaggtcacgtgagccactgccggcagagagggaaaggggcggggcccagaacgaagcggggaggcgccccttgtttccctggggtcacgcgcagccggaagtggcggctgctgcggagaattggagatggggaccgccctggacatcaagattaaaagagcgaataaagtttatcacgccggggaagtgctctctggcgtggtggtcatatcgagtaaggattcagtccaacaccagggagtgtctttgaccatggaaggaactgtaaacctccagctcagtgccaaaagtgtgggtgtgtttgaagctttttataattctgttaagcctatccagattatcaacagcaccatagaaatggtgaagccggggaaatttcccagcggcaaaacagaaatcccttttgaatttcctctgcacttgaagggtaacaaagttctgtatgagacgtatcatggcgtgtttgtcaacattcagtatacactgcgctgtgacatgaagcggtctctgttggccaaggacttgacaaagacctgtgaatttatcgttcactccgctcctcagaaggggaagtttactcccagtcccgtggacttcacgattacacctgaaaccttacagaacgtcaaagagagagctttgcttcccaaatttctccttcgaggacatctcaactcaacaaactgtgtcatcacgcagccactaacgggagagctggtggtggagagctcggaagccgccatcagaagcgtggagctgcagctggtgcgcgtggagacgtgcgggtgtgcagaaggctatgcccgcgacgccacggagattcagaacattcagatcgccgacggggatgtgtgcaggggcctctctgtccccatctacatggtcttccctaggctgttcacctgccctacactggagaccaccaacttcaaagtggaatttgaggttaacatcgtggtgctgcttcaccctgaccacctcatcacggagaacttcccgctgaagctctgcaggatatagcccggaggagggaagcatagagaacgggagtggccatctggaaatccagctggttatccaaatcctaaggggagctacagccagcggcatatacttgtttttgtgattattctgtatcagaaatgaaacagaccctcaaattaactttccttcctcatttcttgaggcttctgcttccaacaggcacctctaatcagaccttttctttgaaattcaacaagatttcttaatgctatttgccaagaccatttcacagaaaacattgactgtggctcttgccttatctgttcctttttaggtacagtaaaacaattgtgacagcagtttgagcttgctggagagtggcatcatggggacaaaaggaaacctctgacttgctaatggatgtagccagggactccccatagcaaagggtctgtggccagttgacatccaggatggctgcaagcgcacttgatggtcaggaagtttgcagatactcgccaaggcagagcgcaaagtgctagccactggaaatgcatgacttccctccacccctactctattctgtagttttttggttttgtttctgagacggagtctcagtctgtcacccaggctggagtgatctcagctcactgcaacctccacctcccaggttcaagcgactctcctgcctcagcctcccgagtagttgggattacaggtgactgccaccgtgcccggctaatgtttgtatttttagtagagacggggcttcaccatcttggccaggctggtcttgaactcctgacctcgtgacccacccgccttggcctcccaaagtgctgggattacaggtgtgagccaccacacccagcctctgtagttctttttacaacatttttcattataactttaaattttttaagcaactggaaaagtgttccttgctctcttggggggatttggctggtgccgaagtgtttctgaagtctcaagaactgccataaaatctcacgctgccatttccctgaacagatacatacatagagagagacagttttccaaactgtgtcacgcaggctgagtgcactggcaggatcacagctcacggcagcctcaacctccctggctcaagcgatccctcccctcagcctcctgagtagctgagactacaggtgagtgccaccacactcagctaattttcaaattttttgtagacagggtctccctatgttgcccaggctggtcttgaactcctagactcaagtgatcctcctgtcttggcctcccaaagtgctgagattacaggtgtgagccactgtgcccagcagtttcccagaatatatttaaatgcaaagttacatgaggggaaaacatgtatgtttgctcctgttgttactgggtaggttctgaacagcagaaacccatgtgcagggtgggctggtgaaggcccctctccgcaaggtggtagcaggaaaaggtccttgacttgatgaatttggtctgcctctgagccactggaggaagctgttttgagccagggttttttggcctaaagccagcatttcctcagtctccctttgtggttcgaaggatatggactattgcaatacatttcttccttcaaatcctgccactgttttgttggcccacaactaataggacctcaaaataagccatgctgctttgcacacacactagccttcttttgtacttttcattctggatgggcttggccaaaacaggctcaggccaaagacctcccaagctgtatgtacttccagtatcctgaaacagtgtttggtgacataatgccaagggtaaacaagcctgatttaggcactgctttatccaggggcttcacccatgaaattaataaaacttatctgagtcacttgaaacttggttcccagaaaacacatttctggtttataatctccttttatgctcacctgacattaattatctatccttgatgatgtgtttaaactgagtagcagaaaacagaggccacactttctgggaaattttaaaggaagaaaccatttttaatgagatgaaaatatttaacgaatttaaaaagctaatgacaattttgagaaaaggtttgggatgtatattgctatgtaatttaataaactgattttatggatataaata

SEQ ID NO: 128008 - DNA, 988 bp, Homo sapiens
  Payload ID: 5068
  Gene Symbol: DSCR3
  Gene Name: Down syndrome critical region 3
  ENST ID: ENST00000398998
  CDS Start-End: 239-988
ggggtgaaccgtgacagcgcttcggcccgcactaaggccggctcttgtgccggaaggaggaaggcgtgggcattcgcccctcggagctagggagtgtgtgcgacgccgctgcgaggtcacgtgagccactgccggcagagagggaaaggggcggggcccagaacgaagcggggaggcgccccttgtttccctggggtcacgcgcagccggaagtggcggctgctgcggagaattggagatggggaccgccctggacatcaagattaaaagagcgaataaagtttatcacgccgggcctatccagattatcaacagcaccatagaaatggtgaagccggggaaatttcccagcggcaaaacagaaatcccttttgaatttcctctgcacttgaagggtaacaaagttctgtatgagacgtatcatggcgtgtttgtcaacattcagtatacactgcgctgtgacatgaagcggtctctgttggccaaggacttgacaaagacctgtgaatttatcgttcactccgctcctcagaaggggaagtttactcccagtcccgtggacttcacgattacacctgaaaccttacagaacgtcaaagagagagctttgcttcccaaatttctccttcgaggacatctcaactcaacaaactgtgtcatcacgcagccactaacgggagagctggtggtggagagctcggaagccgccatcagaagcgtggagctgcagctggtgcgcgtggagacgtgcgggtgtgcagaaggctatgcccgcgacgccacggagattcagaacattcagatcgccgacggggatgtgtgcaggggcctctctgtccccatctacatggtcttccctaggctgttcacctgccctacactggagaccaccaacttcaaagtggaatttgaggttaacatcgtggtgctgcttcaccctgaccacctcatcacggagaacttcccgctgaagctctgcaggatatag

SEQ ID NO: 128009 - DNA, 821 bp, Homo sapiens
  Payload ID: 5068
  Gene Symbol: DSCR3
  Gene Name: Down syndrome critical region 3
  ENST ID: ENST00000399001
  CDS Start-End: 58-576
cttgtttccctggggtcacgcgcagccggaagtggcggctgctgcggagaattggagatggggaccgccctggacatcaagattaaaagagcgaataaagtttatcacgccgggcctcagaaggggaagtttactcccagtcccgtggacttcacgattacacctgaaaccttacagaacgtcaaagagagagctttgcttcccaaatttctccttcgaggacatctcaactcaacaaactgtgtcatcacgcagccactaacgggagagctggtggtggagagctcggaagccgccatcagaagcgtggagctgcagctggtgcgcgtggagacgtgcgggtgtgcagaaggctatgcccgcgacgccacggagattcagaacattcagatcgccgacggggatgtgtgcaggggcctctctgtccccatctacatggtcttccctaggctgttcacctgccctacactggagaccaccaacttcaaagtggaatttgaggttaacatcgtggtgctgcttcaccctgaccacctcatcacggagaacttcccgctgaagctctgcaggatatagcccggaggagggaagcatagagaacgggagtggccatctggaaatccagctggttatccaaatcctaaggggagctacagccagcggcatatacttgtttttgtgattattctgtatcagaaatgaaacagaccctcaaattaactttccttcctcatttcttgaggcttctgcttccaacaggcacctctaatcagaccttttctttgaaattcaacaagatttcttaatgctatttgccaaga

SEQ ID NO: 128010 - DNA, 937 bp, Homo sapiens
  Payload ID: 5068
  Gene Symbol: DSCR3
  Gene Name: Down syndrome critical region 3
  Uniprot ID: O14972
  ENST ID: ENST00000476950
  CDS Start-End: 53-865
ttccctggggtcacgcgcagccggaagtggcggctgctgcggagaattggagatggggaccgccctggacatcaagattaaaagagcgaataaagtttatcacgccggggaagtgctctctggcgtggtggtcatatcgagtaaggattcagtccaacaccagggagtgtctttgaccatggaaggaactgtaaacctccagctcagtgccaaaagtgtgggtgtgtttgaagctttttataattctgttaagcctatccagattatcaacagcaccatagaaatggtgaagccggggaaatttcccagcggcaaaacagaaatcccttttgaatttcctctgcacttgaagggtaacaaagttctgtatgagacgtatcatggcgtgtttgtcaacattcagcctcagaaggggaagtttactcccagtcccgtggacttcacgattacacctgaaaccttacagaacgtcaaagagagagctttgcttcccaaatttctccttcgaggacatctcaactcaacaaactgtgtcatcacgcagccactaacgggagagctggtggtggagagctcggaagccgccatcagaagcgtggagctgcagctggtgcgcgtggagacgtgcgggtgtgcagaaggctatgcccgcgacgccacggagattcagaacattcagatcgccgacggggatgtgtgcaggggcctctctgtccccatctacatggtcttccctaggctgttcacctgccctacactggagaccaccaacttcaaagtggaatttgaggttaacatcgtggtgctgcttcaccctgaccacctcatcacggagaacttcccgctgaagctctgcaggatatagcccggaggagggaagcatagagaacgggagtggccatctggaaatccagctggttatccaaatcctaagggg

SEQ ID NO: 128011 - DNA, 1098 bp, Homo sapiens
  Payload ID: 5069
  Gene Symbol: DSCR4
  Gene Name: Down syndrome critical region 4
  Uniprot ID: P56555
  ENST ID: ENST00000328264
  CDS Start-End: 106-462
cagtcacgggccagcctttcccttaaggatgtctgagagctggtctcctcactcttttcttccgcctattaaactttccgcttcttaactcacccatgtgtgtccatgtcgttaatcatcttgacgagagatgatgaaccccggatatttaccccagacagtgatgccgcttcaccagcattgcactctacttccccgcttcctgatcctgcctcagcttctcctctccacagagaagaaaaaattctgcctaaagtctgcaacatcgtttcctgcctgagtttcagcctgccagcttctcctacggattctggacttgccagccccacaatcataaccagagaggggcagcaattttgggcaaaatgtctgatttggaaataccaactttacctccatgggctccacaagaaatcagatgggagaagggacaagcagataagcgcaagcccatcaacctgaaggcataaaccacatccagccacctccttctgatcagcagcaaagctgacgttttgatctccatctgtctgattcttgtgtctacttctcagtttacaactccagtgggaaagaaagagctttatttacagacccataaaaatcccatcagtgtcgtcccctgctgagaggccatgtgagaccatatggaaaaacaacagccataatggcagcatggcagtggaagggtttgtcttgtgcccaggccttgcggtcatgcaagtttcttgtggatcctgttgggaccagccactcaccaaggctgagtaggtccacaaataatggggactttctaccagactcacagagaactgctgggtttttgggaagggtgtgcgtgtctttggggcatgcaagttggggttatagtggagacccagaggatgagaaaacttctctgcctcagcagaagagtggcagctgagagagaggcaagaaactcgcacccactgtggactggggcagagagattttgaggagaatgaaatccagaaactctgtgtggtattagtttgtatccagagggtgaccctcttctcaaggaaatgggtgtcatcaattttctacactattaaagatataaagttcttggcatta

SEQ ID NO: 128012 - DNA, 777 bp, Homo sapiens
  Payload ID: 5069
  Gene Symbol: DSCR4
  Gene Name: Down syndrome critical region 4
  ENST ID: ENST00000398948
  CDS Start-End: 85-468
cttaaggatgtctgagagctggtctcctcactcttttcttccgcctattaaactttccgcttcttaactcacccatgtgtgtccatgtcgttaatcatcttgacgagagatgatgaaccccggatatttaccccagacagtgatgccgcttcaccagcattgcactctacttccccgcttcctgatcctgcctcagcttctcctctccacagagaagaaaaaattctgcctaaagtctgcaacatcgtttcctgcctgagtttcagcctgccagcttctcctacggattctggacttgccagccccacaatcatcagggatcctgtggcctccaaatcccagttggaactcagctcaaggccagcaaaaacagagcctagagcctggagcgcacagtttggcaggtgcagtgcgcagccccaaccccaagtggattttctacctgcagagaatacctgctctgggtgaccacagctgctgagaaatcttcccagaagaggcaggatgggatggaatgctgggattacagatgaactttcctggccaccctggataagcagaacctgaataaagtaaatcatgatcacaccccaaggcaagacagaggcctctggcatgtaagaaggctccccagtggtcaagacagaagcaggcttcaagaaatggaaagtattggtgggcagagtggggtcagtgagggatgagggtgcaggagcactcagagaagcacacaaggtgtccttctgagctggatgcttgtgataactggagagggaa

SEQ ID NO: 128013 - DNA, 799 bp, Homo sapiens
  Payload ID: 5069
  Gene Symbol: DSCR4
  Gene Name: Down syndrome critical region 4
  ENST ID: ENST00000482032
  CDS Start-End: 77-316
tgtctgagagctggtctcctcactcttttcttccgcctattaaactttccgcttcttaactcacccatgtgtgtccatgtcgttaatcatcttgacgagagatgatgaaccccggatatttaccccagacagtgatgccgcttcaccagcattgcactctacttccccgcttcctgatcctgcctcagcttctcctctccacagagaagaaaaaattctgcctaaagtctgcaacatcgtttcctgcctgagtttcagcctgccagcttctcctacggattctggacttgccagccccacaatcataagctggtgaaggctctcaggtaaaggaaatgacttgggacatctggctcctgttctgacataagtgaagatcaaacaaggtcacatgtttatgaggaagcaccttttaattgctgcattctctaaatatgaagagttacaatgattaacgaattgcatccttgtcacccctccaagcacattgagataagctttctcaacaaggagaatcttgagatgtagtttgaatcacaaggcattacctaatggatataaaattggatagtgtttttggcttagatgggagcagatctgacgtttccaaggaaatgtatacacatgcaccttccattttacataaatttcaggaaattcaagacctccagaagctcagtcatcactctctgaggagatcaacttcatgagccttctctacctgagagaggactacaaatactgttttattccatgatcaatcagctgagtgtagaaagaaatatattacctcttcctc

SEQ ID NO: 128014 - DNA, 552 bp, Homo sapiens
  Payload ID: 5070
  Gene Symbol: DSCR8
  Gene Name: Down syndrome critical region 8
  Uniprot ID: Q96T75
  ENST ID: ENST00000357704
  CDS Start-End: 150-443
accccaccctaatcttgttatgcaaataggcttcccacttggcaggggccgtcttgtccactcgtttctgtaaacatgggtggcaaaaagagaagatggagctgccatttagaacatgcctaatcccagcttcatcttgctgagcaaaaatgaaggagcctggacccaactttgttactgtgagaaagggtcttcattcattcaagatggcatttgttaagcacctacttctctttctgtcacctaggctggagtgcagtggttcaatcacggatcactgcagcctccacctcccagttcaagaaattctcatgtctcagcctcctgagcagctaggattacagacaaaccttggaaatcaagaaagttctggaatgatgaagctgttcatgccaagaccgaaagtgctggcccagtatgagtccattcagttcatgccgtgacaattttcttggaactcctttttattgttagttctcacttgtttccatatttagtgaatgtacatttaattgcaaagctgtcattaataaaaattcttatagtacctca

SEQ ID NO: 128015 - DNA, 534 bp, Homo sapiens
  Payload ID: 5070
  Gene Symbol: DSCR8
  Gene Name: Down syndrome critical region 8
  Uniprot ID: Q96T75
  ENST ID: ENST00000400477
  CDS Start-End: 150-425
accccaccctaatcttgttatgcaaataggcttcccacttggcaggggccgtcttgtccactcgtttctgtaaacatgggtggcaaaaagagaagatggagctgccatttagaacatgcctaatcccagcttcatcttgctgagcaaaaatgaaggagcctggacccaactttgttactgtgagaaagggtcttcattcattcaagatggcatttgttaagcacctactgctggagtgcagtggttcaatcacggatcactgcagcctccacctcccagttcaagaaattctcatgtctcagcctcctgagcagctaggattacagacaaaccttggaaatcaagaaagttctggaatgatgaagctgttcatgccaagaccgaaagtgctggcccagtatgagtccattcagttcatgccgtgacaattttcttggaactcctttttattgttagttctcacttgtttccatatttagtgaatgtacatttaattgcaaagctgtcattaataaaaattcttatagtacctca

SEQ ID NO: 128016 - DNA, 403 bp, Homo sapiens
  Payload ID: 5070
  Gene Symbol: DSCR8
  Gene Name: Down syndrome critical region 8
  Uniprot ID: Q96T75
  ENST ID: ENST00000614538
  CDS Start-End: 1-294
atgaaggagcctggacccaactttgttactgtgagaaagggtcttcattcattcaagatggcatttgttaagcacctacttctctttctgtcacctaggctggagtgcagtggttcaatcacggatcactgcagcctccacctcccagttcaagaaattctcatgtctcagcctcctgagcagctaggattacagacaaaccttggaaatcaagaaagttctggaatgatgaagctgttcatgccaagaccgaaagtgctggcccagtatgagtccattcagttcatgccgtgacaattttcttggaactcctttttattgttagttctcacttgtttccatatttagtgaatgtacatttaattgcaaagctgtcattaataaaaattcttatagtacctca

SEQ ID NO: 128017 - DNA, 1647 bp, Homo sapiens
  Payload ID: 5071
  Gene Symbol: DR1
  Gene Name: down-regulator of transcription 1
  Uniprot ID: Q01658
  ENST ID: ENST00000370267
  CDS Start-End: 588-1118
aaaccttccctggcatctggagggaccaccgttgccgcgtcttcggcttccacgatctgcgttcgggctacgcggccacggcggcagccactgcgactcccactgtgcctggctctgtccatattagttcccaggcggccgtcgccgttccagcagcggcagcggcagcggcagcggcggacatgttgtgaggcggcggcgcgggtgtctgaaggatggtttggccgaggcggcggcaacggctgctggcggcggcgacagcgcccgcccctctgaggagacacgaaggtggttccccagccgctcaaatttccggaccaccgcgctttcccctcctcagcctgggctgtgctctctctagaatcctcgggcccccactttcttcccaaactcatcctaaatctctcacacacgcgagtgttcccagccctcaagccagctgctcctccgttcattttctgcaccctcttcgcaaagcaccccccgggatcactctccgagggcgactttttgagaaatctcggtggagtagtggaccagagctggggagtttttaaaagccggggcgcgagaaacaggaaggtactatggcttcctcgtctggcaacgatgatgatctcactatccccagagctgctatcaataaaatgatcaaagagactcttcctaatgtccgggtggccaacgatgctcgagagctggtggtgaactgctgcactgaattcattcaccttatatcttctgaagccaatgagatttgtaacaaatcggaaaagaagaccatctcaccagagcatgtcatacaagcactagaaagtttgggatttggctcttacatcagtgaagtaaaagaagtcttgcaagagtgtaaaacagtagcattaaaaagaagaaaggccagttctcgtttggaaaaccttggcattcctgaagaagagttattgagacagcaacaagaattatttgcaaaagctagacagcaacaagcagaattggcccaacaggaatggcttcaaatgcagcaagctgcccaacaagcccagcttgctgctgcctcagccagtgcatctaatcaggcgggatcttctcaggatgaagaagatgatgatgatatctgaaattcaccagctgagtttctatttcttctataaatgtttttccctgcacaacaaaaacagtgaaagaaatgcttatctgtaattttgtatgcatcttggtggacttgtcattggtattctagggatgtctgctattaagtttcatctattgtgtgctatacatgtaaaaactgtctctttgaactattgaaaatttaaggttcagtataatatcaattttgaatttttaatggtgtttatgaaattttagatagcagcgagtccttcgtttgatcaataaacagtgttacagataacttcaagtttataaaaatacagtgaaatttctacaaagctctaaatctgcatttgcatttcctctgcccttttaactaaactaaaacttgtgaattttaaattattaaggggggggtgctgtgtgaatcagtagacattggattgggttggtgaaagagttcagttctgtagtatctgaatttgtcttttaaaatgagtacatatataggcaataaatatatatgctcagatc

SEQ ID NO: 128018 - DNA, 10148 bp, Homo sapiens
  Payload ID: 5071
  Gene Symbol: DR1
  Gene Name: down-regulator of transcription 1
  Uniprot ID: Q01658
  ENST ID: ENST00000370272
  CDS Start-End: 759-1289
gaacgaggcttccggtggcgcaaagggtgtcgggagcggcttcctgcaaaccttccctggcatctggagggaccaccgttgccgcgtcttcggcttccacgatctgcgttcgggctacgcggccacggcggcagccactgcgactcccactgtgcctggctctgtccatattagttcccaggcggccgtcgccgttccagcagcggcagcggcagcggcagcggcggacatgttgtgaggcggcggcgcgggtgtctgaaggatggtttggccgaggcggcggcaacggctgctggcggcggcggcagcggcagcggggcctcgggctctatagagccgagcccgctgggtacccgcccggtaccgcggcgaggccagtgcccctggatcttgcctctgctccgacgccgttggggaccagttaggcgacagcgcccgcccctctgaggagacacgaaggtggttccccagccgctcaaatttccggaccaccgcgctttcccctcctcagcctgggctgtgctctctctagaatcctcgggcccccactttcttcccaaactcatcctaaatctctcacacacgcgagtgttcccagccctcaagccagctgctcctccgttcattttctgcaccctcttcgcaaagcaccccccgggatcactctccgagggcgactttttgagaaatctcggtggagtagtggaccagagctggggagtttttaaaagccggggcgcgagaaacaggaaggtactatggcttcctcgtctggcaacgatgatgatctcactatccccagagctgctatcaataaaatgatcaaagagactcttcctaatgtccgggtggccaacgatgctcgagagctggtggtgaactgctgcactgaattcattcaccttatatcttctgaagccaatgagatttgtaacaaatcggaaaagaagaccatctcaccagagcatgtcatacaagcactagaaagtttgggatttggctcttacatcagtgaagtaaaagaagtcttgcaagagtgtaaaacagtagcattaaaaagaagaaaggccagttctcgtttggaaaaccttggcattcctgaagaagagttattgagacagcaacaagaattatttgcaaaagctagacagcaacaagcagaattggcccaacaggaatggcttcaaatgcagcaagctgcccaacaagcccagcttgctgctgcctcagccagtgcatctaatcaggcgggatcttctcaggatgaagaagatgatgatgatatctgaaattcaccagctgagtttctatttcttctataaatgtttttccctgcacaacaaaaacagtgaaagaaatgcttatctgtaattttgtatgcatcttggtggacttgtcattggtattctagggatgtctgctattaagtttcatctattgtgtgctatacatgtaaaaactgtctctttgaactattgaaaatttaaggttcagtataatatcaattttgaatttttaatggtgtttatgaaattttagatagcagcgagtccttcgtttgatcaataaacagtgttacagataacttcaagtttataaaaatacagtgaaatttctacaaagctctaaatctgcatttgcatttcctctgcccttttaactaaactaaaacttgtgaattttaaattattaaggggggggtgctgtgtgaatcagtagacattggattgggttggtgaaagagttcagttctgtagtatctgaatttgtcttttaaaatgagtacatatataggcaataaatatatatgctcagatcaatatacttgtttagaaaaacttcaagacattcaaaaactaggaaggagtatgtttaatagtatttgtataaatttggtggttatgtttttttattttgtttctgttttgtgtagaggtaaaaactatagttttattacagcataattcattttgagctccactatgacatttcaaagactgcccagtttggaagtctgtcatgatttttactctttcactccaattcagtaattgttgatagtattacttacctagtccatccatactcatattattcaaatatataggtggtacttttgaaacaattacattggttctcttggtttaactgaggtttatgaatattcaaacctttgctgggggaaagaaatgaaagttaatgagcatgcttgctatgagagagggatttttaatttaacttgtagttatagtttacttattgtttttagaattacttttacattttcccaactagatggcctagagtccaacattaccttttgagatgacattattgtctccataattgagtgatagctttaaaaaaaagattagttttgcttaagaagttatgttacaactgatcagccctatatgaattaactgatcagccctatatgaaacataagttgtgttataacttatcagccgtatatggaacataaatagtttctacctgcttgttagagaagctttaatttggttctaataaatacagtatggtagtgtttataggaatccaggatgttgaagaaatggcataatgtctatattttggaaacagaaaggaaaagtcacttaagatagtattaagtaattaaattcctatgtcagttgccaaatcttttaaacttatgtattcaccaagcccaaaaatagattgtggctcccaggattccaattttaattggagagctaagtaagtaaagttttataactgttaggtttcttaatgatcatattttgcagttttagtaaaagggaaatattgttatacatttattaaatatacttcccccatgaagtgaaaaggttaattttgctgaatgttttaagttgaagttacttcatggatgtcatacccatgaagtgcatttggatgagatagaagaaattgttttttaaaaagtttaagtaccaaaggtagtctagtctagaacgataagttaatacgtgttggcttttctaatttgtactgtaacatccttatactttctattttaagtatatctgtttcttaagtaaacaacttagatattttccacacctttttttttttttctgatgcagagttcaggttaatattttactgcatctgataatgtattatacgtttgaagcctagtgacttttcattttgacattcttgtgatttcatatgctgtattcttcaagcaataaaattgtgatgtgttttataaatggtttttatatttaatgttctatagagagatttctattattaccatttttactattttcaagaatcttaggcccaaaagacattttggtcatttggtatgtagtacctgccttttgtttttgtttactgttatttcaaaaaatgtggttttacttgtatttttataatttacagtcctaagatcgaggcataacaaagcttacttatgcaatattttatttttaggttttttcttttttttttttttttttttttttttttagcatttaagagtcactattatgttttgccagttaaaattttttaaatcttttgaagagagaaacaaaatcttcagcgttcttgagaaataaaattattgttcagtaagtatttttccatccccttgaatatatgttatatattctttttcggcagattatcagattagtaagtgtttaaaaggcatcagtttttaaaactgcatataccacacacacacaaaacagtacacaaataaaggttttcacaaattaaacaaactcacatactagtcttcagatcaaaacacagagcattatgtgtaccccagaagccctcctctttccccatcttaacactgtcttctttcttgctgaaagttactatcctgacttctaaaatcatagattagttttgcctgttttttattttatgtaaatgtaatcatacataatacactttttttcattcatcatttttgtgaatattttagtttcttgttgccactgtaacaaactaccacaaacttagtgacttaaaacaacacagatttattcttttatagtcctggagatcagaagtccaaaaatcagtttcattaggcctaaatcaaagtatcagcagggttggctctttattgaggttgtgagggagaatgttttcttcccttttttggcttccagtgacggcctgtatttatgggcttgtgaccccttcctctctatgatcaaagcttgcttttgtcattatatcatcttctcttctgtagtcagatctttccctgcctctaagtttagggctcacctgcataaagcagggataatccccctatctcaagatccttaatttaatcacatctgcagaatctcttttgccatataagtgacattcacaggttccagggattcatacgctggctatctttggaggccgttattcaacctgccaaagtgagatccattcttattgttgcatgtatttgtagttcattcattctcattgctgtatagtcttccgtttgtttatccatttttcattacatccaaaagttattcattctcccattaatagtcttttgagaatttttcaattctgagctattatgaatagtactgtgtagaacattcttatacatgtcttttggtgagtgtatacatttccattgagtataaacctaagaatggaattgccaggttgtagggtgtgtatattttcagttttagtatttactgtcaaacagttttccaaagtgactgtaagaaggcaccattttaatgtgtagcataaaaatgaattacgctaatgatcttagtgggttgaatttctcgaaacacctaaattgtaccaaatgagttatattgcagcaggtatgttgttaatttcatataacaggaaaataagagcaaaagtaattgcccttattaactgacacattagtattacatactcattaggttattgctccttagaaaaaatgcaaattttaagtaatcgtaagtagtatgttgaattagtatgttgtgggaaaatctgtgatttaattttttaattgaattttaaattttgggttataacctcattaaaatgcatgatatttccttatataggtttctaaattatgtctgtccaactcatctatatccaaatggccattaggaagaattatccaattcagatggcataggcactgccttccaatttcttcatttgtatttttttgttgctgttttcttttttgcctctgtccccaacaatttgaccacaagtcctaccccacctcctctgtttttcaccatcccccaggatataaagtgtcatggttaggatcggccagggtgaagagaatgataacataagtagcctcctttcacctaaagtattaccactggttcttatcctatttcctcaaaataaatgagaagagaaagtaaggaataagaggaagaaactttttttttttttttaaagaaacagggtctcactatgtttcctttttcttttttcttttcttttctttcttttttttttttttttttttgagacagagtcttgctctgtcacccaggctggaatgcagtggcgcgatctcggctcactgcaagctccgcctcccgggttcacgccattctcctgcctcagcctcctgagtagctgggactacaggtgcccgctagcacgcccagctaattttttttgtttttttttagtagagacagggtttcaccgtgttagccaggatggtctcgatctcctgacctcgtgatccacccgccttggcctcccaaagtgctgggattacaggcgtgagccactgcgcccggcctatgtttcttaatatagattgcagtggctagattacagtgactattcacaggcataatcataatgcaccatagcctcaaactcctgggctcaagcaatccaaaaggaggaaacttttaacttatgatcagtttctaccataaatcaagcaacttagaaaaaccttagaacagggtttctcaaaccaagcattgttagtatttggggttggttaagtctttgtttgtgggagcctatcctgtgcattgtaggatttctagcagcataattggcttatgcccacttgatgtcattagcaccactccccaccctacttccagttgtgacaacccaaaaatgtctccagacatagccaactgtccctgggtgttgcgagtataggaggcaaaattgcaccctgttgaaaaccaccaccttagatcatctaggttttacttttaggataagacacttgagggaaaggctgtgaaactgaacctctgttagaagcaacacacagtatcactgcaaaaagactaaaagaaataggtgatttggaaagaggaggcccaggattaaaatatgtttccaagaaagtcaaatcttacaggagactcttgacttcacatctgctgatccctttacccgataggacctagagcagccattataaatctctgtacctgcttgctgcttttctacctcattgttagccacacccagtttgaaacagatgaggtatgctatttcataactagtacatcttttaataagcattttttattgtgattaaatatgcatatcgtaaaattcaccactttaaccagttttaagtgttcaattctgtggcattaagtatattcatactattgtgcaaccaccaccaccatccgtctacagaactcttcatcttcccaaactgaaattatgtattcattaaacaataaccacccattacctcctctctcctcagcctctggtaaccagcattcagtctctatgaattgactactctggatatctaaatggattcattcttatttcatttaccataatgtcttcaaagttcattcatgttgtagcatgtattagaatttctttcctcttaaaggccaaatatgccgtagtatgtaaataccgtattttgtttatcagttcatccattaatggacactgggttgcttctgctttttggctattgtgaataatgcttctgtgaacgtgggtatacaaataactgtttgagtcctaataggcttgttatttttgagtgcacagatctgtatattcgcaattgaaatagggaaagtctttatattcatataaagataatttataatacaataagtcctcaatgttgttgataggttctgggaaactgcgagtttaagaaaaacaacatataatgaaatcaattttaccataggtgaactgatataaataagagttaagtccctatggcatatatttctggttacaaaaacactaccaaatttctaataaagacccaaaacacttctaaaattaaacattgagattaatatgagctttatatacatttaaaaaggataaaaacaagtaagaattggctggacatggtggcttacgcctgtaatctcaacactgggaagtcgaggtgggcagatggcttgacctcaggagttcggaaccagcctgggtaatatggtgaaacccgtctctacagaaaaattcaaaaattagccagaggtggtggcttgcacctgtagtcccagctactcgggagcctgatgtgggaggatcccttgagcctgggaggtcgaggctgcagtgagccatgatcacgctactgcactccagtctgggcaacagagcaaaatcctatctcaaaaaaaatatatatattatccagccccaaatgtttatggggttgttattgataaaccctgcattaaacaatcccacagtcggtgctgcggtgagccgtgatggtaccactgcattccagcctgggtgacagaatgagaccctgtctcaaaaaaaaaaaaaaaaagtaaaaattatttacccaatatttggcgaatcagtgagtgacagcagttgtagtgctagtgggttaaatcaaggaataactgttgggaagtgaaaattttaaggagcacctcctaccaccatgcagttcaaaaacaaaaaataagaaataaagtgggcttgctgagtgctttcatactgcatcatttattgtgcatttgtatgattattatatactttacaaattttcgttttacagtaatttgtattcattcgtttttcaacctgcttatttcagttcagtgtcttgggtagctggagcctatcccagcagctcagggagcaaagtgggagccaaccctggacaggatgccttttcatcacagggcgcactcacacggcacacacacgcatactgggaccatttagctgtaccaattcacctaacgtgcatctttgggaattgagaagaaaccagaatacccagagaaaactcatgcagatatgtggaggacatgcaaaattcacacagacagtggccctggttgtaaataattgtttttcatcaatgttataatgaaattacaggccgggtgtggtggcttacgcctgtaatcccagcactttgggaggccgaggcgggtggatcacgaggtcaggagatagagaccatcccggccaacatagtgaaacctcatctgtgctaaaatacaaaaaattagccaggcttggtggtgtgcacctgtagtcccagctacttgggaggctgaggcaggggatttcttgaacccagaaggcggaggttgcagtgagttgagatcgcgacactgcactccagcctgacaacagagcaagacttcgtctcaaaaaaacaaacaaaaaaagaaattacattagttgaggacctgctgtatgtgatatgaacaatgaggatcaactctttttgtaatagtttttttacatatgttatttcatttgtttatttcctctgtgagggtaagtattgatagtccagtcatagactggtaacacaggcacaccattaaaaataatagacatacagtatgcagtattttgttttacttatgaaactccgtattttatgtatgatgtattgagtatgaagaatagtacatactgtttccttttaactttatgtttcttgcctttgtatattttatatgaatagcacttgtcactaacatagaaagcagtagaggtggaagagggagacttgccagaataagtttttaatgtgaatcagagatttttattaggaattgggagtggaaggagagagatagtattagaaagtatgtatgcagcaaaggatggagaaactgtccttgttgttaaggcatctaaggatgctccaattactggggaaaacataccaggctcaaaatggtctgattatgcaaataccttctaatacgtttgtttcttttgttgtgcctataaaagatgccattaacttcatatttatgtcactaataaacttctagaatccatgtagtagggtgtagtagtgtggttaagctatgaagaacaatggtatttatttccaaaacacttatttggtatattacataggatagagtatgttttctaagccaaatagtgttaggttttcatgtgcagttgccttacacatatactagtagcccttacaaaatttcgtctgtctttattataaacatgttgtaagtgaggaaactaagattccaagaaattaagtactgttggccctctgtgtctgggggttccacatctatagatcgaccaaccatggactgatggattgaaaacatttggggaaaaaacaaaaaataacccaacaatgaaatagtataaattttaaaaataatataacaatatttatatatcatttacattatgttagatattataatctagagatgattagcatccttggattttggattttggtatccttggggtatcctggaaccaatccctggcggataccaagggatgactgtaatataataacatctaacaagtgaaggatttgaaccccaatgtaagtaattatgaaaactatttttcttccactagaacttttttccccaaaaatactctggaaatactggaacaaatactaaaataaatgacctttatttgaagatcttttaaaaaaattataagcctgcctgaggatagcaaaattgtgtgcttttgcaaggtaattgtagaactcattctaaggaagcagaggtaatgtctgttactattttcagctccctttttctgtccactgttgtctaaatgattcactcagtgttatgcagaatatgagaagttattttataaagttgatttgtggtataggc

SEQ ID NO: 128019 - DNA, 2028 bp, Homo sapiens
  Payload ID: 5072
  Gene Symbol: DONSON
  Gene Name: downstream neighbor of SON
  ENST ID: ENST00000303113
  CDS Start-End: 30-1688
cggccggctaccctcagccgccgcgcgtcatggccctttcggtgcccggctactcaccgggcttccgaaagccgcccgaggtagtgcggctccgacggaaaagggcccggagccgtggagctgccgcctccccgccccgtgagctgacggagccggcggcccgccgagccgccctggtggcggggctgcctcttcgccctttccctgctgcggggggcagaggcggtggcagcggcggcggcccggccgctgctcggaggaaccccttcgcccgcctggacaaccgaccgcgggtcgccgcggagccccccgacgggccggcccgcgagcagccggaggccccggtcccgtttttagattctaatcaagaaaatgatttgctatgggaagagaagtttcctgaaagaacaactgttactgaattacctcagacttcacatgtatcattctccgagcctgatattccgtcctcaaaaagtactgagttacctgtggactggagtattaaaacgcgactccttttcacctcttctcaaccctttacctgggcagatcatttgaaagcacaggaagaagctcaaggtcttgtccagcattgtagggcaacagaagttactttgcctaaaagtatacagagccttatctattggctccaccctgctttgtcttggctaccactgttccctcgtattggagctgatagaaaaatggctggaaagacaagtccttggtcaaatgatgcaaccctgcagcatgttttaatgagtgactggtctgtgagctttacttctctatataatttgctgaagacaaaactttgcccctatttctacgtttgtacctatcagtttactgtcctgttccgagcagcaggattagctggaagtgacttaatcacagctctcatatctccaacaactcgaggtttaagagaagctatgagaaatgaaggtattgaattttctctgcctttaataaaagaaagtggccataagaaggagacagcatctggaacaagcttgggatatggggaggagcaagccatcagtgatgaggatgaagaggaaagtttttcctggctggaagagatgggtgtgcaagataaaattaaaaagccagacatactttctatcaagctgcgtaaagagaaacatgaagtacaaatggatcacagacctgaatctgttgtgttggtaaaaggaatcaacacctttacattgctcaattttttgattaactctaagagtttagttgctacctcaggtccacaggcaggacttcctccaaccctcttgtcccctgttgctttccgaggtgccacaatgcaaatgcttaaggcacggagtgtgaatgtgaagacacaagctctttctggatacagagaccaatttagtttggagattacaggtcctatcatgcctcattctctgcattcactgaccatgctgctcaaatcttcacagagtggatctttctctgcagtactgtatccacacgagccaactgctgtatttaacatctgcctgcaaatggacaaagtacttgatatggaggttgttcataaggagcttactaactgtggtttgcaccctaacactctggagcaacttagtcaaataccgttacttgggaaatcatctttacggaatgtggtgctgagagactacatttataattggagatcctgaacaccaaaatctccatcaaagcagacacaggatgtttgcctgcaggggggagaaatacccagttttaaattatttccaccaacttctgcaacaaataatgaattcaaggtgggattagggtaagaggaaattcaaaaacgtgctctcacctgacagatctttcattgcagcagagaagttcccagacctcttttgtgctctttctcctactgcaacaagacctttaaaaaaaaattgttcactaaataaatttcaaagcaccactttaaaacaaagatccctctgtaggagtctgaacctcaaaatgtatgccttcaaataaaatcagcagattcctagt

SEQ ID NO: 128020 - DNA, 2170 bp, Homo sapiens
  Payload ID: 5072
  Gene Symbol: DONSON
  Gene Name: downstream neighbor of SON
  Uniprot ID: Q9NYP3
  ENST ID: ENST00000303071
  CDS Start-End: 68-1768
aggggcgggcccggcgcgcgcgggaagtctctgtagggcggccggctaccctcagccgccgcgcgtcatggccctttcggtgcccggctactcaccgggcttccgaaagccgcccgaggtagtgcggctccgacggaaaagggcccggagccgtggagctgccgcctccccgccccgtgagctgacggagccggcggcccgccgagccgccctggtggcggggctgcctcttcgccctttccctgctgcggggggcagaggcggtggcagcggcggcggcccggccgctgctcggaggaaccccttcgcccgcctggacaaccgaccgcgggtcgccgcggagccccccgacgggccggcccgcgagcagccggaggccccggtcccgtttttagattctaatcaagaaaatgatttgctatgggaagagaagtttcctgaaagaacaactgttactgaattacctcagacttcacatgtatcattctccgagcctgatattccgtcctcaaaaagtactgagttacctgtggactggagtattaaaacgcgactccttttcacctcttctcaaccctttacctgggcagatcatttgaaagcacaggaagaagctcaaggtcttgtccagcattgtagggcaacagaagttactttgcctaaaagtatacaggatcccaaactctcctctgagctccgttgtaccttccagcagagccttatctattggctccaccctgctttgtcttggctaccactgttccctcgtattggagctgatagaaaaatggctggaaagacaagtccttggtcaaatgatgcaaccctgcagcatgttttaatgagtgactggtctgtgagctttacttctctatataatttgctgaagacaaaactttgcccctatttctacgtttgtacctatcagtttactgtcctgttccgagcagcaggattagctggaagtgacttaatcacagctctcatatctccaacaactcgaggtttaagagaagctatgagaaatgaaggtattgaattttctctgcctttaataaaagaaagtggccataagaaggagacagcatctggaacaagcttgggatatggggaggagcaagccatcagtgatgaggatgaagaggaaagtttttcctggctggaagagatgggtgtgcaagataaaattaaaaagccagacatactttctatcaagctgcgtaaagagaaacatgaagtacaaatggatcacagacctgaatctgttgtgttggtaaaaggaatcaacacctttacattgctcaattttttgattaactctaagagtttagttgctacctcaggtccacaggcaggacttcctccaaccctcttgtcccctgttgctttccgaggtgccacaatgcaaatgcttaaggcacggagtgtgaatgtgaagacacaagctctttctggatacagagaccaatttagtttggagattacaggtcctatcatgcctcattctctgcattcactgaccatgctgctcaaatcttcacagagtggatctttctctgcagtactgtatccacacgagccaactgctgtatttaacatctgcctgcaaatggacaaagtacttgatatggaggttgttcataaggagcttactaactgtggtttgcaccctaacactctggagcaacttagtcaaataccgttacttgggaaatcatctttacggaatgtggtgctgagagactacatttataattggagatcctgaacaccaaagtaagcctaaaaggaatctttgaggaaaaaagccttctagcaaggaaattcaagattcttgaagttgaaggaatatactgaaatgtttataaacataacttttactacagtagcatctaaggttttaaatgtgttttactattttcagattagatttttagatataaagatgaaaaactcagataactcaaatgagatatctatatccctacaacctaattgtatattgagcagaaactgaattaatatgcttccttgcaaatgggaaatcacatagcagttaccccatggcattgtgactaatggcatcagggcaaaaatatgttactttacgatttacctgttagcaggttcttgtttcataaaggtagaaaataaatacagacaacatcta

SEQ ID NO: 128021 - DNA, 1820 bp, Homo sapiens
  Payload ID: 5072
  Gene Symbol: DONSON
  Gene Name: downstream neighbor of SON
  ENST ID: ENST00000417871
  CDS Start-End: 30-440
cggccggctaccctcagccgccgcgcgtcatggccctttcggtgcccggctactcaccgggcttccgaaagccgcccgaggtagtgcggctccgacggaaaagggcccggagccgtggagctgccgcctccccgccccgtgagctgacggagccggcggcccgccgagccgccctggtggcggggctgcctcttcgccctttccctgctgcggggggcagaggcggtggcagcggcggcggcccggccgctgctcggaggaaccccttcgcccgcctggacaaccgaccgcgggtcgccgcggagccccccgacgggccggcccgcgagcagccggaggccccggtcccgtttttagattctaatcaagaaaatgatttgctatgggaagagaagtttcctgaaagaacaactgttactgaattacctcagatcatttgaaagcacaggaagaagctcaaggtcttgtccagcattgtagggcaacagaagttactttgcctaaaagtatacaggatcccaaactctcctctgagctccgttgtaccttccagcagagccttatctattggctccaccctgctttgtcttggctaccactgttccctcgtattggagctgatagaaaaatggctggaaagacaagtccttggtcaaatgatgcaaccctgcagcatgttttaatgagtgactggtattgaattttctctgcctttaataaaagaaagtggccataagaaggagacagcatctggaacaagcttgggatatggggaggagcaagccatcagtgatgaggatgaagaggaaagtttttcctggctggaagagatgggtgtgcaagataaaattaaaaagccagacatactttctatcaagctgcgtaaagagaaacatgaagtacaaatggatcacagacctgaatctgttgtgttggtaaaaggaatcaacacctttacattgctcaattttttgattaactctaagagtttagttgctacctcaggtccacaggcaggacttcctccaaccctcttgtcccctgttgctttccgaggtgccacaatgcaaatgcttaaggcacggagtgtgaatgtgaagacacaagctctttctggatacagagaccaatttagtttggagattacaggtcctatcatgcctcattctctgcattcactgaccatgctgctcaaatcttcacagagtggatctttctctgcagtactgtatccacacgagccaactgctgtatttaacatctgcctgcaaatggacaaagtacttgatatggaggttgttcataaggagcttactaactgtggtttgcaccctaacactctggagcaacttagtcaaataccgttacttgggaaatcatctttacggaatgtggtgctgagagactacatttataattggagatcctgaacaccaaagtaagcctaaaaggaatctttgaggaaaaaagccttctagcaaggaaattcaagattcttgaagttgaaggaatatactgaaatgtttataaacataacttttactacagtagcatctaaggttttaaatgtgttttactattttcagattagatttttagatataaagatgaaaaactcagataactcaaatgagatatctatatccctacaacctaattgtatattgagcagaaactgaattaatatgcttccttgcaaatgggaaatcacatagcagttaccccatggcattgtgactaatggcatcagggcaaaaatatgttactttacgatttacctgttagcaggttcttgtttcataaaggtagaaaataaatac

SEQ ID NO: 128022 - DNA, 1180 bp, Homo sapiens
  Payload ID: 5072
  Gene Symbol: DONSON
  Gene Name: downstream neighbor of SON
  ENST ID: ENST00000444517
  CDS Start-End: 1-477
tttttagattctaatcaagaaaatgatttgctatgggaagagaagtttcctgaaagaacaactgttactgaattacctcagacttcacatgtatcattctccgagcctgatattccgtcctcaaaaagtactgagttacctgtggactggagtattaaaacgcgactccttttcacctcttctcaaccctttacctgggcagatcatttgaaagcacaggaagaagctcaaggtcttgtccagcattgtagggcaacagaagttactttgcctaaaagtatacaggatcccaaactctcctctgagctccgttgtaccttccagcagagccttatctattggctccaccctgctttgtcttggctaccactgttccctcgtattggagctgatagaaaaatggctggaaagacaagtccttggtcaaatgatgcaaccctgcagcatgttttaatgagtgactggcacggagtgtgaatgtgaagacacaagctctttctggatacagagaccaatttagtttggagattacaggtcctatcatgcctcattctctgcattcactgaccatgctgctcaaatcttcacagagtggatctttctctgcagtactgtatccacacgagccaactgctgtatttaacatctgcctgcaaatggacaaagtacttgatatggaggttgttcataaggagcttactaactgtggtttgcaccctaacactctggagcaacttagtcaaataccgttacttgggaaatcatctttacggaatgtggtgctgagagactacatttataattggagatcctgaacaccaaagtaagcctaaaaggaatctttgaggaaaaaagccttctagcaaggaaattcaagattcttgaagttgaaggaatatactgaaatgtttataaacataacttttactacagtagcatctaaggttttaaatgtgttttactattttcagattagatttttagatataaagatgaaaaactcagataactcaaatgagatatctatatccctacaacctaattgtatattgagcagaaactgaattaatatgcttccttgcaaatgggaaatcacatagcagttaccccatggcattgtgactaatggcatcagggcaaaaatatgttactttacgatttacctgttagcaggttcttg

SEQ ID NO: 128023 - DNA, 2332 bp, Homo sapiens
  Payload ID: 5072
  Gene Symbol: DONSON
  Gene Name: downstream neighbor of SON
  ENST ID: ENST00000453626
  CDS Start-End: 6-1532
gcgtcatggccctttcggtgcccggctactcaccgggcttccgaaagccgcccgaggtagtgcggctccgacggaaaagggcccggagccgtggagctgccgcctccccgccccgtgagctgacggagccggcggcccgccgagccgccctggtggcggggctgcctcttcgccctttccctgctgcggggggcagaggcggtggcagcggcggcggcccggccgctgctcggaggaaccccttcgcccgcctggacaaccgaccgcgggtcgccgcggagccccccgacgggccggcccgcgagcagccggaggccccggtcccgtttttagattctaatcaagaaaatgatttgctatgggaagagaagtttcctgaaagaacaactgttactgaattacctcagacttcacatgtatcattctccgagcctgatattccgtcctcaaaaagtactgagttacctgtggactggagtattaaaacgcgactccttttcacctcttctcaaccctttacctgggcagatcatttgaaagcacaggaagaagctcaaggtcttgtccagcattgtagggcaacagaagttactttgcctaaaagtatacaggatcccaaactctcctctgagctccgttgtaccttccagcagagccttatctattggctccaccctgctttgtcttggctaccactgttccctcgtattggagctgatagaaaaatggctggaaagacaagtccttggtcaaatgatgcaaccctgcagcatgttttaatgagtgactggtctgtgagctttacttctctatataatttgctgaagacaaaactttgcccctatttctacgtttgtacctatcagtttactgtcctgttccgagcagcaggattagctggaagtgacttaatcacagctctcatatctccaacaactcgaggtttaagagaagctatgagaaatgaaggtattgaattttctctgcctttaataaaagaaagtggccataagaaggagacagcatctggaacaagcttgggatatggggaggagcaagccatcagtgatgaggatgaagaggaaagtttttcctggctggaagagatgggtgtgcaagataaaattaaaaagccagacatactttctatcaagctgcgtaaagagaaacatgaagtacaaatggatcacagacctgaatctgttgtgttggtaaaaggaatcaacacctttacattgctcaattttttgattaactctaagagtttagttgctacctcaggtccacaggcaggacttcctccaaccctcttgtcccctgttgctttccgaggtgccacaatgcaaatgcttaagtactgtatccacacgagccaactgctgtatttaacatctgcctgcaaatggacaaagtacttgatatggaggttgttcataaggagcttactaactgtggtttgcaccctaacactctggagcaacttagtcaaataccgttacttgggaaatcatctttacggaatgtggtgctgagagactacatttataattggagatcctgaacaccaaagtaagcctaaaaggaatctttgaggaaaaaagccttctagcaaggaaattcaagattcttgaagttgaaggaatatactgaaatgtttataaacataacttttactacagtagcatctaaggttttaaatgtgttttactattttcagattagatttttagatataaagatgaaaaactcagataactcaaatgagatatctatatccctacaacctaattgtatattgagcagaaactgaattaatatgcttccttgcaaatgggaaatcacatagcagttaccccatggcattgtgactaatggcatcagggcaaaaatatgttactttacgatttacctgttagcaggttcttgtttcataaaggtagaaaataaatacagacaacatctactgagctagttgattggtgatgcttctaccttaatatctttcctactgatttataattcctttattttcacatatactaaaactttttaaatgcatgttaattcagataaaaaggcattttgtattccacatagaatagtgttaagaattgtgaagtacactgagctgtcacggcaaagtagtatttaatgtgcttataggggtgtgtgtgtgtgtgtgtgtgtgtgtgtgtgtgtgtgtgtgtgtgtgtgtgtgtgtgtgtgtgtgtgtgtgtgtgtgtgtgtgtgtgtgtgtgtgtgtagggggggactgtataattcacatttttaaaataaaagtgcttaaaaatcaaaagcattgggtaaagaa

SEQ ID NO: 128024 - DNA, 1618 bp, Homo sapiens
  Payload ID: 5072
  Gene Symbol: DONSON
  Gene Name: downstream neighbor of SON
  ENST ID: ENST00000432378
  CDS Start-End: 66-1553
gggcgggcccggcgcgcgcgggaagtctctgtagggcggccggctaccctcagccgccgcgcgtcatggccctttcggtgcccggctactcaccgggcttccgaaagccgcccgaggtagtgcggctccgacggaaaagggcccggagccgtggagctgccgcctccccgccccgtgagctgacggagccggcggcccgccgagccgccctggtggcggggctgcctcttcgccctttccctgctgcggggggcagaggcggtggcagcggcggcggcccggccgctgctcggaggaaccccttcgcccgcctggacaaccgaccgcgggtcgccgcggagccccccgacgggccggcccgcgagcagccggaggccccggtcccgtttttagattctaatcaagaaaatgatttgctatgggaagagaagtttcctgaaagaacaactgttactgaattacctcagacttcacatgtatcattctccgagcctgatattccgtcctcaaaaagtactgagttacctgtggactggagtattaaaacgcgactccttttcacctcttctcaaccctttacctgggcagatcatttgaaagcacaggaagaagctcaaggtcttgtccagcattgtagggcaacagaagttactttgcctaaaagtatacaggatcccaaactctcctctgagctccgttgtaccttccagcagagccttatctattggctccaccctgctttgtcttggctaccactgttccctcgtattggagctgatagaaaaatggctggaaagacaagtccttggtcaaatgatgcaaccctgcagcatgttttaatgagtgactggtctgtgagctttacttctctatataatttgctgaagacaaaactttgcccctatttctacgtttgtacctatcagtttactgtcctgttccgagcagcaggattagctggaagtgacttaatcacagctctcatatctccaacaactcgaggtttaagagaagctatgagaaatgaaggtattgaattttctctgcctttaataaaagaaagtggccataagaaggagacagcatctggaacaagcttgggatatggggaggagcaagccatcagtgatgaggatgaagaggaaagtttttcctggctggaagagatgggtgtgcaagataaaattaaaaagccagacatactttctatcaagctgcgtaaagagaaacatgaagtacaaatggatcacagacctgaatctgttgtgttggtaaaaggaatcaacacctttacattgctcaattttttgattaactctaagagtttagttgctacctcaggtccacaggcaggacttcctccaaccctcttgtcccctgttgctttccgaggtgccacaatgcaaatgcttaaggaggttgttcataaggagcttactaactgtggtttgcaccctaacactctggagcaacttagtcaaataccgttacttgggaaatcatctttacggaatgtggtgctgagagactacatttataattggagatcctgaacaccaaagtaagcctaaaaggaatctttgaggaaaaaagccttctagcaaggaaattcaagatt

SEQ ID NO: 128025 - DNA, 1719 bp, Homo sapiens
  Payload ID: 5072
  Gene Symbol: DONSON
  Gene Name: downstream neighbor of SON
  ENST ID: ENST00000437395
  CDS Start-End: 1-1613
tttcggtgcccggctactcaccgggcttccgaaagccgcccgaggtagtgcggctccgacggaaaagggcccggagccgtggagctgccgcctccccgccccgtgagctgacggagccggcggcccgccgagccgccctggtggcggggctgcctcttcgccctttccctgctgcggggggcagaggcggtggcagcggcggcggcccggccgctgctcggaggaaccccttcgcccgcctggacaaccgaccgcgggtcgccgcggagccccccgacgggccggcccgcgagcagccggaggccccggtcccgacttcacatgtatcattctccgagcctgatattccgtcctcaaaaagtactgagttacctgtggactggagtattaaaacgcgactccttttcacctcttctcaaccctttacctgggcagatcatttgaaagcacaggaagaagctcaaggtcttgtccagcattgtagggcaacagaagttactttgcctaaaagtatacaggatcccaaactctcctctgagctccgttgtaccttccagcagagccttatctattggctccaccctgctttgtcttggctaccactgttccctcgtattggagctgatagaaaaatggctggaaagacaagtccttggtcaaatgatgcaaccctgcagcatgttttaatgagtgactggtctgtgagctttacttctctatataatttgctgaagacaaaactttgcccctatttctacgtttgtacctatcagtttactgtcctgttccgagcagcaggattagctggaagtgacttaatcacagctctcatatctccaacaactcgaggtttaagagaagctatgagaaatgaaggtattgaattttctctgcctttaataaaagaaagtggccataagaaggagacagcatctggaacaagcttgggatatggggaggagcaagccatcagtgatgaggatgaagaggaaagtttttcctggctggaagagatgggtgtgcaagataaaattaaaaagccagacatactttctatcaagctgcgtaaagagaaacatgaagtacaaatggatcacagacctgaatctgttgtgttggtaaaaggaatcaacacctttacattgctcaattttttgattaactctaagagtttagttgctacctcaggtccacaggcaggacttcctccaaccctcttgtcccctgttgctttccgaggtgccacaatgcaaatgcttaaggcacggagtgtgaatgtgaagacacaagctctttctggatacagagaccaatttagtttggagattacaggtcctatcatgcctcattctctgcattcactgaccatgctgctcaaatcttcacagagtggatctttctctgcagtactgtatccacacgagccaactgctgtatttaacatctgcctgcaaatggacaaagtacttgatatggaggttgttcataaggagcttactaactgtggtttgcaccctaacactctggagcaacttagtcaaataccgttacttgggaaatcatctttacggaatgtggtgctgagagactacatttataattggagatcctgaacaccaaagtaagcctaaaaggaatctttgaggaaaaaagccttctagcaaggaaattcaagattcttgaagttgaaggaatatactgaaatgtttataaacataa

SEQ ID NO: 128026 - DNA, 703 bp, Homo sapiens
  Payload ID: 5072
  Gene Symbol: DONSON
  Gene Name: downstream neighbor of SON
  ENST ID: ENST00000440810
  CDS Start-End: 1-703
gcctgatattccgtcctcaaaaagtactgagttacctgtggactggagtattaaaacgcgactccttttcacctcttctcaaccctttacctgggcagatcatttgaaagcacaggaagaagctcaaggtcttgtccagcattgtagggcaacagaagttactttgcctaaaagtatacaggatcccaaactctcctctgagctccgttgtaccttccagcagagccttatctattggctccaccctgctttgtcttggctaccactgttccctcgtattggagctgatagaaaaatggctggaaagacaagtccttggtcaaatgatgcaaccctgcagcatgttttaatgagtgactgggagcaagccatcagtgatgaggatgaagaggaaagtttttcctggctggaagagatgggtgtgcaagataaaattaaaaagccagacatactttctatcaagctgcgtaaagagaaacatgaagtacaaatggatcacagacctgaatctgttgtgttggtaaaaggaatcaacacctttacattgctcaattttttgattaactctaagagtttagttgctacctcaggtccacaggcaggacttcctccaaccctcttgtcccctgttgctttccgaggtgccacaatgcaaatgcttaaggcacggagtgtgaatgtgaagacacaagctctttctgga

SEQ ID NO: 128027 - DNA, 1566 bp, Homo sapiens
  Payload ID: 5072
  Gene Symbol: DONSON
  Gene Name: downstream neighbor of SON
  ENST ID: ENST00000442660
  CDS Start-End: 1-471
tttttagattctaatcaagaaaatgatttgctatgggaagagaagtttcctgaaagaacaactgttactgaattacctcagacttcacatgtatcattctccgagcctgatattccgtcctcaaaaagtactgagttacctgtggactggagtattaaaacgcgactccttttcacctcttctcaaccctttacctgggcagatcatttgaaagcacaggaagaagctcaaggtcttgtccagcattgtagggcaacagaagttactttgcctaaaagtatacaggatcccaaactctcctctgagctccgttgtaccttccagcagagccttatctattggctccaccctgctttgtcttggctaccactgttccctcgtattggagctgatagaaaaatggctggaaagacaagtccttggtcaaatgatgcaaccctgcagcatgttttaatgagtgactggtattgaattttctctgcctttaataaaagaaagtggccataagaaggagacagcatctggaacaagcttgggatatggggaggagcaagccatcagtgatgaggatgaagaggaaagtttttcctggctggaagagatgggtgtgcaagataaaattaaaaagccagacatactttctatcaagctgcgtaaagagaaacatgaagtacaaatggatcacagacctgaatctgttgtgttggtaaaaggaatcaacacctttacattgctcaattttttgattaactctaagagtttagttgctacctcaggtccacaggcaggacttcctccaaccctcttgtcccctgttgctttccgaggtgccacaatgcaaatgcttaaggcacggagtgtgaatgtgaagacacaagctctttctggatacagagaccaatttagtttggagattacaggtcctatcatgcctcattctctgcattcactgaccatgctgctcaaatcttcacagagtggatctttctctgcagtactgtatccacacgagccaactgctgtatttaacatctgcctgcaaatggacaaagtacttgatatggaggttgttcataaggagcttactaactgtggtttgcaccctaacactctggagcaacttagtcaaataccgttacttgggaaatcatctttacggaatgtggtgctgagagactacatttataattggagatcctgaacaccaaagtaagcctaaaaggaatctttgaggaaaaaagccttctagcaaggaaattcaagattcttgaagttgaaggaatatactgaaatgtttataaacataacttttactacagtagcatctaaggttttaaatgtgttttactattttcagattagatttttagatataaagatgaaaaactcagataactcaaatgagatatctatatccctacaacctaattgtatattgagcagaaactgaattaatatgcttccttgcaaatgggaaatcacatagcagttaccccatggcattgtgactaatggcatcagggcaaaaatatgttactttacgatttacctgttagcaggttcttg

SEQ ID NO: 128028 - DNA, 2273 bp, Homo sapiens
  Payload ID: 5072
  Gene Symbol: DONSON
  Gene Name: downstream neighbor of SON
  ENST ID: ENST00000457359
  CDS Start-End: 6-638
gcgtcatggccctttcggtgcccggctactcaccgggcttccgaaagccgcccgaggtagtgcggctccgacggaaaagggcccggagccgtggagctgccgcctccccgccccgtgagctgacggagccggcggcccgccgagccgccctggtggcggggctgcctcttcgccctttccctgctgcggggggcagaggcggtggcagcggcggcggcccggccgctgctcggaggaaccccttcgcccgcctggacaaccgaccgcgggtcgccgcggagccccccgacgggccggcccgcgagcagccggaggccccggtcccgtttttagattctaatcaagaaaatgatttgctatgggaagagaagtttcctgaaagaacaactgttactgaattacctcagacttcacatgtatcattctccgagcctgatattccgtcctcaaaaagtactgagttacctgtggactggagtattaaaacgcgactccttttcacctcttctcaaccctttacctgggcagatcatttgaaagcacaggaagaagctcaaggtcttgtccagcattgtagggcaacagaagttactttgcctaaaagtatacaggtctgtgagctttacttctctatataatttgctgaagacaaaactttgcccctatttctacgtttgtacctatcagtttactgtcctgttccgagcagcaggattagctggaagtgacttaatcacagctctcatatctccaacaactcgaggtttaagagaagctatgagaaatgaaggtattgaattttctctgcctttaataaaagaaagtggccataagaaggagacagcatctggaacaagcttgggatatggggaggagcaagccatcagtgatgaggatgaagaggaaagtttttcctggctggaagagatgggtgtgcaagataaaattaaaaagccagacatactttctatcaagctgcgtaaagagaaacatgaagtacaaatggatcacagacctgaatctgttgtgttggtaaaaggaatcaacacctttacattgctcaattttttgattaactctaagagtttagttgctacctcaggtccacaggcaggacttcctccaaccctcttgtcccctgttgctttccgaggtgccacaatgcaaatgcttaaggcacggagtgtgaatgtgaagacacaagctctttctggatacagagaccaatttagtttggagattacaggtcctatcatgcctcattctctgcattcactgaccatgctgctcaaatcttcacagagtggatctttctctgcagtactgtatccacacgagccaactgctgtatttaacatctgcctgcaaatggacaaagtacttgatatggaggttgttcataaggagcttactaactgtggtttgcaccctaacactctggagcaacttagtcaaataccgttacttgggaaatcatctttacggaatgtggtgctgagagactacatttataattggagatcctgaacaccaaagtaagcctaaaaggaatctttgaggaaaaaagccttctagcaaggaaattcaagattcttgaagttgaaggaatatactgaaatgtttataaacataacttttactacagtagcatctaaggttttaaatgtgttttactattttcagattagatttttagatataaagatgaaaaactcagataactcaaatgagatatctatatccctacaacctaattgtatattgagcagaaactgaattaatatgcttccttgcaaatgggaaatcacatagcagttaccccatggcattgtgactaatggcatcagggcaaaaatatgttactttacgatttacctgttagcaggttcttgtttcataaaggtagaaaataaatacagacaacatctactgagctagttgattggtgatgcttctaccttaatatctttcctactgatttataattcctttattttcacatatactaaaactttttaaatgcatgttaattcagataaaaaggcattttgtattccacatagaatagtgttaagaattgtgaagtacactgagctgtcacggcaaagtagtatttaatgtgcttataggggtgtgtgtgtgtgtgtgtgtgtgtgtgtgtgtgtgtgtgtgtgtgtgtgtgtgtgtgtgtgtgtgtgtgtgtgtgtgtgtgtgtgtgtgtgtgtgtgtagggggggactgtataattcacatttttaaaataaaagtgctta

SEQ ID NO: 128029 - DNA, 528 bp, Homo sapiens
  Payload ID: 5072
  Gene Symbol: DONSON
  Gene Name: downstream neighbor of SON
  ENST ID: ENST00000439593
  CDS Start-End: 1-57
aaatcatctttacggaatgtggtgctgagagactacatttataattggagatcctgaacaccaaacccatttttctcatcaaaacggctcccattcctccagttaccggggctgctcttaagaactgatcctatccaaagaaagaaaggatttatttgtagaattggaggtgtttactggaagatgatgatatggccaagccaaggaagggaacctacagtgaagagtacaggtgtctctgatctacatatccaagaactgcaagaaaaatgtccagatgggcatcagatacctagtccagtccttggcaaaagtctgggctttggaaaccaagggcaagaggcgatgacaactaatctatagaacccattctccataaacactatccgcttcttttttccgatgttgagatccagatgatacagggaattcttttgttaatgttacctggctttttggtggagttggttttgctgcagcaatctaaaaaataaagtgtttcttaattaaagctcaatatgatatcta

SEQ ID NO: 128030 - DNA, 2472 bp, Homo sapiens
  Payload ID: 5073
  Gene Symbol: DPH2
  Gene Name: DPH2 homolog
  Uniprot ID: Q9BQC3
  ENST ID: ENST00000255108
  CDS Start-End: 173-1642
agaaacagtagttaggatggctgaaggggatactcaccggctgaaggccgactgtgattccccctacccccacaaggcgattttgaccccctgagggctgctctagaggactcaggccccgaagctgtcccagggaggtccccgctgcatcccaccacccaagctgtgcctcatggagtcgatgtttagcagccctgccgaggcggcgctgcagcgagagaccggggtgccaggactgcttactcctcttccggacctggacggagtgtacgagctggagcgagtcgctggatttgtccgcgacctggggtgtgaacgagttgccttgcagttccctgaccagctattgggagatgctgtggctgtggctgcacgactggaggagacgacagggtcaaagatgttcattctgggtgacacagcctacggcagctgctgcgtggatgtgctgggtgctgagcaagctggagctcaggctctcatacattttggccctgcctgcttaagccctccagcccgcccactgcccgttgccttcgtgcttcgtcaacgttctgtggccttggagctctgtgtcaaggcctttgaggcccagaacccagaccccaaagcgcctgtggtgctgctgagtgagccggcctgtgcccatgccctggaggctttggctactctcctgcgcccacggtacctggacctgctagtctccagcccagcttttccccaaccagtgggttccctgagtccagagcctatgcccctagagcgttttgggcgccgcttcccccttgccccagggaggcgtctagaagagtatggtgccttctatgtagggggctctaaggccagccctgacccagaccttgacccagacctgagtcggctgctcttggggtgggcaccaggtcaacccttctcctcctgctgtccagatacagggaagactcaggatgagggtgcccgggctggacggctaagggcacgaagacgatatctggtagagagggccagagatgcccgcgtggtagggctgctggcaggcacactgggtgtagcccaacaccgtgaggcactggcccacttgcggaacctgactcaggctgctggcaagcgtagctatgtgttggccctggggcggcccacccctgccaagcttgccaacttccctgaggtggatgtctttgtgctattagcctgtcctctgggtgctctagccccccagctttctggtagcttcttccagcctatactggcaccatgtgagctggaagctgcctgcaaccctgcctggccacctccaggcctggctccccacctcacacattatgcggacttattgcctggctctcccttccacgtggctctcccaccacctgagtcagagctgtgggaaaccccagacgtgtcactcattactggagatctccgacccccacctgcctggaagtcatcaaatgatcatggaagcttggctctgaccccacggccccagctggagctggctgagagcagtcctgcagcctcattccttagttcccggagctggcaagggctggagccccgcctgggtcagacgccagtgacagaagctgtgagtggaagacgagggattgccatcgcctatgaggatgagggaagcggctgataccatgtggggctggagacatagatggacttatgaatggctgctaggacctttagtgctccctgcaccaacctcccatccccctgccaagatccttgaaggaccctggaaggagggagagcaggcagcccttcacaggataggatccgtctctgtcctgtcctggcactggcacaagctcagcacatgcccagtaatgcgtgttgtttggctgatggaataaagggcttagggacttccctgaggcctctggacccatctgtcttcctgagggcagcccaggacctttggccaatcccagttcccaggctgcagttgagggtctgtccttgtcaaaaggcaggtgctagacagtctagaccagggtttctcaaactcgtacttgacatttggggccagataattctttgttgtggggctgtctggtgtatggtagggtgctcagcagcatccctggcctctgcccactagacatcagaagcactcccccagttgtgacaaccaaaaatatctccagaccttggcaaatgttatctgtgggggaaaattgccctcaattgagaaccactggtctagctagacctgcactgtccagtacagtagccactaaatacatgtggctaaacttaaatttaagttaattaagattaaaagctcagtttctcagtcacattagtcattcaagtgttcagacagccacatgaggggacagtgcagctacaggatatgccatcatggcagaaagttctattggttggacagcgttggtctatactgactcttatttctcagggagatcacagcaacctaaataaaccagataccttttc

SEQ ID NO: 128031 - DNA, 1738 bp, Homo sapiens
  Payload ID: 5073
  Gene Symbol: DPH2
  Gene Name: DPH2 homolog
  Uniprot ID: Q9BQC3
  ENST ID: ENST00000396758
  CDS Start-End: 152-937
tgaaggggatactcaccggctgaaggccgactgtgattccccctacccccacaaggcgattttgaccccctgagggctgctctagaggactcaggccccgaagctgtcccagggaggtccccgctgcatcccaccacccaagctgtgcctcatggagtcgatgtttagcagccctgccgaggcggcgctgcagcgagagaccggggtgccaggactgcttactcctcttccggacctggacggagtgtacgagctggagcgagtcgctggatttgtccgcgacctggggtgtgaacgagttgccttgcagttccctgaccagctattgggagatgctgtggctgtggctgcacgactggaggagacgacagggtcaaagatgttcattctgggtgacacagcctacggcagctgctgcgtggatgtgctgggtgctgagcaagctggagctcaggctctcatacattttggccctgcctgcttaagccctccagcccgcccactgcccgttgccttcgtgcttcgtcaacgttctgtggccttggagctctgtgtcaaggcctttgaggcccagaacccagaccccaaagcgcctgtggtgctgctgagtgagccggcctgtgcccatgccctgggctctcccttccacgtggctctcccaccacctgagtcagagctgtgggaaaccccagacgtgtcactcattactggagatctccgacccccacctgcctggaagtcatcaaatgatcatggaagcttggctctgaccccacggccccagctggagctggctgagagcagtcctgcagcctcattccttagttcccggagctggcaagggctggagccccgcctgggtcagacgccagtgacagaagctgtgagtggaagacgagggattgccatcgcctatgaggatgagggaagcggctgataccatgtggggctggagacatagatggacttatgaatggctgctaggacctttagtgctccctgcaccaacctcccatccccctgccaagatccttgaaggaccctggaaggagggagagcaggcagcccttcacaggataggatccgtctctgtcctgtcctggcactggcacaagctcagcacatgcccagtaatgcgtgttgtttggctgatggaataaagggcttagggacttccctgaggcctctggacccatctgtcttcctgagggcagcccaggacctttggccaatcccagttcccaggctgcagttgagggtctgtccttgtcaaaaggcaggtgctagacagtctagaccagggtttctcaaactcgtacttgacatttggggccagataattctttgttgtggggctgtctggtgtatggtagggtgctcagcagcatccctggcctctgcccactagacatcagaagcactcccccagttgtgacaaccaaaaatatctccagaccttggcaaatgttatctgtgggggaaaattgccctcaattgagaaccactggtctagctagacctgcactgtccagtacagtagccactaaatacatgtggctaaacttaaatttaagttaattaagattaaaagctcagtttctcagtcacattagtcattcaagtgttcagacagccacatgaggggacagtgcagctacaggatatgccatcatggcagaaagttctattggttggacagcgttggtctatactgactcttatttctcagggagatcac

SEQ ID NO: 128032 - DNA, 502 bp, Homo sapiens
  Payload ID: 5073
  Gene Symbol: DPH2
  Gene Name: DPH2 homolog
  ENST ID: ENST00000532140
  CDS Start-End: 110-268
ctacccccacaaggcgattttgaccccctgagggctgctctagaggactcaggccccgaagctgtcccagggaggtccccgctgcatcccaccacccaagctgtgcctcatggagtcgatgtttagcagccctgccgaggcggcgctgcagcgagagaccggggtgccaggactgcttactcctcttccggacctggacggagtgtacgagctggagcgagtcgctggatttgtccgcgacctggggtgttgccttgcagttccctgaccagctattgggagatgctgtggctgtggctgcacgactggaggagacgacagggtcaaagatgttcattctgggtgacacagcctacggcagctgctgcgtggatgtgctgggtgctgagcaagctggagctcaggctctcatacattttggccctgcctgcttaagccctccagcccgcccactgcccgttgccttcgtgcttcgtcaacgttctgtggccttggagctctg

SEQ ID NO: 128033 - DNA, 2414 bp, Homo sapiens
  Payload ID: 5073
  Gene Symbol: DPH2
  Gene Name: DPH2 homolog
  ENST ID: ENST00000495421
  CDS Start-End: 167-448
agtagttaggatggctgaaggggatactcaccggctgaaggccgactgtgattccccctacccccacaaggcgattttgaccccctgagggctgctctagaggactcaggccccgaagctgtcccagggaggtccccgctgcatcccaccacccaagctgtgcctcatggagtcgatgtttagcagccctgccgaggcggcgctgcagcgagagaccggggtgccaggactgcttactcctcttccggacctggacggagtgttgccttgcagttccctgaccagctattgggagatgctgtggctgtggctgcacgactggaggagacgacagggtcaaagatgttcattctgggtgacacagcctacggcagctgctgcgtggatgtgctgggtgctgagcaagctggagctcaggctctcatacattttggccctgcctgcttaagccctccagcccgcccactgcccgttgccttcgtgcttcgtcaacgttctgtggccttggagctctgtgtcaaggcctttgaggcccagaacccagaccccaaagcgcctgtggtgctgctgagtgagccggcctgtgcccatgccctggaggctttggctactctcctgcgcccacggtacctggacctgctagtctccagcccagcttttccccaaccagtgggttccctgagtccagagcctatgcccctagagcgttttgggcgccgcttcccccttgccccagggaggcgtctagaagagtatggtgccttctatgtagggggctctaaggccagccctgacccagaccttgacccagacctgagtcggctgctcttggggtgggcaccaggtcaacccttctcctcctgctgtccagatacagggaagactcaggatgagggtgcccgggctggacggctaagggcacgaagacgatatctggtagagagggccagagatgcccgcgtggtagggctgctggcaggcacactgggtgtagcccaacaccgtgaggcactggcccacttgcggaacctgactcaggctgctggcaagcgtagctatgtgttggccctggggcggcccacccctgccaagcttgccaacttccctgaggtggatgtctttgtgctattagcctgtcctctgggtgctctagccccccagctttctggtagcttcttccagcctatactggcaccatgtgagctggaagctgcctgcaaccctgcctggccacctccaggcctggctccccacctcacacattatgcggacttattgcctggctctcccttccacgtggctctcccaccacctgagtcagagctgtgggaaaccccagacgtgtcactcattactggagatctccgacccccacctgcctggaagtcatcaaatgatcatggaagcttggctctgaccccacggccccagctggagctggctgagagcagtcctgcagcctcattccttagttcccggagctggcaagggctggagccccgcctgggtcagacgccagtgacagaagctgtgagtggaagacgagggattgccatcgcctatgaggatgagggaagcggctgataccatgtggggctggagacatagatggacttatgaatggctgctaggacctttagtgctccctgcaccaacctcccatccccctgccaagatccttgaaggaccctggaaggagggagagcaggcagcccttcacaggataggatccgtctctgtcctgtcctggcactggcacaagctcagcacatgcccagtaatgcgtgttgtttggctgatggaataaagggcttagggacttccctgaggcctctggacccatctgtcttcctgagggcagcccaggacctttggccaatcccagttcccaggctgcagttgagggtctgtccttgtcaaaaggcaggtgctagacagtctagaccagggtttctcaaactcgtacttgacatttggggccagataattctttgttgtggggctgtctggtgtatggtagggtgctcagcagcatccctggcctctgcccactagacatcagaagcactcccccagttgtgacaaccaaaaatatctccagaccttggcaaatgttatctgtgggggaaaattgccctcaattgagaaccactggtctagctagacctgcactgtccagtacagtagccactaaatacatgtggctaaacttaaatttaagttaattaagattaaaagctcagtttctcagtcacattagtcattcaagtgttcagacagccacatgaggggacagtgcagctacaggatatgccatcatggcagaaagttctattggttggacagcgttggtctatactgactcttatttctcagggagatcacagcaacctaaataaaccagataccttttc

SEQ ID NO: 128034 - DNA, 1013 bp, Homo sapiens
  Payload ID: 5073
  Gene Symbol: DPH2
  Gene Name: DPH2 homolog
  ENST ID: ENST00000459879
  CDS Start-End: 1-789
gcctttgaggcccagaacccagaccccaaagcgcctgtggtgctgctgagtgagccggcctgtgcccatgccctggatacagggaagactcaggatgagggtgcccgggctggacggctaagggcacgaagacgatatctggtagagagggccagagatgcccgcgtggtagggctgctggcaggcacactgggtgtagcccaacaccgtgaggcactggcccacttgcggaacctgactcaggctgctggcaagcgtagctatgtgttggccctggggcggcccacccctgccaagcttgccaacttccctgaggtggatgtctttgtgctattagcctgtcctctgggtgctctagccccccagctttctggtagcttcttccagcctatactggcaccatgtgagctggaagctgcctgcaaccctgcctggccacctccaggcctggctccccacctcacacattatgcggacttattgcctggctctcccttccacgtggctctcccaccacctgagtcagagctgtgggaaaccccagacgtgtcactcattactggagatctccgacccccacctgcctggaagtcatcaaatgatcatggaagcttggctctgaccccacggccccagctggagctggctgagagcagtcctgcagcctcattccttagttcccggagctggcaagggctggagccccgcctgggtcagacgccagtgacagaagctgtgagtggaagacgagggattgccatcgcctatgaggatgagggaagcggctgataccatgtggggctggagacatagatggacttatgaatggctgctaggacctttagtgctccctgcaccaacctcccatccccctgccaagatccttgaaggaccctggaaggagggagagcaggcagcccttcacaggataggatccgtctctgtcctgtcctggcactggcacaagctcagcacatgcccagtaatgcgtgttgtttggctgatggaataaa

SEQ ID NO: 128035 - DNA, 851 bp, Homo sapiens
  Payload ID: 5073
  Gene Symbol: DPH2
  Gene Name: DPH2 homolog
  ENST ID: ENST00000492306
  CDS Start-End: 154-456
gctgaaggggatactcaccggctgaaggccgactgtgattccccctacccccacaaggcgattttgaccccctgagggctgctctagaggactcaggccccgaagctgtcccagggaggtccccgctgcatcccaccacccaagctgtgcctcatggagtcgatgtttagcagccctgccgaggcggcgctgcagcgagagaccggggtgccaggactgcttactcctcttccggacctggacggagtgtacgagctggagcgagtcgctggatttgtccgcgacctggggtgtgaacgagttgccttgcagttccctgaccagctattgggagatgctgtggctgtggctgcacgactggaggagacgacagggtcaaagatgttcattctgggtgacacagcctacggcagtgatgacagcaactcgcctccagaagagaacccatttctctgatgctatcttccctgcagctgctgcgtggatgtgctgggtgctgagcaagctggagctcaggctctcatacattttggccctgcctgcttaagccctccagcccgcccactgcccgttgccttcgtgcttcgtcaacgttctgtggccttggagctctgtgtcaaggcctttgaggcccagaacccagaccccaaagcgcctgtggtgctgctgagtgagccggcctgtgcccatgccctggaggctttggctactctcctgcgcccacggtacctggacctgctagtctccagcccagcttttccccaaccagtgggttccctgagtccagagcctatgcccctagagcgttttgggcgccgcttcccccttgccccagggaggcgtctagaaga

SEQ ID NO: 128036 - DNA, 1596 bp, Homo sapiens
  Payload ID: 5073
  Gene Symbol: DPH2
  Gene Name: DPH2 homolog
  ENST ID: ENST00000524776
  CDS Start-End: 169-612
acagtagttaggatggctgaaggggatactcaccggctgaaggccgactgtgattccccctacccccacaaggcgattttgaccccctgagggctgctctagaggactcaggccccgaagctgtcccagggaggtccccgctgcatcccaccacccaagctgtgcctcatggagtcgatgtttagcagccctgccgaggcggcgctgcagcgagagaccggggtgccaggactgcttactcctcttccggacctggacggagtgtacgagctggagcgagtcgctggatttgtccgcgacctggggtgtgaacgagttgccttgcagttccctgaccagctattgggagatgctgtggctgtggctgcacgactggaggagacgacagggtcaaagatgttcattctgggtgacacagcctacggcagaggctttggctactctcctgcgcccacggtacctggacctgctagtctccagcccagcttttccccaaccagtgggttccctgagtccagagcctatgcccctagagcgttttgggcgccgcttcccccttgccccagggaggcgtctagaagagtatggtgccttctatgtagggggctctaaggccagccctgacccagaccttgacccagacctgagtcggctgctcttggggtgggcaccaggtcaacccttctcctcctgctgtccagatacagggaagactcaggatgagggtgcccgggctggacggctaagggcacgaagacgatatctggtagagagggccagagatgcccgcgtggtagggctgctggcaggcacactgggtgtagcccaacaccgtgaggcactggcccacttgcggaacctgactcaggctgctggcaagcgtagctatgtgttggccctggggcggcccacccctgccaagcttgccaacttccctgaggtggatgtctttgtgctattagcctgtcctctgggtgctctagccccccagctttctggtagcttcttccagcctatactggcaccatgtgagctggaagctgcctgcaaccctgcctggccacctccaggcctggctccccacctcacacattatgcggacttattgcctggctctcccttccacgtggctctcccaccacctgagtcagagctgtgggaaaccccagacgtgtcactcattactggagatctccgacccccacctgcctggaagtcatcaaatgatcatggaagcttggctctgaccccacggccccagctggagctggctgagagcagtcctgcagcctcattccttagttcccggagctggcaagggctggagccccgcctgggtcagacgccagtgacagaagctgtgagtggaagacgagggattgccatcgcctatgaggatgagggaagcggctgataccatgtggggctggagacatagatggacttatgaatggctgctaggacctttagtgctccctgcaccaacctcccatccccctgccaagatccttgaaggaccctggaaggagggagagcaggcagcccttcacaggataggatccgtctctgtcctgtcctggcactggcacaagctca

SEQ ID NO: 128037 - DNA, 643 bp, Homo sapiens
  Payload ID: 5073
  Gene Symbol: DPH2
  Gene Name: DPH2 homolog
  ENST ID: ENST00000527319
  CDS Start-End: 1-106
gagtccagagcctatgcccctagagcgttttgggcgccgcttcccccttgccccagggaggcgtctagaagagctctcccttccacgtggctctcccaccacctgagtcagagctgtgggaaaccccagacgtgtcactcattactggagatctccgacccccacctgcctggaagtcatcaaatgatcatggaagcttggctctgaccccacggccccagctggagctggctgagagcagtcctgcagcctcattccttagttcccggagctggcaagggctggagccccgcctgggtcagacgccagtgacagaagctgtgagtggaagacgagggattgccatcgcctatgaggatgagggaagcggctgataccatgtggggctggagacatagatggacttatgaatggctgctaggacctttagtgctccctgcaccaacctcccatccccctgccaagatccttgaaggaccctggaaggagggagagcaggcagcccttcacaggataggatccgtctctgtcctgtcctggcactggcacaagctcagcacatgcccagtaatgcgtgttgtttggctgatggaataaagggcttagggacttccctgaggcctctggacccatctgtcttcct

SEQ ID NO: 128038 - DNA, 857 bp, Homo sapiens
  Payload ID: 5073
  Gene Symbol: DPH2
  Gene Name: DPH2 homolog
  ENST ID: ENST00000476260
  CDS Start-End: 177-485
gcggagaaacagtagttaggatggctgaaggggatactcaccggctgaaggccgactgtgattccccctacccccacaaggcgattttgaccccctgagggctgctctagaggactcaggccccgaagctgtcccagggaggtccccgctgcatcccaccacccaagctgtgcctcatggagtcgatgtttagcagccctgccgaggcggcgctgcagcgagagaccggggtgccaggactgcttactcctcttccggacctggacggagtgttgccttgcagttccctgaccagctattgggagatgctgtggctgtggctgcacgactggaggagacgacagggtcaaagatgttcattctgggtgacacagcctacggcaggtgtgaacttggccttaggtgggccaggcctggggatccggggctcatggggttttacgtctatgacagtgattgccttcaatggtggtgtttctccttgatgataatgctgctgcgtggatgtgctgggtgctgagcaagctggagctcaggctctcatacattttggccctgcctgcttaagccctccagcccgcccactgcccgttgccttcgtgcttcgtcaacgttctgtggccttggagctctgtgtcaaggcctttgaggcccagaacccagaccccaaagcgcctgtggtgctgctgagtgagccggcctgtgcccatgccctggaggctttggctactctcctgcgcccacggtacctggacctgctagtctccagcccagcttttccccaaccagtgggttccctgagtccagagcctatgcccctagagcgttttgggcgccgcttcccccttgccccaggg

SEQ ID NO: 128039 - DNA, 3768 bp, Homo sapiens; identical to SEQ ID NO: 126995
  Payload ID: 5074
  Gene Symbol:
  Gene Name: DPP6
  ENST ID: ENST00000634466
  CDS Start-End: 386-2797

SEQ ID NO: 128040 - DNA, 1109 bp, Homo sapiens; identical to SEQ ID NO: 127000
  Payload ID: 5074
  Gene Symbol:
  Gene Name: DPP6
  ENST ID: ENST00000634249
  CDS Start-End: 234-1109

SEQ ID NO: 128041 - DNA, 3710 bp, Homo sapiens; identical to SEQ ID NO: 126996
  Payload ID: 5074
  Gene Symbol:
  Gene Name: DPP6
  ENST ID: ENST00000634541
  CDS Start-End: 142-2739

SEQ ID NO: 128042 - DNA, 4798 bp, Homo sapiens; identical to SEQ ID NO: 126998
  Payload ID: 5074
  Gene Symbol:
  Gene Name: DPP6
  ENST ID: ENST00000635128
  CDS Start-End: 588-2993

SEQ ID NO: 128043 - DNA, 2012 bp, Homo sapiens; identical to SEQ ID NO: 126997
  Payload ID: 5074
  Gene Symbol:
  Gene Name: DPP6
  ENST ID: ENST00000634875
  CDS Start-End: 404-1465

SEQ ID NO: 128044 - DNA, 2388 bp, Homo sapiens; identical to SEQ ID NO: 126999
  Payload ID: 5074
  Gene Symbol:
  Gene Name: DPP6
  ENST ID: ENST00000634779
  CDS Start-End: 54-2330

SEQ ID NO: 128045 - DNA, 4870 bp, Homo sapiens
  Payload ID: 5075
  Gene Symbol: DPY19L1
  Gene Name: dpy-19-like 1 (C. elegans)
  Uniprot ID: Q2PZI1
  ENST ID: ENST00000310974
  CDS Start-End: 146-2173
ccctaagtggccgctccgggcgccttctccctgccccgccgcgtctcgcctgcgcgggctccaagcgcagccttaacaggctccgaaacttgaatcagcgccccgatcccgagagggctcttccttcggccccatcactcccacaatggaagggcggccgcctccggaaggccgtccgcccccgcgtcctcgcaccggccgagccccgcgcgggcgccgaagagctgtttttgcagcagtgttgcactggagccatataacacacctctttgaaaatgaccgtcatttttctcacctctcaacattggaaagggagatggcttttcgcactgaaatgggactatattattcctatttcaagactattgtggaagcaccctcatttttgaatggagtatggatgattatgaatgataaactgactgaatacccccttgtcattaatacattaaaaagattcaatctttaccctgaggtaattttggccagttggtaccggatttataccaaaataatggacttgattggtattcaaaccaagatatgttggacggttaccagaggagaaggactcagtcctattgaaagctgtgaaggattgggagatcctgcttgcttttatgttgctgtaatttttattttaaatggactaatgatggcattattcttcatatatggcacatatttaagtggcagccgattaggaggcctggttacagtgttgtgcttctttttcaatcatggagagtgtacccgtgtaatgtggacaccacctctccgtgaaagcttctcatatccatttcttgttcttcagatgttgctagtgactcatattctcagggctacaaaactttatagaggaagcttgattgcactctgcatttccaatgtatttttcatgcttccttggcagtttgctcagtttgtacttcttactcagattgcatcattatttgcagtatatgttgtcgggtacattgatatatgtaaattacggaagatcatttatatacacatgatttctcttgcactttgttttgttttgatgtttgggaactcaatgttattaacttcttattatgcttcttctttggtaattatttggggtattctggcaatgaaaccacatttcctgaaaataaatgtatctgaacttagtttatgggttattcaaggatgtttttggttatttggaactgtcatacttaaatacttgacatctaaaatttttggtattgcagatgacgctcatattggcaacttactaacatcaaaattctttagttataaggattttgatactttattgtatacctgtgcagcggagtttgactttatggaaaaagagactccactgagatacacaaagacattattgcttccagttgttcttgtagtgtttgttgctattgttagaaagattattagtgatatgtggggtgtcttagctaaacaacagacacatgtaagaaaacaccagtttgatcatggagagctggtttaccatgcattgcaattgttagcatatacagcccttggtattttaattatgagactaaaactcttcttgacaccacacatgtgtgttatggcatcactgatctgctcaagacagctatttggatggctcttttgcaaagtacatcctggtgctattgtgtttgctatattagcagcaatgtcaatacaaggttcagcaaatctgcaaacccagtggaatattgtaggggagttcagcaatttgccccaagaagaacttatagaatggatcaaatatagtactaaaccagatgcagtgtttgcgggtgccatgcccacgatggcaagtgttaagctctctgcacttcggcccattgtgaatcatccacattatgaagacgcaggcttgagagccagaacaaaaatagtatactcaatgtatagtcggaaagcagccgaagaagtgaagcgagaactgataaagttaaaagtgaactattacattctagaagagtcatggtgtgtaagaagatccaagcctggttgcagtatgcctgaaatttgggatgtagaagatcctgccaatgctgggaaaactcccttatgtaacctcttggtgaaggattccaaacctcacttcaccactgtattccagaacagtgtttacaaagtcctagaagttgtaaaagaatgactgctacatgacctgctgcctacggagaactacatctgtaatggttttaatgttttgctaagtcatgtgttgttcatatcccaaaaacttttataggtaactgttttcaaatagaaaacgttttatttggtcaatttgaatgtcattctaattataaaaatgacttacacctttatcaattggttactatttcaatgcaccctttaaaatttgctatgcaaatgagtatatgcttgtacttgactttaatatttgtgctaaagtgagcaaagctacctgtataaagaaaacacagtgggttgtgacaaggatgacatgaaaatacaggacaattctgacaatgtaggggctgattttatagtgtaagaactattaatgccccttgcttcttttttctgcctcttgctcttgtcttttggacatttcagtgattgtaagttcttcggtcatgtcagcccctgtcatcaacttgagttacagtagatggggcagacatggagtgtttgctatatagaactatctgtttgttttacttccttgtgcgctttttgttctctgttctcttgttaatgaagcttttcctgcccattattaatccaaactcttggaccttgtggttaggaaattcccttaacttccagccatatggcattatcgtgtctctttctctctctctcttgctctctctcttctcctcttccccatattttctgtcaaataagtactgtttactcatttagttgcttatcaagtacttattcttggttttaaaaaaaattaatggtaactgtatttttctcatttttagcattattcaaatgtttatattttaatacctttaaaccactttaaagttttttcatgtttaattatagttttaagaaaaactattttgaacaaccccaaatatagtgcatctagaaactaatgtatatttgattagacatcatttatagtggaacagtagactgtagtacatggtaatttttcttttactattaagatacaataaaacatgactaattttgctgtcaaaaatgtaaagaataatgataaatggagtttttatattttacttttaagattgcctgtctttaataagacaaagccttaagccttatgttataattttggttctaaaaaccatcatttcagtataaggaataagtatatttcgtcctcctctttagtttttttcttcctatttatttttattttgaaaaatttctacaccttctttgaattccttgtatgaatttttgtttcttagaagttaatttgtgtgaaatgagattcttcaaaacgatgaaacctcatagctctgagaaaaggttttagggttttaaattctaagcaaagcgtgactatggctgacagactacacatttaattatacagcttctctttcttaaccacaggcagattaacctcattgtggattgtccttcagaccttagtcctcaggcatggtttctggtgcccactcctggaagccgctgttccctttctaccttcttaccagagcccaagggcaggcctggtcccggggaagcagcagcttgctgacataagtcagctgcaaaggctgaggagtgtgccctcagagaagcaccgccccccagtcttgtgccagcgcctagagccgcagctcccagggatgctccttccctggaggcagcccaggagagggactctggcagcgttcttcagatttgtggccactgtttctcatttgctggttgactgtttttatttcttaggcttttgctagttttagaaaatagggaagcagcccttgatttgtggattaaaagcaacatttgagcgatgatgcacaacagtccaggaaaatgggcggtggacacttgaggctgaggatgggagttgacatgagcagggagagggaggtgcgcgctgcttatctgtgattgttgctcacctgagtgtggctgattgtgtacatccagcagttacaatttttaaaaattatacttttacatttattttatatttttctcacccccagtaatttccttccaaagaagttcacatgtaataagtagaaattctgtataggaaaaaagcattaaaaatactattataactgcttcatttgctgggaaccattaaaagtaatataaattagctttttccagaaggatccttttgtagcagtgtttatgaatgtaacccccagcaaaatatggctatatattaggggagccagtttggagcagaggcctgaaggtccctgctatgcagccgtggccacagctcgcagcccaagcactgtggagcatccacacctttgatggcaatgcagattggtagcaggttccataggcgtacaaaacagtattaaagctcagtgttttgcatattgttagcatttacaaatatttttgctttagtatgaggaaagtaaggatgggcaaagaagcgatcaaaatagctattgctacaacattttcgaaaacaaagttggggctgtatttctttaaaaagataagcctctaaaaatgcttggcaaaaaaaatatagtgttaaaataggccagtgatattaatgagaaaatgaaagtatgtatcaggaataaagtgatattgcataggagtattgtatttttatgaattttatgccagttgtttacatgtactatatatgttaaattaaaaaaaatcatgagtaatgagggaa

SEQ ID NO: 128046 - DNA, 619 bp, Homo sapiens
  Payload ID: 5075
  Gene Symbol: DPY19L1
  Gene Name: dpy-19-like 1 (C. elegans)
  ENST ID: ENST00000446375
  CDS Start-End: 1-619
tgtacccgtgtaatgtggacaccacctctccgtgaaagcttctcatatccatttcttgttcttcagatgttgctagtgactcatattctcagggctacaaaactttatagaggaagcttgattgcactctgcatttccaatgtatttttcatgcttccttggcagtttgctcagtttgtacttcttactcagattgcatcattatttgcagtatatgttgtcgggtacattgatatatgtaaattacggaagatcatttatatacacatgggtattctggcaatgaaaccacatttcctgaaaataaatgtatctgaacttagtttatgggttattcaaggatgtttttggttatttggaactgtcatacttaaatacttgacatctaaaatttttggtattgcagatgacgctcatattggcaacttactaacatcaaaattctttagttataaggattttgatactttattgtatacctgtgcagcggagtttgactttatggaaaaagagactccactgagatacacaaagacattattgcttccagttgttcttgtagtgtttgttgctattgttagaaagattattagtgatatgtggggtgtcttagctaaac

SEQ ID NO: 128047 - DNA, 255 bp, Homo sapiens
  Payload ID: 5075
  Gene Symbol: DPY19L1
  Gene Name: dpy-19-like 1 (C. elegans)
  ENST ID: ENST00000428054
  CDS Start-End: 1-250
gtttgcgggtgccatgcccacgatggcaagtgttaagctctctgcacttcggcccattgtgaatcatccacattatgaagacgcaggcttgaggcctggttgcagtatgcctgaaatttgggatgtagaagatcctgccaatgctgggaaaactcccttatgtaacctcttggtgaaggattccaaacctcacttcaccactgtattccagaacagtgtttacaaagtcctagaagttgtaaaagaatgactgct

SEQ ID NO: 128048 - DNA, 607 bp, Homo sapiens
  Payload ID: 5075
  Gene Symbol: DPY19L1
  Gene Name: dpy-19-like 1 (C. elegans)
  Uniprot ID: Q2PZI1
  ENST ID: ENST00000612226
  CDS Start-End: 177-434
atgcaaacagacagtgagtggaggacaccagcaaagtaataaggaatgtttcaaaaggatatgatgaactgaggcttatcgagtcagggagcagaaagctgaaataagaccgctaagctctaaacaaatccgttaaagcttcacagggcagagccagaacaaaaatagtatactcaatgtatagtcggaaagcagccgaagaagtgaagcgagaactgataaagttaaaagtgaactattacattctagaagagtcatggtgtgtaagaagatccaagcctggttgcagtatgcctgaaatttgggatgtagaagatcctgccaatgctgggaaaactcccttatgtaacctcttggtgaaggattccaaacctcacttcaccactgtattccagaacagtgtttacaaagtcctagaagttgtaaaagaatgactgctacatgacctgctgcctacggagaactacatctgtaatggttttaatgttttgctaagtcatgtgttgttcatatcccaaaaacttttataggtaactgttttcaaatagaaaacgttttatttggtcaatttgaatgtcattctaattataaaaatgacttacacctt

SEQ ID NO: 128049 - DNA, 4060 bp, Homo sapiens
  Payload ID: 5076
  Gene Symbol: DPY19L2
  Gene Name: dpy-19-like 2 (C. elegans)
  Uniprot ID: Q6NUT2
  ENST ID: ENST00000324472
  CDS Start-End: 185-2461
gcgaatggcttccaacgcatgcgccccaccccacatttcacagtcgccatgacgaccgggaggtccgcaacggctgcggggacaagtccgttgaggctgccaggcgagtcaggtctctctggacctcgcctgactcggctgggctgtgcctgaaattgacccagctccaccatactccttgattatgagaaaacaaggagtaagctcaaagcggctgcaatcttccggccgcagccagtctaaggggcggcgcggggcctccctcgcccgggagccggaggtagaggaggagatggaaaagtcggccctaggcggcgggaaactgccaaggggctcctggaggtcctccccggggaggatccaaagtctgaaagagcgaaaaggcttggagctagaggtggtggccaagacctttcttctcggccccttccagttcgtccgtaattccctggcgcagctccgggaaaaggtgcaggaactgcaggcgcggcggttctccagcagaaccactctcggcatcgctgtctttgtggcaattttacattggttacatttagtaacactttttgaaaatgatcgtcatttctctcacctctcatctttggaacgggagatgacttttcgcactgaaatgggactttattattcatacttcaagaccattattgaagcaccttcgtttttggaaggactgtggatgattatgaatgacaggcttactgaatatcctcttataattaatgcaataaaacgcttccatctttatccagaggtaatcatagcctcctggtattgcacattcatgggaataatgaatttatttggactagaaactaagacctgctggaatgtcaccagaatagaacctcttaatgaagttcaaagctgtgaaggattgggagatcctgcttgcttttatgttggtgtaatctttattttaaatggactaatgatgggattgttcttcatgtatggagcatacctgagtgggactcaactgggaggtcttattacagtactgtgcttctttttcaaccatggagaggccacccgtgtgatgtggacaccacctctccgtgaaagtttttcctatcctttccttgtacttcagatgtgtattttaactttgattctcaggacctcaagcaatgatagaaggcccttcattgcactctgtctttccaatgttgcttttatgcttccctggcaatttgctcagtttatactttttacacagatagcatcattatttcccatgtatgttgtgggatacattgaaccaagcaaatttcagaagatcatttatatgaacatgatttcagttacccttagtttcattttgatgtttggaaattcaatgtacttatcttcttattattcttcatctttgttaatgacgtgggcaataattctaaagagaaatgaaattcaaaaactgggagtatctaaactcaacttttggctaattcaaggtagtgcctggtggtgtggaacaatcattttgaaatttctgacatctaaaatcttaggcgtttcagaccacattcgcctgagtgatcttatagcagccagaatcttaaggtatacagattttgatactttaatatatacctgtgctcccgaatttgacttcatggaaaaagcgactccgctgagatacacaaagacattattgcttccagttgttatggtgattacatgttttatctttaaaaagactgttcgtgatatttcatatgttttagctacaaacatttatctaagaaaacagctccttgaacacagtgagctggcttttcacacattgcagttgttagtgtttactgcccttgccattttaattatgaggctaaagatgtttttgacaccgcacatgtgtgttatggcttccttgatatgctctcgacagctctttggctggctttttcgcagagttcgttttgagaaggttatctttggcattttaacagtgatgtcaatacaaggttatgcaaacctccgtaatcaatggagcataataggagaatttaataatttgcctcaggaagaacttttacagtggatcaaatacagtaccacatcagatgctgtctttgcaggtgccatgcctacaatggcaagcatcaagctgtctacacttcatcccattgtgaatcatccacattacgaagatgcagacttgagggctcggacaaaaatagtttattctacatatagtcgaaaatctgccaaagaagtaagagataaattgttggagttacatgtgaattattatgttttagaagaggcatggtgtgttgtgagaactaagcctggttgcagtatgcttgaaatctgggatgtggaagacccttccaatgcagctaaccctcccttatgtagcgtcctgctcgaagacgccaggccttacttcaccacagtatttcagaatagtgtgtacagagtattaaaggttaactgagaaggatactacccattttactatggcacaatgccgtgtgtcaaaaacaatcaccctttggcttattcacattaataaaaatcacaagctttaataacagacacttaaaaataagataaaaatggattggaaatttttctgattactaaaaggtaaattacttttctgttcattgaatgtcagccttattaagcttgtcatataagttattaaatcattcatgtcatactgcataaacaaatgttcatttcagaattttaaagagaaatgtatataaaagaacaatgaattttaataaatcaggggtatgtaagtcctttttcatccaactaggtgaattgcttcagattttctctagtaccagagggtacctcctcaaactctttgaaccacttaaggcagaagaatgcaagctctgaaatgacatccttaaaatgctgatactggtcacagcctctttacctctgtgaggaaattgtaacagtgtgtcttttaaggtgtttttattttaccagcccttaagaaagatctctaataccttttaatacttttttttaataatttcaagttgaagtgtttttaaaaacactttgttttgtaatgttttgaatctcttgagatgtgtttaccccactagatacatatttgccactggttagttctccatctaagctcaagaggttattcatctctctttagattccagtggcttttcttttaacatccaggtaaaacagaaactgctatggtatacaaccaagttttggggttaaacataatcagaaaagaaaatccagttaaatttatgaagtgagattttcagatcctagatcttgaataaaggaaaggtcttttcatcttgatggccccaaagcttgttggtcatggtctttatttctggccactatcttcttaaataatatatttttaagccctcatttatttttggttttgggtgaggaaagtcatgttttctaagtcctctcccctaataaaacctacccaacaatagtgctttgaaaagtggtagttatcttgaagatactcttgccaaatgcaaagataaacattctttttgtctgctttataaatatgaaatatgccagatctatagtattttaatgtgcatctactttaaatgagtcatcttggggtttttataattcccttatgttcttgcccctctacacttgaaataacaaaatgccttaattttatggattagttctcttatagtagacaggcagctatatgcagcaaaaccaataaagttatttttcaactttcatagttgtaaaatatcttataacagaatacaaaacagctaagaaaacatgccacattttattttagcattttcaaataatttgtttttggtgtaagcacaggataaaaaaggagagcgtcaaagaaaagagacataacacctaacattcataaaaattaacaaagtatattttggatgatgtttttacaggaaatattttaaataagttggtagaacttttaaaatggtactgtattagctaataaaatattcagtacaaatatatgtttggatttatgcattaaaaaactaataaaattatttccaacttt

SEQ ID NO: 128050 - DNA, 1173 bp, Homo sapiens
  Payload ID: 5076
  Gene Symbol: DPY19L2
  Gene Name: dpy-19-like 2 (C. elegans)
  ENST ID: ENST00000439061
  CDS Start-End: 1-449
caataattctaaagagaaatgaaattcaaaaactgggagtatctaaactcaacttttggctaattcaaggtagtgcctggtggtgtggaacaatcattttgaaatttctgacatctaaaatcttaggcgtttcagaccacattcgcctgagtgatcttatagcagccagaatcttaaggtatacagattttgatactttaatatatacctgtgctcccgaatttgacttcatggaaaaagcgactccgctgagatacacaaagacattattgcttccagttgttatggtgattacatgttttatctttaaaaagactgttcgtgatatttcatatgttttagctacaaacatttatctaagacagatggagcacagggaaatgtgtcttggcattctaaaaaagaatgaatggagaaccctggacactgttcccataaggagtacatgaagggacttgggatatttaattggataatagaagattgaaggaaaacagctccttgaacacagtgagctggcttttcacacattgcagttgttagtgtttactgcccttgccattttaattatgaggctaaagatgtttttgacaccgcacatgtgtgttatggcttccttgatatgctctcgacagatgctgtctttgcaggtgccatgcctacaatggcaagcatcaagctgtctacacttcatcccattgtgaatcatccacattacgaagatgcagacttgagggctcggacaaaaatagtttattctacatatagtcgaaaatctgccaaagaagtaagagataaattgttggagttacatgtgaattattatgttttagaagaggcatggtgtgttgtgagaactaagcctggttgcagtatgcttgaaatctgggatgtggaagacccttccaatgcagctaaccctcccttatgtagcgtcctgctcgaagacgccaggccttacttcaccacagtatttcagaatagtgtgtacagagtattaaaggttaactgagaaggatactacccattttactatggcacaatgccgtgtgtcaaaaacaatcaccctttggcttattcacattaataaaaatcacaagctttaataacagacacttaaaaataagataaaaatggattggaaatttttctgattactaaaaggtaaattac

SEQ ID NO: 128051 - DNA, 491 bp, Homo sapiens
  Payload ID: 5076
  Gene Symbol: DPY19L2
  Gene Name: dpy-19-like 2 (C. elegans)
  ENST ID: ENST00000538147
  CDS Start-End: 350-491
gtcgccatgacgaccgggaggtccgcaacggctgcggggacaagtccgttgaggctgccaggcgagtcaggtctctctggacctcgcctgactcggctgggctgtgcctgaaattgacccagctccaccatactccttgattatgagaaaacaaggaaggaattgaaaacaagcagttccccaaccaaacgggcacaggctgcgtttgcagctcctgtaaaagctccatacccagagcagtgtctcctagctcccagctgtctttgtggcaattttacattggttacatttagtaacactttttgaaaatgatcgtcatttctctcacctctcatctttggaacgggagatgacttttcgcactgaaatgggactttattattcatacttcaagaccattattgaagcaccttcgtttttggaaggactgtggatgattatgaatgacaggcttactgaatatcctcttataattaatgcaataaaacgct

SEQ ID NO: 128052 - DNA, 603 bp, Homo sapiens
  Payload ID: 5076
  Gene Symbol: DPY19L2
  Gene Name: dpy-19-like 2 (C. elegans)
  ENST ID: ENST00000541083
  CDS Start-End: 230-603
aactacataactagtaacaagaaactgaactggggaagcagagagtaaatggagaattttgatgacatttcatgatactaagattttccatcagagctccttcctacataacaaatgctgatgataataataatattctatattggaagtgagaaattctgccaagaagtctcatgctgccaatagcctacaaagaatgaaattataaccccagctcaattggtgctgcatgtttaaagtattccgtctgtttaacttcataaaagttggcccctttcagatagcatcattatttcccatgtatgttgtgggatacattgaaccaagcaaatttcagaagatcatttatatgaacatgatttcagttacccttagtttcattttgatgtttggaaattcaatgtacttatcttcttattattcttcatctttgttaatgacgtgggcaataattctaaagagaaatgaaattcaaaaactgggagtatctaaactcaacttttggctaattcaaggtagtgcctggtggtgtggaacaatcattttgaaatttctgacatctaaaatcttaggcgtttcagaccacattcgcctgagtgatct

SEQ ID NO: 128053 - DNA, 505 bp, Homo sapiens
  Payload ID: 5076
  Gene Symbol: DPY19L2
  Gene Name: dpy-19-like 2 (C. elegans)
  ENST ID: ENST00000542209
  CDS Start-End: 234-505
cccaatgaagcgcgtgaagggcaagcggtgatgggttctgcgccagtggggctgggagcccgtccggggctgtacatggggctgcgcgcaagtcgccatgacgaccgggaggtccgcaacggctgcggggacaagtccgttgaggctgccaggcgagtcaggtctctctggacctcgcctgactcggctgggctgtgcctgaaattgacccagctccaccatactccttgattatgagaaaacaaggagtaagctcaaagcggctgcaatcttccggccgcagccagtctaaggggcggcgcggggcctccctcgcccgggagccggaggtagaggaggagatggaaaagtcggccctaggcggcgggaaactgccaaggggctcctggaggtcctccccggggaggatccaaagtctgaaagagcgaaaaggcttggagctagaggtggtggccaagacctttcttctcggccccttccagttcgtccgtaattccctggcgca

SEQ ID NO: 128054 - DNA, 1549 bp, Homo sapiens
  Payload ID: 5076
  Gene Symbol: DPY19L2
  Gene Name: dpy-19-like 2 (C. elegans)
  ENST ID: ENST00000306389
  CDS Start-End: 150-578
tttcacagtcgccatgacgaccgggaggtccgcaacggctgcggggacaagtccgttgaggctgccaggcgagtcaggtctctctggacctcgcctgactcggctgggctgtgcctgaaattgacccagctccaccatactccttgattatgagaaaacaaggagtaagctcaaagcggctgcaatcttccggccgcagccagtctaaggggcggcgcggggcctccctcgcccgggagccggaggtagaggaggagatggaaaagtcggccctaggcggcgggaaactgccaaggggctcctggaggtcctccccggggaggatccaaagtctgaaagagcgaaaaggcttggagctagaggtggtggccaagacctttcttctcggccccttccagttcgtccgtaattccctggcgcagctccgggaaaaggtgcaggaactgcaggcgcggcggttctccagcagaaccactctcggcatcgctgtctttgtggcaattttacattgggactttattattcatacttcaagaccattattgaagcaccttcgtttttggaaggactgtggatgattatgaatgacaggcttactgaatatcctcttataattaatgcaataaaacgcttccatctttatccagaggtaatcatagcctcctggtattgcacattcatgggaataatgaatttatttggactagaaactaagacctgctggaatgtcaccagaatagaacctcttaatgaagttcaaagctgtgaaggattgggagatcctgcttgcttttatgttggtgtaatctttattttaaatggactaatgatgggattgttcttcatgtatggagcatacctgagtgggactcaactgggaggtcttattacagtactgtgcttctttttcaaccatggagaggacctcaagcaatgatagaaggcccttcattgcactctgtctttccaatgttgcttttatgcttccctggcaatttgctcagtttatactttttacacagatagcatcattatttcccatgtatgttgtgggatacattgaaccaagcaaatttcagaagatcatttatatgaacatgatttcagttacccttagtttcattttgatgtttggaaattcaatgtacttatcttcttattattcttcatctttgttaatgacgtgggcaataattctaaagagaaatgaaattcaaaaactgggagtatctaaactcaacttttggctaattcaaggtagtgcctggtggtgtggaacaatcattttgaaatttctgacatctaaaatcttaggcgtttcagaccacattcgcctgagtgatcttatagcagccagaatcttaaggtatacagattttgatactttaatatatacctgtgctcccgaatttgacttcatggaaaaagcgactccgctgagatacacaaagacattattgcttccagttgttatggtgattacatgttttatctttaaaaagactgttcgtgatatttcatatgttttagctacaaacatttatctaag

SEQ ID NO: 128055 - DNA, 6015 bp, Homo sapiens
  Payload ID: 5077
  Gene Symbol: DPY19L3
  Gene Name: dpy-19-like 3 (C. elegans)
  Uniprot ID: Q6ZPD9
  ENST ID: ENST00000342179
  CDS Start-End: 216-2366
aagtttgcggagcggcttctgctcgtcggccgtgcggcgaggcagggcctgggctgcgaccccggcggccgctcgcggtcttgggagagctggggcgcgtgcctgaacttcccggctgcccctgtccttggagacctacctgatggggacgccaggtgtgcaggggcgtggcgcgtaggagtgatttggagaacaatgcatgtaagtctgacatcatgatgtccatccggcaaagaagagaaataagagccacagaagtttctgaagactttccagcccaagaagaaaatgtgaagttggaaaataaattgccatctggttgtaccagtagaagattatggaagattttgtcattgacaattggtggaaccattgccctttgcattggacttcttacatctgtctaccttgccacgttacatgaaaatgatttatggttttctaatattaaggaagtggagcgagaaatctcattcagaacagagtgtggcctgtattactcctactacaagcagatgctgcaggctccaaccctcgtgcaaggttttcatggcctaatatatgataataaaactgaatctatgaagacaattaacctccttcagcgaatgaatatttaccaagaggtttttctcagtattttatatagagttctacccatacagaaatatttagagccagtttatttttatatttacaccttatttgggctccaggcgatctatgtcacagctctctacataaccagctggctactcagtggtacatggctgtcaggactgttggcagctttctggtatgtcacaaatagaatagataccacaagagttgagtttaccatcccactgagggagaactgggcgctgccattctttgcaattcagatagcagcaattacatatttcctgagaccaaacttacagcctctttctgaaaggctgacacttcttgccattttcatatcaacttttctctttagtctgacatggcaatttaatcaatttatgatgctgatgcaagcattagtgctgttcacactggactccctggacatgctgccagcagtgaaggcgacatggctgtatggaatacagataacaagtttactcctggtctgcattcttcagttttttaattccatgattcttggatcactgcttatcagttttaacctttcagtattcattgcaagaaaacttcagaaaaatctgaaaactggaagcttccttaataggcttgggaaacttttgttacatttatttatggttttatgtttgacactttttctcaacaacataattaagaaaattcttaacctgaagtcagatgaacacatatttaaatttctgaaggcaaaatttgggcttggagcaacaagggattttgatgcaaatctctatctgtgtgaagaagcttttggcctcctgccttttaatacatttggaaggctttcagatactctgcttttttatgcttacatattcgttctgtccatcacagtgattgtagcattcgttgttgcctttcataatctcagtgattctacaaatcaacaatccgtgggtaaaatggaaaaaggcacagttgacctgaaaccagaaactgcctacaacttaatacataccattctgtttggattcttggcattgagtacaatgagaatgaagtacctctggacgtcacacatgtgtgtgttcgcatcattcggcctatgtagccctgaaatatgggagttacttctgaagtcagtccatctttataacccaaagaggatatgtataatgcgatattcagtaccgatattaatactgctgtatctatgctataagttctggccaggaatgatggatgaactctccgagttgagagaattctatgatccagatacagtggagctgatgaactggattaactctaacactccaagaaaggctgtgtttgcgggaagcatgcagttgctggccggagtcaagctgtgcacgggaaggaccctaaccaaccacccgcactatgaagacagcagcctgagagagcggaccagagcggtttatcagatatatgccaagagggcaccagaggaagtgcatgccctcctaaggtccttcggcactgactacgtaatcctggaagacagcatctgctacgagcggaggcaccgccggggctgccgactccgggacctgctggacattgccaacggccacatgatggatggcccaggagagaatgatcctgatttgaaacctgcagaccaccctcgcttctgtgaagagatcaaaagaaacctgcctccctacgtggcctacttcaccagagtgttccagaacaaaaccttccacgtttacaagctgtccagaaacaagtagcgcagatttctgcccagtgtctatttttgatacggagaaactgcatcatgatgaaactcaatagatgacgtttcctatgtaagtaggtagcccaaaccttcaagctgtgatatgagtaagttctacagatgtttacacaagtgttgccatctttgaaagcatcttctacaagcagaagtctttttcgttgtgtgtctatctttctcattaatgttctttagcctaaatgttaacaactttctaagagtgacctagaattatgttgttggagagaatgatgtgtgttccatggatacctggataggcacataacatgttggaagatgagcacctgctcaggatttgaaatacgtttaattttcaggtgacttaagacagctatgattgaatcaactagagatgatgatcgacttatttaatatgatttcactggtgaagaccaattggtagctttttaaaaagcactttagtgtcctgttttaccttaaaatgttataatattttccagttgtcatgctgtcaacattaacaaaaaaaatcatgttaaggctttgtatcaaacattttgttacactctgtctgaaatgtaatgtggagtacttcagcagtatgtgtcatgtattgtgtgtgtctgtgtgtgtgcatgtgcacacatgtgttttaatgctgggcacagaaaagtgttacaagttccatatcgtaagtccttaaaggggcagaaatatatgtagccaagtagaatttattacattttagtgttattattttaaaacttactgatactctttaacctctcctgcagtaatagttttgctttatttcttactcatttcaatttattgggtttgcaaaattttgtaaactttttgtgtttttagcctttgtattttttacagcctagaatcttgcaaagtctgaatattttttaaatgttctatcttaactagttcactaatacagtatttttagcagacagcattttcagacagcattttcataccaagtttgacttgtggtctccaatcttactgggaaggccctggtagtgtaattcttttccttattaaaaggtaaccaagtgcctctaagtcatgcttatttgtaaacaacaaagaagagtatatgtacctgctcaaaatttttttgataatcgcttatataattaatttctaatgatgaggacatgtaaaagttgccagtaagaacatagtatgcatttaattaaatcaagatggctaatggaattaactttctcccctgttcttgccaggtggaaatgatttaagcatttctccttgcagttgtattgaagtaaattaccataggcatcaagatggctgcatcacattttcaaatgattttatattcagttgctacttataaagcagcattcaaaaagtcttttacactgtcatgttggacacaagcagactcagcttttatcaaaacttgtttaaataaaaaattgacagtagctgggttattaaattatgcaactgaaactcctgaattatatcttttctgtatcccttaataagattggagaccactgccgtttaggataatacaataataaaacgttttaatcagtactaaaactttaattaagccaataatgatgcatgcctgttgtagctgacagcatgggtcagtacatccttcagcgagtgccttactctaattgaaaccaagcacacgtaaggtacaatatgttagactctgtgattttgttttcaaaatcctctgttatggctatatttaaatttattttaaatattcctgtatgtattcatctaagcatttgggcatttggagtcttaatatacaagaaacacgtacttaaatttttatgcttatcaccgcaatgatggcaaacagtgattttttttttcatagtttaggtgtcattgttgccagcacctttagtgctcagtcttcagtgaaaaatataaagtgccaaaaaaatcttgcaagacagaatccatacttaacactctttccaagacactgtgaccatgtacagtagctatttcctgatgaccaaatctctcaacgaatcatgttattaataaatatttttagcactcatcagtattctccaatgtgaccttctcattggagtacacagaaggaaagcaaagaagagcatctgacttctagctctggcttacagcctctctaccaggccgaagcaagagacccgcggcagcagctccccgccactcagacctgggtggtgataacctcaaagaatggctctgttttctattgacagaaaacccacttgattttgcttctgagttagcagtcagaagaccctctaagtacaatagaagtgctcttaacggactctgcctgtgtgactcccaggccccggagtctccatctctctcgtaagccacctgccacagcacagctggaggctgttctctggtgttctcagcgctccggctccctccctggagttgtgcacccgtcccaaactcctccatgcaagttctgcttcctcttataagtacacaactcagttaagtattcacatacacacagaaaatacgggtgtgaaaagaaagaattttctgtaaaaattaagttgaatactttggtaaaaagtgataaaggctgagttgccaataaaagttgcttttaaattaggtgtggctgggaatattataagatattggggaaaatatacaaatcaagaaaatttctgagcttagattgcttcatagatttatttaagtactcatcccacctttaaaacctctaaactgagaagaagggacccaaatcatgttattggtgtgatttatgtgagaagtagaactgtagtcattggacccttaggcaaaggaaaatccgtgtctttatatcagaagatcggcaaacgaatgtatattacacagtttaggttatgattccctactttaacctacttactttattaaatgaccaactactgatactgatcacaatagttattagagattctaatttagttggaaggttctaatcactttcattacaggcatttgaaaaatagggattcatttcgaatatattagccaggagcatagttagatgttacccaggccatttatcatcctgttaatgatgattttcccgacccttgtgagatcagcgtgacaggagtgtgtgtgtgtgtgtgtgtttctgtgggtgtgtggttttggttgggtgctgccaggtggcaaaggcatatgtaaatacatctgatctgcatctttatttcacagttaactaaaagtaaaaatgtctattctgattccatattgattttgtctaagatgtaaaaatttgagttcatctttggccaaaacctacctgaattaacatacaaaatatttgatttttaaaatttaattcaaatctcaaaatcaattaagtattctcagatcctatatcttggttaatatgctcccagatactttaaacatggcaaccttttggcctaagagaatgtttgttcatggaaaaaagcttttgagatgagagggtgtcttactttcttgtggcaattgattttctgttttaacaccctttgggtaaaatcttgcaaagagcttttataatttgttttactgaattgtatggagattgtataccaagtaaagctcttttaaattac

SEQ ID NO: 128056 - DNA, 5998 bp, Homo sapiens
  Payload ID: 5077
  Gene Symbol: DPY19L3
  Gene Name: dpy-19-like 3 (C. elegans)
  Uniprot ID: Q6ZPD9
  ENST ID: ENST00000392250
  CDS Start-End: 199-2349
gttgacgccccccagcccctcatttccacaaagctccgcggcggttctgccctccttgtacccgcggcgcgctgcggcccgtggcgcggccccgttcccgcctagccccgtcggcctccttcccctcccggagccgcgcgtgaggacggctgaggccgcaggagtgatttggagaacaatgcatgtaagtctgacatcatgatgtccatccggcaaagaagagaaataagagccacagaagtttctgaagactttccagcccaagaagaaaatgtgaagttggaaaataaattgccatctggttgtaccagtagaagattatggaagattttgtcattgacaattggtggaaccattgccctttgcattggacttcttacatctgtctaccttgccacgttacatgaaaatgatttatggttttctaatattaaggaagtggagcgagaaatctcattcagaacagagtgtggcctgtattactcctactacaagcagatgctgcaggctccaaccctcgtgcaaggttttcatggcctaatatatgataataaaactgaatctatgaagacaattaacctccttcagcgaatgaatatttaccaagaggtttttctcagtattttatatagagttctacccatacagaaatatttagagccagtttatttttatatttacaccttatttgggctccaggcgatctatgtcacagctctctacataaccagctggctactcagtggtacatggctgtcaggactgttggcagctttctggtatgtcacaaatagaatagataccacaagagttgagtttaccatcccactgagggagaactgggcgctgccattctttgcaattcagatagcagcaattacatatttcctgagaccaaacttacagcctctttctgaaaggctgacacttcttgccattttcatatcaacttttctctttagtctgacatggcaatttaatcaatttatgatgctgatgcaagcattagtgctgttcacactggactccctggacatgctgccagcagtgaaggcgacatggctgtatggaatacagataacaagtttactcctggtctgcattcttcagttttttaattccatgattcttggatcactgcttatcagttttaacctttcagtattcattgcaagaaaacttcagaaaaatctgaaaactggaagcttccttaataggcttgggaaacttttgttacatttatttatggttttatgtttgacactttttctcaacaacataattaagaaaattcttaacctgaagtcagatgaacacatatttaaatttctgaaggcaaaatttgggcttggagcaacaagggattttgatgcaaatctctatctgtgtgaagaagcttttggcctcctgccttttaatacatttggaaggctttcagatactctgcttttttatgcttacatattcgttctgtccatcacagtgattgtagcattcgttgttgcctttcataatctcagtgattctacaaatcaacaatccgtgggtaaaatggaaaaaggcacagttgacctgaaaccagaaactgcctacaacttaatacataccattctgtttggattcttggcattgagtacaatgagaatgaagtacctctggacgtcacacatgtgtgtgttcgcatcattcggcctatgtagccctgaaatatgggagttacttctgaagtcagtccatctttataacccaaagaggatatgtataatgcgatattcagtaccgatattaatactgctgtatctatgctataagttctggccaggaatgatggatgaactctccgagttgagagaattctatgatccagatacagtggagctgatgaactggattaactctaacactccaagaaaggctgtgtttgcgggaagcatgcagttgctggccggagtcaagctgtgcacgggaaggaccctaaccaaccacccgcactatgaagacagcagcctgagagagcggaccagagcggtttatcagatatatgccaagagggcaccagaggaagtgcatgccctcctaaggtccttcggcactgactacgtaatcctggaagacagcatctgctacgagcggaggcaccgccggggctgccgactccgggacctgctggacattgccaacggccacatgatggatggcccaggagagaatgatcctgatttgaaacctgcagaccaccctcgcttctgtgaagagatcaaaagaaacctgcctccctacgtggcctacttcaccagagtgttccagaacaaaaccttccacgtttacaagctgtccagaaacaagtagcgcagatttctgcccagtgtctatttttgatacggagaaactgcatcatgatgaaactcaatagatgacgtttcctatgtaagtaggtagcccaaaccttcaagctgtgatatgagtaagttctacagatgtttacacaagtgttgccatctttgaaagcatcttctacaagcagaagtctttttcgttgtgtgtctatctttctcattaatgttctttagcctaaatgttaacaactttctaagagtgacctagaattatgttgttggagagaatgatgtgtgttccatggatacctggataggcacataacatgttggaagatgagcacctgctcaggatttgaaatacgtttaattttcaggtgacttaagacagctatgattgaatcaactagagatgatgatcgacttatttaatatgatttcactggtgaagaccaattggtagctttttaaaaagcactttagtgtcctgttttaccttaaaatgttataatattttccagttgtcatgctgtcaacattaacaaaaaaaatcatgttaaggctttgtatcaaacattttgttacactctgtctgaaatgtaatgtggagtacttcagcagtatgtgtcatgtattgtgtgtgtctgtgtgtgtgcatgtgcacacatgtgttttaatgctgggcacagaaaagtgttacaagttccatatcgtaagtccttaaaggggcagaaatatatgtagccaagtagaatttattacattttagtgttattattttaaaacttactgatactctttaacctctcctgcagtaatagttttgctttatttcttactcatttcaatttattgggtttgcaaaattttgtaaactttttgtgtttttagcctttgtattttttacagcctagaatcttgcaaagtctgaatattttttaaatgttctatcttaactagttcactaatacagtatttttagcagacagcattttcagacagcattttcataccaagtttgacttgtggtctccaatcttactgggaaggccctggtagtgtaattcttttccttattaaaaggtaaccaagtgcctctaagtcatgcttatttgtaaacaacaaagaagagtatatgtacctgctcaaaatttttttgataatcgcttatataattaatttctaatgatgaggacatgtaaaagttgccagtaagaacatagtatgcatttaattaaatcaagatggctaatggaattaactttctcccctgttcttgccaggtggaaatgatttaagcatttctccttgcagttgtattgaagtaaattaccataggcatcaagatggctgcatcacattttcaaatgattttatattcagttgctacttataaagcagcattcaaaaagtcttttacactgtcatgttggacacaagcagactcagcttttatcaaaacttgtttaaataaaaaattgacagtagctgggttattaaattatgcaactgaaactcctgaattatatcttttctgtatcccttaataagattggagaccactgccgtttaggataatacaataataaaacgttttaatcagtactaaaactttaattaagccaataatgatgcatgcctgttgtagctgacagcatgggtcagtacatccttcagcgagtgccttactctaattgaaaccaagcacacgtaaggtacaatatgttagactctgtgattttgttttcaaaatcctctgttatggctatatttaaatttattttaaatattcctgtatgtattcatctaagcatttgggcatttggagtcttaatatacaagaaacacgtacttaaatttttatgcttatcaccgcaatgatggcaaacagtgattttttttttcatagtttaggtgtcattgttgccagcacctttagtgctcagtcttcagtgaaaaatataaagtgccaaaaaaatcttgcaagacagaatccatacttaacactctttccaagacactgtgaccatgtacagtagctatttcctgatgaccaaatctctcaacgaatcatgttattaataaatatttttagcactcatcagtattctccaatgtgaccttctcattggagtacacagaaggaaagcaaagaagagcatctgacttctagctctggcttacagcctctctaccaggccgaagcaagagacccgcggcagcagctccccgccactcagacctgggtggtgataacctcaaagaatggctctgttttctattgacagaaaacccacttgattttgcttctgagttagcagtcagaagaccctctaagtacaatagaagtgctcttaacggactctgcctgtgtgactcccaggccccggagtctccatctctctcgtaagccacctgccacagcacagctggaggctgttctctggtgttctcagcgctccggctccctccctggagttgtgcacccgtcccaaactcctccatgcaagttctgcttcctcttataagtacacaactcagttaagtattcacatacacacagaaaatacgggtgtgaaaagaaagaattttctgtaaaaattaagttgaatactttggtaaaaagtgataaaggctgagttgccaataaaagttgcttttaaattaggtgtggctgggaatattataagatattggggaaaatatacaaatcaagaaaatttctgagcttagattgcttcatagatttatttaagtactcatcccacctttaaaacctctaaactgagaagaagggacccaaatcatgttattggtgtgatttatgtgagaagtagaactgtagtcattggacccttaggcaaaggaaaatccgtgtctttatatcagaagatcggcaaacgaatgtatattacacagtttaggttatgattccctactttaacctacttactttattaaatgaccaactactgatactgatcacaatagttattagagattctaatttagttggaaggttctaatcactttcattacaggcatttgaaaaatagggattcatttcgaatatattagccaggagcatagttagatgttacccaggccatttatcatcctgttaatgatgattttcccgacccttgtgagatcagcgtgacaggagtgtgtgtgtgtgtgtgtgtttctgtgggtgtgtggttttggttgggtgctgccaggtggcaaaggcatatgtaaatacatctgatctgcatctttatttcacagttaactaaaagtaaaaatgtctattctgattccatattgattttgtctaagatgtaaaaatttgagttcatctttggccaaaacctacctgaattaacatacaaaatatttgatttttaaaatttaattcaaatctcaaaatcaattaagtattctcagatcctatatcttggttaatatgctcccagatactttaaacatggcaaccttttggcctaagagaatgtttgttcatggaaaaaagcttttgagatgagagggtgtcttactttcttgtggcaattgattttctgttttaacaccctttgggtaaaatcttgcaaagagcttttataatttgttttactgaattgtatggagattgtataccaagtaaagctcttttaaattac

SEQ ID NO: 128057 - DNA, 2456 bp, Homo sapiens
  Payload ID: 5077
  Gene Symbol: DPY19L3
  Gene Name: dpy-19-like 3 (C. elegans)
  ENST ID: ENST00000587077
  CDS Start-End: 405-713
cggccgcgctcagagtctccggaacagaccggactcaatgcggaccaggcaagcggaagtgtgccgcttccttccggccagcgcagcacgagacgaggcggggaaccgcgggaggaggcggggcctagtgttgacgaacagctcccggggcctatgggcgcgggggcagccgcccggcctctccggcgcgccccctccccggggctgttgacgccccccagcccctcatttccacaaagctccgcggcggttctgccctccttgtacccgcggcgcgctgcggcccgtggcgcggccccgttcccgcctagccccgtcggcctccttcccctcccggagccgcgcgtgaggacggctgaggccgcaggagtgatttggagaacaatgcatgtaagtctgacatcatgatgtccatccggcaaagaagagaaataagagccacagaagtttctgaagactttccagcccaagaagaaaatgtgaagttggaaaataaattgccatctggttgtaccagtagaagattatggaagattttgtcattgacaattggtggaaccattgccctttgcattggacttcttacatctgtctaccttgccacgttacatgaaaatgatttatggttttctaatattaaggtatggagtttctttgaccattgtatcattcactcagtgggatctccagtagtaagccatgtggatgaatgaccaaggcaacacagttttgccataaagaatccaatctctagaaaggttggactatagagtgaaataacttttgtgtttattattttaaaataacatattagaatctttttttaaatttttctttattatttatttatttttgagatggagtctcactctgtcacccaggctggagtgcggtggcgcaatcttggctcactacaacctctgcctcgcaggttcaggtgattcttctggcttagcctcccaagtagctgggactataggtgcgtgccaccacacccagctaatttttgtatttttactagagacggggtttcagcatattgaccaggctgatctcgaactcctgaccttgtgatctgcctgtctcagcctcccaaagtgctgggattacaggcgtgagccactgcgtccagccagaatctttatttttcattttaattttttgagatagggtattgctctgtcacccaggctagaatgcagtggtgcaaacatgggtcactgcagcctcaacctcctgggctcaagtgagtatcctgcctaagcttcctgtgtcactgggaccccaggcatgcaccacctcaccaagctaaatttgatttttttgtagagacagggtctcactttgttgcccatgctggtctcgaactcctgggctcaagcgatcctactgccctggtcttccaaaatatgagaatgagccatagcacccagcccagaatttttataatcaagtgagttttttctttttcattaacttattccatttatttagcagttattctaaattagtatttttcaagttatagattgtgaaattagtgcagtaggtcatgagtaacatttttcttaatgaaatcaaaaagaaagaatactatcacatctagtagggttgaggattgttttgtgaaacttttaattttatatatatatatatatgcacaaactgggtcacagtatacaaggtacttccttttcttttttttcttgttggctacaacaggaaaaaaaaaaaacagaaaaggaaataaaaaagccactgctttaaatcatggggtctaaatgtggctccacagagggtcctcagcatgttcatgactatctaatactctgtgcaagtggttttgcagggcatagggcgatggggaagccatatgtttccagggaaaggaactgtaattttaatcagattttcaggagggttagccgggcgtcacgcctgtaatcccagcactttgggaggtcgaggcgggcagatcacttgaagtcaggagttcaagaccagcctggccaacatggtggaaccctatctctactaaaaatacaaaaattagccgggcatggtgacacacacctgtaatctcagctactcaggaggctgaggcacaagaatcacttgaactcgggaggaagaggttgcagtgagctgagatcccaccactgcactccagcctgggcaacagagcaatactctttatcaaaaaaaaaaagaaaaaagttgagggggtggtctgtgactctttaaacacgtttccttgttttctttctctctctctttttcaacatttctagaactcctcttggcattgttttcagaactcgtatataacttacatgtggaaatttgcatccaaatataccttacattttaatctaatatgtcatgatctttaacctaaactgtggtgtctaatgactagttgcttgtaaaaataaacaaacaccttcaaagccaaa

SEQ ID NO: 128058 - DNA, 3589 bp, Homo sapiens
  Payload ID: 5077
  Gene Symbol: DPY19L3
  Gene Name: dpy-19-like 3 (C. elegans)
  ENST ID: ENST00000588648
  CDS Start-End: 1-928
cttacagcctctttctgaaaggctgacacttcttgccattttcatatcaacttttctctttagtctgacatggcaatttaatcaatttatgatgctgatgcaagcattagtgctgttcacactggactccctggacatgctgccagcagtgaaggcgacatggctgtatggaatacagataacaagtttactcctggtctgcattcttcagttttttaattccatgattcttggatcactgcttatcagttttaacctttcagtattcattgcaagaaaacttcagaaaaatctgaaaactggaagcttccttaataggcttgggaaacttttgttacatttatttatggttttatgtttgacactttttctcaacaacataattaagaaaattcttaacctgaagtcagatgaacacatatttaaatttctgaaggcaaaatttgggcttggagcaacaagggattttgatgcaaatctctatctgtgtgaagaagcttttggcctcctgccttttaatacatttggaaggctttcagatactctgcttttttatgcttacatattcgttctgtccatcacagtgattgtagcattcgttgttgcctttcataatctcagtgattctacaaatcaacaatccgtgggtaaaatggaaaaaggcacagttgacctgaaaccagaaactgcctacaacttaatacataccattctgtttggattcttggcattgagtacaatgagaatgaagtacctctggacgtcacacatgtgtgtgttcgcatcattcggcctatgtagccctgaaatatgggagttacttctgaagtcagtccatctttataacccaaagaggatatgtataatgcgatattcagtaccgatattaatactgctgtatctatgctataagaaccagaagtcctgacacctgatttcccatcactagcaattttcctgattcacccacccaggagacaagatttgaatgagcagtaaaaatggccaaagatgagatgaccaaaaaaacagtgataggtctcaaacacagccagagatcaatcagttctggccaggaatgatggatgaactctccgagttgagagaattctatgatccagatacagtggagctgatgaactggattaactctaacactccaagaaaggctgtgtttgcgggaagcatgcagttgctggccggagtcaagctgtgcacgggaaggaccctaaccaaccacccgcactatgaagacagcagcctgagagagcggaccagagcggtttatcagatatatgccaagagggcaccagaggaagtgcatgccctcctaaggtccttcggcactgactacgtaatcctggaagacagcatctgctacgagcggaggcaccgccggggctgccgactccgggacctgctggacattgccaacggccacgccggctttcagaggctaagttgcactccagagcagaaaagcagcaagccgcttctcccttctcccttctgaggaaagtgttcttggagctatgccaggtctcagtagagcaaacagattttcaccctttagaggtgtgatgtgtgctgtaattaatggtatgaaagccaatagatatttgtaaacaagttggacaaagtgacaaacctagcctaaatttgaaaaaaaaaaatcttgactgtacagaatttgagattcagatttttgcccgaggagaatcatagttcataactgtcttgagttcagaggtggtacagaccagagacatccatttaaattttgatttgagcgtgactttttcagttatttatttatttatttatttatttttagagacagggtctcactctgtcactcagactggaatgcagtggcgtgatcttggcttactgcagcctcaaccttccaggctcaagtgatcctcccacttcagcctcccaagtagctgggaccacaggcatacatcaccatacccagctaattttgtttattttttgtaaagatggagtctggctatgttgcccagatgagtctcagactcctgatccaagcgatcctcctgcctcagcctcccaaagtgctgggatttcaggcatgagccaccacgcctggcctaaatgtgactttttctgatgagttagagagctttctctgatcactgtagttctctgtatttcatttctatgagagagacagtatagtatgttcctgagagcaagcagacctgagttctagttctggctttcccgttaatgggatcatcgtgtgacgctgcactctccttctcagccttggtctgcacttctgaagggggaaaaggatggccctgatgatctccagatgatggatggcccaggagagaatgatcctgatttgaaacctgcagaccaccctcgcttctgtgaagagatcaaaagaaacctgcctccctacgtggcctacttcaccagagtgttccagaacaaaaccttccacgtttacaagctgtccagaaacaagtagcgcagatttctgcccagtgtctatttttgatacggagaaactgcatcatgatgaaactcaatagatgacgtttcctatgtaagtaggtagcccaaaccttcaagctgtgatatgagtaagttctacagatgtttacacaagtgttgccatctttgaaagcatcttctacaagcagaagtctttttcgttgtgtgtctatctttctcattaatgttctttagcctaaatgttaacaactttctaagagtgacctagaattatgttgttggagagaatgatgtgtgttccatggatacctggataggcacataacatgttggaagatgagcacctgctcaggatttgaaatacgtttaattttcaggtgacttaagacagctatgattgaatcaactagagatgatgatcgacttatttaatatgatttcactggtgaagaccaattggtagctttttaaaaagcactttagtgtcctgttttaccttaaaatgttataatattttccagttgtcatgctgtcaacattaacaaaaaaaatcatgttaaggctttgtatcaaacattttgttacactctgtctgaaatgtaatgtggagtacttcagcagtatgtgtcatgtattgtgtgtgtctgtgtgtgtgcatgtgcacacatgtgttttaatgctgggcacagaaaagtgttacaagttccatatcgtaagtccttaaaggggcagaaatatatgtagccaagtagaatttattacattttagtgttattattttaaaacttactgatactctttaacctctcctgcagtaatagttttgctttatttcttactcatttcaatttattgggtttgcaaaattttgtaaactttttgtgtttttagcctttgtattttttacagcctagaatcttgcaaagtctgaatattttttaaatgttctatcttaactagttcactaatacagtatttttagcagacagcattttcagacagcattttcataccaagtttgacttgtggtctccaatcttactgggaaggccctggtagtgtaattcttttccttattaaaaggtaaccaagtgcctct

SEQ ID NO: 128059 - DNA, 529 bp, Homo sapiens
  Payload ID: 5077
  Gene Symbol: DPY19L3
  Gene Name: dpy-19-like 3 (C. elegans)
  ENST ID: ENST00000586427
  CDS Start-End: 152-529
gcggccgctcgcggtcttgggagagctggggcgcgtgcctgaacttcccggctgcccctgtccttggagacctacctgatggggacgccaggtgtgcaggggcgtggcgcgtaggagtgatttggagaacaatgcatgtaagtctgacatcatgatgtccatccggcaaagaagagaaataagagccacagaagtttctgaagactttccagcccaagaagaaaatgtgaagttggaaaataaattgccatctggttgtaccagtagaagattatggaagattttgtcattgacaattggtggaaccattgccctttgcattggacttcttacatctgtctaccttgccacgttacatgaaaatgatttatggttttctaatattaaggaagtggagcgagaaatctcattcagaacagagtgtggcctgtattactcctactacaagcagatgctgcaggctccaaccctcgtgcaaggttttcatggcctaatatatgataataaaactgaatctatgaagacaatt

SEQ ID NO: 128060 - DNA, 5925 bp, Homo sapiens
  Payload ID: 5077
  Gene Symbol: DPY19L3
  Gene Name: dpy-19-like 3 (C. elegans)
  ENST ID: ENST00000586987
  CDS Start-End: 68-2134
agccgcgcgtgaggacggctgaggccgcaggagtgatttggagaacaatgcatgtaagtctgacatcatgatgtccatccggcaaagaagagaaataagagccacagaagtttctgaagactttccagcccaagaagaaaatgtgaagttggaaaataaattgccatctggttgtaccagtagaagattatggaagattttgtcattgacaattggtggaaccattgccctttgcattggacttcttacatctgtctaccttgccacgttacatgaaaatgatttatggttttctaatattaaggaagtggagcgagaaatctcattcagaacagagtgtggcctgtattactcctactacaagcagatgctgcaggctccaaccctcgtgcaaggttttcatggcctaatatatgataataaaactgaatctatgaagacaattaacctccttcagcgaatgaatatttaccaagaggtttttctcagtattttatatagagttctacccatacagaaatatttagagccagtttatttttatatttacaccttatttgggctccaggcgatctatgtcacagctctctacataaccagctggctactcagtggtacatggctgtcaggactgttggcagctttctggtatgtcacaaatagaatagataccacaagagttgagtttaccatcccactgagggagaactgggcgctgccattctttgcaattcagatagcagcaattacatatttcctgagaccaaacttacagcctctttctgaaaggctgacacttcttgccattttcatatcaacttttctctttagtctgacatggcaatttaatcaatttatgatgctgatgcaagcattagtgctgttcacactggactccctggacatgctgccagcagtgaaggcgacatggctgtatggaatacagataacaagtttactcctggtctgcattcttcagttttttaattccatgattcttggatcactgcttatcagttttaacctttcagtattcattgcaagaaaacttcagaaaaatctgaaaactggaagcttccttaataggcttgggaaacttttgttacatttatttatggttttatgtttgacactttttctcaacaacataattaagaaaattcttaacctgaagtcagatgaacacatatttaaatttctgaaggcaaaatttgggcttggagcaacaagggattttgatgcaaatctctatctgtgtgaagaagcttttggcctcctgccttttaatacatttggaaggctttcagatactctgcttttttatgcttacatattcgttctgtccatcacagtgattgtagcattcgttgttgcctttcataatctcagtgattctacaaatcaacaatccgtgggtaaaatggaaaaaggcacagttgacctgaaaccagaaactgcctacaacttaatacataccattctgtttggattcttggcattgagtacaatgagaatgaagtacctctggacgtcacacatgtgtgtgttcgcatcattcggcctatgtagccctgaaatatgggagttacttctgaagtcagtccatctttataacccaaagaggatatgtataatgcgatattcagtaccgatattaatactgctgtatctatgctataagttctggccaggaatgatggatgaactctccgagttgagagaattctatgatccagatacagtggagctgatgaactggattaactctaacactccaagaaaggctgtgtttgcgggaagcatgcagttgctggccggagtcaagctgtgcacgggaaggaccctaaccaaccacccgcactatgaagacagcagcctgagagagcggaccagagcggtttatcagatatatgccaagagggcaccagaggaagtgcatgccctcctaaggtccttcggcactgactacgtaatcctggaagacagcatctgctacgagcggaggcaccgccggggctgccgactccgggacctgctggacattgccaacggccacaagccctctcttggcactttagtgactgccaccggggctgggcaagggagagatgatggatggcccaggagagaatgatcctgatttgaaacctgcagaccaccctcgcttctgtgaagagatcaaaagaaacctgcctccctacgtggcctacttcaccagagtgttccagaacaaaaccttccacgtttacaagctgtccagaaacaagtagcgcagatttctgcccagtgtctatttttgatacggagaaactgcatcatgatgaaactcaatagatgacgtttcctatgtaagtaggtagcccaaaccttcaagctgtgatatgagtaagttctacagatgtttacacaagtgttgccatctttgaaagcatcttctacaagcagaagtctttttcgttgtgtgtctatctttctcattaatgttctttagcctaaatgttaacaactttctaagagtgacctagaattatgttgttggagagaatgatgtgtgttccatggatacctggataggcacataacatgttggaagatgagcacctgctcaggatttgaaatacgtttaattttcaggtgacttaagacagctatgattgaatcaactagagatgatgatcgacttatttaatatgatttcactggtgaagaccaattggtagctttttaaaaagcactttagtgtcctgttttaccttaaaatgttataatattttccagttgtcatgctgtcaacattaacaaaaaaaatcatgttaaggctttgtatcaaacattttgttacactctgtctgaaatgtaatgtggagtacttcagcagtatgtgtcatgtattgtgtgtgtctgtgtgtgtgcatgtgcacacatgtgttttaatgctgggcacagaaaagtgttacaagttccatatcgtaagtccttaaaggggcagaaatatatgtagccaagtagaatttattacattttagtgttattattttaaaacttactgatactctttaacctctcctgcagtaatagttttgctttatttcttactcatttcaatttattgggtttgcaaaattttgtaaactttttgtgtttttagcctttgtattttttacagcctagaatcttgcaaagtctgaatattttttaaatgttctatcttaactagttcactaatacagtatttttagcagacagcattttcagacagcattttcataccaagtttgacttgtggtctccaatcttactgggaaggccctggtagtgtaattcttttccttattaaaaggtaaccaagtgcctctaagtcatgcttatttgtaaacaacaaagaagagtatatgtacctgctcaaaatttttttgataatcgcttatataattaatttctaatgatgaggacatgtaaaagttgccagtaagaacatagtatgcatttaattaaatcaagatggctaatggaattaactttctcccctgttcttgccaggtggaaatgatttaagcatttctccttgcagttgtattgaagtaaattaccataggcatcaagatggctgcatcacattttcaaatgattttatattcagttgctacttataaagcagcattcaaaaagtcttttacactgtcatgttggacacaagcagactcagcttttatcaaaacttgtttaaataaaaaattgacagtagctgggttattaaattatgcaactgaaactcctgaattatatcttttctgtatcccttaataagattggagaccactgccgtttaggataatacaataataaaacgttttaatcagtactaaaactttaattaagccaataatgatgcatgcctgttgtagctgacagcatgggtcagtacatccttcagcgagtgccttactctaattgaaaccaagcacacgtaaggtacaatatgttagactctgtgattttgttttcaaaatcctctgttatggctatatttaaatttattttaaatattcctgtatgtattcatctaagcatttgggcatttggagtcttaatatacaagaaacacgtacttaaatttttatgcttatcaccgcaatgatggcaaacagtgattttttttttcatagtttaggtgtcattgttgccagcacctttagtgctcagtcttcagtgaaaaatataaagtgccaaaaaaatcttgcaagacagaatccatacttaacactctttccaagacactgtgaccatgtacagtagctatttcctgatgaccaaatctctcaacgaatcatgttattaataaatatttttagcactcatcagtattctccaatgtgaccttctcattggagtacacagaaggaaagcaaagaagagcatctgacttctagctctggcttacagcctctctaccaggccgaagcaagagacccgcggcagcagctccccgccactcagacctgggtggtgataacctcaaagaatggctctgttttctattgacagaaaacccacttgattttgcttctgagttagcagtcagaagaccctctaagtacaatagaagtgctcttaacggactctgcctgtgtgactcccaggccccggagtctccatctctctcgtaagccacctgccacagcacagctggaggctgttctctggtgttctcagcgctccggctccctccctggagttgtgcacccgtcccaaactcctccatgcaagttctgcttcctcttataagtacacaactcagttaagtattcacatacacacagaaaatacgggtgtgaaaagaaagaattttctgtaaaaattaagttgaatactttggtaaaaagtgataaaggctgagttgccaataaaagttgcttttaaattaggtgtggctgggaatattataagatattggggaaaatatacaaatcaagaaaatttctgagcttagattgcttcatagatttatttaagtactcatcccacctttaaaacctctaaactgagaagaagggacccaaatcatgttattggtgtgatttatgtgagaagtagaactgtagtcattggacccttaggcaaaggaaaatccgtgtctttatatcagaagatcggcaaacgaatgtatattacacagtttaggttatgattccctactttaacctacttactttattaaatgaccaactactgatactgatcacaatagttattagagattctaatttagttggaaggttctaatcactttcattacaggcatttgaaaaatagggattcatttcgaatatattagccaggagcatagttagatgttacccaggccatttatcatcctgttaatgatgattttcccgacccttgtgagatcagcgtgacaggagtgtgtgtgtgtgtgtgtgtttctgtgggtgtgtggttttggttgggtgctgccaggtggcaaaggcatatgtaaatacatctgatctgcatctttatttcacagttaactaaaagtaaaaatgtctattctgattccatattgattttgtctaagatgtaaaaatttgagttcatctttggccaaaacctacctgaattaacatacaaaatatttgatttttaaaatttaattcaaatctcaaaatcaattaagtattctcagatcctatatcttggttaatatgctcccagatactttaaacatggcaaccttttggcctaagagaatgtttgttcatggaaaaaagcttttgagatgagagggtgtcttactttcttgtggcaattgattttctgttttaacaccctttgggtaaaatcttgcaaagagcttttataatttgttttactgaattgtatggagattgtataccaagtaaagctcttttaaattacataaga

SEQ ID NO: 128061 - DNA, 556 bp, Homo sapiens
  Payload ID: 5077
  Gene Symbol: DPY19L3
  Gene Name: dpy-19-like 3 (C. elegans)
  ENST ID: ENST00000592832
  CDS Start-End: 1-404
ttaatacatttggaaggctttcagatactctgcttttttatgcttacatattcgttctgtccatcacagtgattgtagcattcgttgttgcctttcataatctcagtgattctacaaatcaacaatccgtgggtaaaatggaaaaaggcacagttgacctgaaaccagaaactgcctacaacttaatacataccattctgtttggattcttggcattgagtacaatgagaatgaagtacctctggacgtcacacatgtgtgtgttcgcatcattcggcctatgtagccctgaaatatgggagttacttctgaagtcagtccatctttataacccaaagaggatatgtataatgcgatattcagtaccgatattaatactgctgtatctatgctataagctctaacactccaagaaaggctgtgtttgcgggaagcatgcagttgctggccggagtcaagctgtgcacgggaaggaccctaaccaaccacccgcactatgaagacagcagcctgagagagcggaccagagcggtttatcagatatatgccaagaggg

SEQ ID NO: 128062 - DNA, 6197 bp, Homo sapiens
  Payload ID: 5078
  Gene Symbol: DPY19L4
  Gene Name: dpy-19-like 4 (C. elegans)
  Uniprot ID: Q7Z388
  ENST ID: ENST00000414645
  CDS Start-End: 100-2271
aggagcgggcccccggaggccgaggggttcggcgacgcggagggagggagagtctgggccgcgcgggagccgcagggcgccctagccttcgcagaaacgatggcggaggaagaaggaccacctgtagagctgcgccaaagaaaaaagccaaagtcttcagaaaataaggaatctgccaaagaagagaaaatcagtgacattccaattcctgaaagagctccaaaacatgtattatttcaacgctttgcaaagattttcattggctgtcttgcagcggttactagtggtatgatgtatgctctctacttatcagcataccatgaacggaaattctggttttccaacaggcaggagcttgaacgggaaatcacgtttcagggtgacagtgccatttattactcctattataaagatatgttaaaggcaccttcatttgaaagaggtgtttacgaactgacacacaataacaaaactgtatctctgaagactataaatgcagtgcagcaaatgtctctgtatccggaacttattgctagcattttatatcaagccactggtagcaatgagattattgagccagtgtatttctatattggcattgtttttggattgcaaggaatatatgttactgctttatttgttacaagttggcttatgagtggaacatggctagcaggaatgcttactgttgcgtggttcgttattaacagggtagatacaacaagaattgaatactccattcctttaagagaaaactgggcactaccatattttgcatgccaaattgctgcacttacaggctatttaaaaagcaacttaaatacttatggagagaggttttgctacttgttgatgagtgcttcaacttacacatttatgatgatgtgggagtatagccactatctcctgtttcttcaagcaatatctctattcctgctagataccttttcagtggagcaaagtgacaaggtttatgaagtttataaaatctacatattttccctctttctgggatatttactacagtttgagaatccagctttgttggtatctcctttattaagtttagtagcagccttaatgcttgctaagtgccttcagctgaatgtgaagaaaggaagttttgtagctaaaataataaaagtgattaatttttacttggtgtgtactctgacaataacattgaatattataatgaagatgtttgtcccacacaaagaaaatgggcacatgctgaaattccttgaagtaaaatttggactaaatatgaccaagaattttacaatgaattggctcctctgtcaagaatccctgcaggcaccatctcaagatttttttctgcgattgacacagtcttctttattacctttctacattctagtgttaattatttgttttctttctatgttgcaagttatttttaggaggattaatggtaagtccctgaaggaaactgttactcttgaagatggacgaattggagaaagaccagaaataatttatcatgtaattcacactattttattgggttctcttgcaatggttatagaaggcttgaagtacatctggattccttatgtgtgcatgttagcagcatttggtgtatgttctcccgaactttggatgacacttttcaagtggcttcgattaagaactgtacacccaatattgttggctcttattctgagcatggccgtgcctactataataggtctcagcttatggaaagagttttttcccagattaatgacagaattaatggaactacaggaattctatgacccagatacagtggaacttatgacctggataaaaaggcaagctccagttgcagctgtgtttgcagggagtccacagttaatgggtgcgattaaattatgcactggatggatggtgacaagtttgcctctttacaatgatgatgatcttctcaagagaaatgaaaatatctaccaaatctattcaaagcgatctgctgaggatatttataaaatactgacatcttacaaagctaattacctaattgtagaggatgctatctgcaatgaggtgggacccatgagaggctgtagggttaaagatttattagacattgcaaatggccacatggtttgtgaagaaggtgacaagctaacctactcaaaatatgggcgattttgtcatgaggtcaaaattaactattctccatatgtgaattatttcactagagtatactggaacagatcctactttgtatataaaatcaacactgtgatatccttccagtcttgaaaaataacagagccttcatttcaaagactacctgaagtaaaatgcagttttcttctacctactcggtgtcttttgcagatcagagtatggacatttgaaatattgctgcttctttcccccttctgctgttaactggatccagagttctgtgggaaatagaagatcaagcattactgtcctttgattaaatgtgatatctaccactctgcaatattccagacaggtgtcttccttaccgttacatggtctttaacacttttactgattgcaatattttccccataaaatcttcattctattataatattgatcttgaatttgaatatgtgcaaggtcagatacatttctcaaacataacatttaataaataatgtgatataattatttaatagaaagaataattccgaccttcaagcaagtttctgaaggtattttatgatgtataacaactgaagttttacaataaaaactaatttaaatgttagctgaagatatgtggcatttaaattaaaatggaaattatataaaggaaagtgatttttaaggatatacataaagatatatttagaattttcatgatactgttctcctcatctactgcttatgttaagtgagaactttcttagtaatacataatgcatgatgttactgcattttctaaatgactagtaagtgattagttttttcacttatgcctattaatttgataccaatttaatcatgataaaacaataaccgttaacatatattttgttaaatggacatttaaaagaatgttgttcaggttttttttttaaatactgatatggggcatacaatctattcacatgttttctactgaagtactaagtaaaaaaattaaatcattatcagaataaaaatatgtgttctaaaattagcaacaatttctggggatacatgcagatgttgttaaacgtacctctgcatacagatatattataaaacacaagcaatgttatttatgaaactgtgatgcagtcttcaacatcaagaaaaaatgacaactataataaaatttacaacacagtttcacagtctaaatgctatgttcctttaagtattttcatatttttaatcatttattaagagaaaattgtgaaaagttaatttggccttatagagagattcaggatagatgtagcctatagatgtgtcattttaataagttgggatacatgtttagtttttccttatattcctgttcagtgaacagattttcataattctcacttgttaaagtgctgcaaaaattgcattttcagtactctaaattactacattagaagagagcatttctccattgtctttattttctgttatatatgtgttgtaaaagtacactacattagaagggagcttttccgttgtctttattttctgttatacatgtgttgttaaagtacatgcattcttagactaactctcagatgctttgctcttttggagctgaagaattgtttgatggtgatgtcatatatctgatagattagtttcagtggttctcatttcacttttatacgtaatttcttaactatattaagatagttgcaggcagtgtacctcaggttgactctgtacatctgaatagtgagtcactagtattttgcttcaagccttctgaaaatataaccatagttacctaagcacacagtgaatagtcacatggtagtacttgtgattagagcatgtaaaacaatgtaattgaaaagtcagcttccatattttgtaggggaaatagaacaccctactttttatctagtgtgaaatatttaatcgaatttttgttgatttatattatgttacctgtgctgaattaggtttggtacttgtgttttgtttgacatattagtaagttgcttttgcttctttctgtcaacttattttttaaataaaattgatctggaaaaattgttaatgggatgttttaaataatgaatttttcatccagcatcagttgaaaaggaaaagaaagcttcattatggaaatgacaatattgaatatgacagataagtttatttgcttctgttttaactgcagttaatagtactagacaactttaagtggaaagcatttagtttatttcttcacttatttgtagagtgaacaaatgattcacaattctacaagtaattccacttaggtaacttacagttgttaggtttgacaataaagatctactatgagaggagaagaatttatgggttttgggtggaaggaatttctcaaagaaataaaaaatgttctttgcccttgatactgcaaacccactgatacaagtgccttgaatttattattattattattttttatttttttgagatggagtttcactcttgtctcccaggctggagtgcaatggcgcgatcttggctcactgcaacctccgctcgctgcaacctccgcctcccaggttcaagtgattctcctgcctcagcctccggagtagctgggattacaggcacctgccaccaagcacggctaatttttgtatttttagtagaaacggggtttcgccatgttggccaggctggtctcgaactcctgacctcagatgatccactcaccccagcctcccaaagtgctgggattacagacgtgagccactgcgcccggcgcaagtctttgttaaaagtagagatggaggccaggcgcagtggctcactcctgtaatcccagcactttgggaggctgaggcaggcagatcacgaggtcaggagatcgagaccatcttggctaacacggtgaaaccccgtctctactgaaaatacaaaaaattagccgggcagggtggcgggcgcctgtagtcccagctactccgaggctgaagcaggagaatggcgtcaagcggcgaggcggagcttgcggtgagccgagatcatgccgctgcactccagcctgggcaacagagcaagactccatctcaaaaagaaaaaaaaagtagagatgggatctctagcctcctaagttaatttagcctcccaaatgccagacaaagaatctaacataaaatttaccttgaataagatatatgatattgattctgagctgctttgtattttttctgactttggcatctgtatcttggtgctttctgttagactggtagagtttaagaacctaaggagtatgcattgtacttcagtgctaacttttttcttcatttactttctgtgtatataggcagcatattttttttgtagaacattaacccagattgctaatagcttcatgttacggcattcttccacacagtccagattgatttaaggaaaagcagaaatggaagtcaaagtgtgttataaattgagactgaaaaacatgctttaaaaaatagatttaatttcttacactgtgaatagccattgtattgttttgtttctgataaatcagttgttttgggcccctatttttgaactgttaaaaaattttgatgcttttcgtggataaaagtagtgcctctctttatacaactgatggggttttaaaaagtgtaaattgccttttttgttaaacttattttaaatgctttagtatttaaagggtgtatgttattaattaatctgcatatttgtaacgcaaataactacttcctgatttacatctcaatatattcttctttcatttgcccaatttaaaaaatacgtagtctctattgttgctgtttactaatagttttagatcccaatgtgtattagaattatagctacaaaaagttgcaagtaaaatttagcaatttcctattcaaacaggatctcattagtatgttttttaatgtgtagaattaacactttaaaataaacaggtgtgaaaattataaaggaatatatatgacaattattttctgtacattaatgtctaaacattatacttactttttcataataaaggaaattttggaaccaaa

SEQ ID NO: 128063 - DNA, 340 bp, Homo sapiens
  Payload ID: 5078
  Gene Symbol: DPY19L4
  Gene Name: dpy-19-like 4 (C. elegans)
  ENST ID: ENST00000519353
  CDS Start-End: 1-340
gaagagaaaatcagtgacattccaattcctgaaagagctccaaaacgagcttgaacgggaaatcacgtttcagggtgacagtgccatttattactcctattataaagatatgttaaaggcaccttcatttgaaagaggtgtttacgaactgacacacaataacaaaactgtatctctgaagactataaatgcagtgcagcaaatgtctctgtatccggaacttattgctagcattttatatcaagccactggtagcaatgagattattgagccagtgtatttctatattggcattgtttttggattgcaaggaatatatgttactgctttatttgttaca

SEQ ID NO: 128064 - DNA, 680 bp, Homo sapiens
  Payload ID: 5078
  Gene Symbol: DPY19L4
  Gene Name: dpy-19-like 4 (C. elegans)
  ENST ID: ENST00000522422
  CDS Start-End: 297-680
ggcggcggccaggagctacagctgtgggctgcactcccggcgtggagtctccttcctgcccgcgcaggccccggcgccccagcgaaacgctccggccgctcccctctcccaacactctggttcccgggccgcctgcggggacgcggttggcggcgacaccggaggggggtgggtcaggaagtgggggcgcggcggccaggagcgggcccccggaggccgaggggttcggcgacgcggagggagggagagtctgggccgcgcgggagccgcagggcgccctagccttcgcagaaacgatggcggaggaagaaggaccacctgtagagctgcgccaaagaaaaaagccaaagtcttcagaaaataaggaatctgccaaagaagagaaaatcagtgacattccaattcctgaaagagctccaaaacgtgtttacgaactgacacacaataacaaaactgtatctctgaagactataaatgcagtgcagcaaatgtctctgtatccggaacttattgctagcattttatatcaagccactggtagcaatgagattattgagccagtgtatttctatattggcattgtttttggattgcaaggaatatatgttactgctttatttgttacaagttggcttatgagtggaacatggctagcaggaatgcttactgttgcgtggttc

SEQ ID NO: 128065 - DNA, 802 bp, Homo sapiens
  Payload ID: 5078
  Gene Symbol: DPY19L4
  Gene Name: dpy-19-like 4 (C. elegans)
  ENST ID: ENST00000521525
  CDS Start-End: 1-204
gccactggtagcaatgagattattgagccagtgtatttctatattggcattgtttttggattgcaaggaatatatgttactgctttatttgttacaagttggcttatgagtggaacatggctagcaggaatgcttactgttgcgtggttcgttattaacagggcagcatgcaacttggcagctggtctcccttacagtgaatgatccaagagagtatgagagagtgtgccacaatggaagccaggtatctgttataacctcatcttagaaatgatataacatcactctgccatattttgtcagttgcacagacccctggtacagtgtgggaggtgacaacacaggatattaataccaggaggcaggaatcattgggaccgtcttggaggctggctaccacattcaattaactttgctattaatttcatgtaatccctatatctgtcttcatatttgaagaggaaaagatactttctcatgtaaacataatggttttaaagaataagactctcttatgctacttaaacaaaagaataagactctctttagagatcttagtgagaattgtaagaaataaaataaacagaagtctgactgccttatttgatgtcactgatgtatgttgtattgctggagtagaagttaaatagaaaaattgacctggtatattctactcaaatgtatcttttgacaattgaaatgttcttaatagctaagttttaaaaaatgcgtttgtttgctttttgtttatattttattggtatgtatcttgtactgcaaaatacattttaatgccatgaaa

SEQ ID NO: 128066 - DNA, 548 bp, Homo sapiens
  Payload ID: 5078
  Gene Symbol: DPY19L4
  Gene Name: dpy-19-like 4 (C. elegans)
  ENST ID: ENST00000522669
  CDS Start-End: 1-226
ctggattccttatgtgtgcatgttagcagcatttggtgtatgttctcccgaactttggatgacacttttcaagtggcttcgattaagaactgtacacccaatattgttggctcttattctgagcatggccgtgcctactataataggtctcagcttatggaaagagaaggcaagctccagttgcagctgtgtttgcagggagtccacagttaatgggtgcgattaaattatgcactggatggatggtgacaagtttgcctctttacaatgatgatgatcttctcaagagaaatgaaaatatctaccaaatctattcaaagcgatctgctgaggatatttataaaatactgacatcttacaaagctaattacctaattgtagaggatgctatctgcaatgaggtgggacccatgagaggctgtagggttaaagatttattagacattgcaaatggccacatggtttgtgaagaaggtgacaagctaacctactcaaaatatgggcgattttgtcatgaggtcaaaattaactattctccatatgtgaat

SEQ ID NO: 128067 - DNA, 828 bp, Homo sapiens
  Payload ID: 5078
  Gene Symbol: DPY19L4
  Gene Name: dpy-19-like 4 (C. elegans)
  ENST ID: ENST00000523020
  CDS Start-End: 1-828
tattgagccagtgtatttctatattggcattgtttttggattgcaaggaatatatgttactgctttatttgttacaagttggcttatgagtggaacatggctagcaggaatgcttactgttgcgtggttcgttattaacagggtagatacaacaagaattgaatactccattcctttaagagaaaactgggcactaccatattttgcatgccaaattgctgcacttacaggctatttaaaaagcaacttaaatacttatggagagaggttttgctacttgttgatgagtgcttcaacttacacatttatgatgatgtgggagtatagccactatctcctgtttcttcaagcaatatctctattcctgctagataccttttcagtggagcaaagtgacaagctgaatgtgaagaaaggaagttttgtagctaaaataataaaagtgattaatttttacttggtgtgtactctgacaataacattgaatattataatgaagatgtttgtcccacacaaagaaaatgggcacatgctgaaattccttgaagtaaaatttggactaaatatgaccaagaattttacaatgaattggctcctctgtcaagaatccctgcaggcaccatctcaagatttttttctgcgattgacacagtcttctttattacctttctacattctagtgttaattatttgttttctttctatgttgcaagttatttttaggaggattaatggtaagtccctgaaggaaactgttactcttgaagatggacgaattggagaaagaccagaaataatttatcatgtaattcacactattttattggg

SEQ ID NO: 128068 - DNA, 581 bp, Homo sapiens
  Payload ID: 5078
  Gene Symbol: DPY19L4
  Gene Name: dpy-19-like 4 (C. elegans)
  ENST ID: ENST00000520774
  CDS Start-End: 125-259
gtcaggaagtgggggcgcggcggccaggagcgggcccccggaggccgaggggttcggcgacgcggagggagggagagtctgggccgcgcgggagccgcagggcgccctagccttcgcagaaacgatggcggaggaagaaggaccacctgtagagctgcgccaaagaaaaaagccaaagtcttcagaaaataaggaatctgccaaagaagagaaaatcagtgacattccaattcctgaaagagctccaaaacgagcttgaacgggaaatcacgtttcagggtgacagtgccatttattactcctattataaagatatgttaaaggcaccttcatttgaaagaggtgtttacgaactgacacacaataacaaaactgtatctctgaagactataaatgcagtgcagcaaatgtctctgtatccggaacttattgctagcattttatatcaagccactggtagcaatgagattattgagccagtgtatttctatattggcattgtttttggattgcaaggaatatatgttactgctttatttgttacaagttggcttatgagtggaacatggctagcaggaatg

SEQ ID NO: 128069 - DNA, 1124 bp, Homo sapiens
  Payload ID: 5078
  Gene Symbol: DPY19L4
  Gene Name: dpy-19-like 4 (C. elegans)
  ENST ID: ENST00000519176
  CDS Start-End: 1-573
aaaatcagtgacattccaattcctgaaagagctccaaaacatgtattatttcaacgctttgcaaagattttcattggctgtcttgcagcggttactagtggtatgatgtatgctctctacttatcagcataccatgaacggaaattctggttttccaacaggcaggagcttgaacgggaaatcacgtttcagggtgacagtgccatttattactcctattataaagatatgttaaaggcaccttcatttgaaagaggtgtttacgaactgacacacaataacaaaactgtatctctgaagactataaatgcagtgcagcaaatgtctctgtatccggaacttattgctagcattttatatcaagccactggtagcaatgagattattgagccagtgtatttctatattggcattgtttttggattgcaaggaatatatgttactgctttatttgttacaagttggcttatgagtggaacatggctagcaggaatgcttactgttgcgtggttcgttattaacagttgcacagacccctggtacagtgtgggaggtgacaacacaggatattaataccaggaggcaggaatcattgggaccgtcttggaggctggctaccacattcaattaactttgctattaatttcatgtaatccctatatctgtcttcatatttgaagaggaaaagatactttctcatgtaaacataatggttttaaagaataagactctcttatgctacttaaacaaaagaataagactctctttagagatcttagtgagaattgtaagaaataaaataaacagaagtctgactgccttatttgatgtcactgatgtatgttgtattgctggagtagaagttaaatagaaaaattgacctggtatattctactcaaatgtatcttttgacaattgaaatgttcttaatagctaagttttaaaaaatgcgtttgtttgctttttgtttatattttattggtatgtatcttgtactgcaaaatacattttaatgccatgaaagaatatgctgtctctttattcatcagctttatagcttttatttatatatgacttcttagaaaagtataaaaagatattaaagtcattccattatattatga

SEQ ID NO: 128070 - DNA, 612 bp, Homo sapiens
  Payload ID: 5079
  Gene Symbol: DYDC1
  Gene Name: DPY30 domain containing 1
  Uniprot ID: Q8WWB3
  ENST ID: ENST00000372202
  CDS Start-End: 52-585
cgggacgccgctcctgggtggcgagcaggcgcgtgtgtaggggagttagaaatggagtcaatatatcttcaaaagcaccttggggcctgtttaactcaaggtcttgcagaagtggcaagagttcgcccagtggatccgatagaatatttagcattgtggatttacaagtataaggaaaatgtgaccatggaacaactgagacaaaaggaaatggccaagctggagcgtgaaagagaattagctctgatggagcaggaaatgatggagaggctcaaagcagaggagctcttacttcagcagcaacagctggcattgcagctagagttggaaatgcaagaaaaggagaggcagagaatacaagaactacagagagctcaagaacaattaggcaaggagatgagaatgaatatggaaaatctagttaggaatgaagatattctacattcagaggaagcaacactagactcaggcaaaacactagctgaaatcagcgatcgttatggagcacctaacttgagcagagtggaagaacttgatgaaccaatgttttctgatattgcattaaacattgatcaagatttgtaggaccaaccaacctaagagcaataaatg

SEQ ID NO: 128071 - DNA, 750 bp, Homo sapiens
  Payload ID: 5079
  Gene Symbol: DYDC1
  Gene Name: DPY30 domain containing 1
  Uniprot ID: Q8WWB3
  ENST ID: ENST00000372204
  CDS Start-End: 166-699
gctcctgggtggcgagcaggcgcgtgtgtagggacgaagtttcactcttgttgcccaggctggagtgcaatggcacaatctcagctcactgcaacctctgcctcccgggttcaagtgattctcctgcctcagccttccaagtagctgggattacaggagttagaaatggagtcaatatatcttcaaaagcaccttggggcctgtttaactcaaggtcttgcagaagtggcaagagttcgcccagtggatccgatagaatatttagcattgtggatttacaagtataaggaaaatgtgaccatggaacaactgagacaaaaggaaatggccaagctggagcgtgaaagagaattagctctgatggagcaggaaatgatggagaggctcaaagcagaggagctcttacttcagcagcaacagctggcattgcagctagagttggaaatgcaagaaaaggagaggcagagaatacaagaactacagagagctcaagaacaattaggcaaggagatgagaatgaatatggaaaatctagttaggaatgaagatattctacattcagaggaagcaacactagactcaggcaaaacactagctgaaatcagcgatcgttatggagcacctaacttgagcagagtggaagaacttgatgaaccaatgttttctgatattgcattaaacattgatcaagatttgtaggaccaaccaacctaagagcaataaatgtttttgtttgtttcaaatttcaaa

SEQ ID NO: 128072 - DNA, 750 bp, Homo sapiens
  Payload ID: 5079
  Gene Symbol: DYDC1
  Gene Name: DPY30 domain containing 1
  ENST ID: ENST00000453477
  CDS Start-End: 511-750
aacgggacgccgctcctgggtggcgagcaggcgcgtgtgtaggggtgagcgcaccggaaaggcccgaactgtttttgggatttgttcccctagcttcgctgggtccggcgggcagaggcggttctgaccgttgggccttgggcgtcgagcaggactcacctgaggcggagagaggccgcttcgcgcctggggctcccgaaagcggccagctgtcctcctgctccccctgagcggggagcgctgcgtctcctgcgggctgcgggagacccttccagactcccgggtgggaaaaccacactgagcgccccgggaggttgccagatacaatactgtatctggcacccctgcccgggtgcccccgcccagttggctggctggctggctagctgtctcccaggtgtgggctggagtgcaatggcacaatctcagctcactgcaacctctgcctcccgggttcaagtgattctcctgcctcagccttccaagtagctgggattacaggagttagaaatggagtcaatatatcttcaaaagcaccttggggcctgtttaactcaaggtcttgcagaagtggcaagagttcgcccagtggatccgatagaatatttagcattgtggatttacaagtataaggaaaatgtgaccatggaacaactgagacaaaaggaaatggccaagctggagcgtgaaagagaattagctctgatggagcaggaaatgatggagaggctcaaagcagaggagctctta

SEQ ID NO: 128073 - DNA, 708 bp, Homo sapiens
  Payload ID: 5079
  Gene Symbol: DYDC1
  Gene Name: DPY30 domain containing 1
  Uniprot ID: Q8WWB3
  ENST ID: ENST00000421924
  CDS Start-End: 127-660
ggtgtccatgactgagggcagggtgtatgtaaggctttgttcacctcactggactttagttttatagtgactttattgaaaatatcctgcagtaatgcaaaaacacttactttttaggagttagaaatggagtcaatatatcttcaaaagcaccttggggcctgtttaactcaaggtcttgcagaagtggcaagagttcgcccagtggatccgatagaatatttagcattgtggatttacaagtataaggaaaatgtgaccatggaacaactgagacaaaaggaaatggccaagctggagcgtgaaagagaattagctctgatggagcaggaaatgatggagaggctcaaagcagaggagctcttacttcagcagcaacagctggcattgcagctagagttggaaatgcaagaaaaggagaggcagagaatacaagaactacagagagctcaagaacaattaggcaaggagatgagaatgaatatggaaaatctagttaggaatgaagatattctacattcagaggaagcaacactagactcaggcaaaacactagctgaaatcagcgatcgttatggagcacctaacttgagcagagtggaagaacttgatgaaccaatgttttctgatattgcattaaacattgatcaagatttgtaggaccaaccaacctaagagcaataaatgtttttgtttgtttcaaatttc

SEQ ID NO: 128074 - DNA, 829 bp, Homo sapiens
  Payload ID: 5079
  Gene Symbol: DYDC1
  Gene Name: DPY30 domain containing 1
  ENST ID: ENST00000454362
  CDS Start-End: 372-829
ggggtgagcgcaccggaaaggcccgaactgtttttgggatttgttcccctagcttcgctgggtccggcgggcagaggcggttctgaccgttgggccttgggcgtcgagcaggactcacctgaggcggagagaggccgcttcgcgcctggggctcccgaaagcggccagctgtcctcctgctccccctgagcggggagcgctgcgtctcctgcgggctgcgggagacccttccagactcccgggtgggaaaaccacactgagcgccccgggaggttgccagatacaatactgtatctggcacccctgcccgggtgcccccgcccagttggctggctggctggctagctgtctcccaggtgtgggagttagaaatggagtcaatatatcttcaaaagcaccttggggcctgtttaactcaaggtcttgcagaagtggcaagagttcgcccagtggatccgatagaatatttagcattgtggatttacaagtataaggaaaatgtgaccatggaacaactgagacaaaaggaaatggccaagctggagcgtgaaagagaattagctctgatggagcaggaaatgatggagaggctcaaagcagaggagctcttacttcagcagcaacagctggcattgcagctagagttggaaatgcaagaaaaggagaggcagagaatacaagaactacagagagctcaagaacaattaggcaaggagatgagaatgaatatggaaaatctagttaggaatgaagatattctacattcagaggaagcaacactagactcaggcaaaacactagctgaaatcagcgatcgttatggagcacc

SEQ ID NO: 128075 - DNA, 1842 bp, Homo sapiens
  Payload ID: 5080
  Gene Symbol: DYDC2
  Gene Name: DPY30 domain containing 2
  Uniprot ID: Q96IM9
  ENST ID: ENST00000256039
  CDS Start-End: 187-720
aaagcggaaggggcgcgcggatagagctcccagtgtgccaagcgtgggcggtatacagtaaacaaagacaacccctattcttatcaccttgcctactgagtgcaagtccaggaactgtgtaagcagaccctcagaggagctctgggaaacactgaaaaatagcctctccccccattggctgccaggatggaaactaactacctgaagaggtgctttggaaattgcctggcccaggcactggcagaggtggcgaaggttcggcccagtgacccaatagaatacctggctcactggctttatcattacaggaaaacagcaaaagcaaaagaagagaatagggaaaagaagatccacctgcaggaggaatatgacagtagcctcaaggaaatggaaatgacagaaatgctgaaacaggaagagtatcagattcaacagaactgtgaaaagtgtcacaaggaactgacttctgaaactgtttccacgaagaagaccatattcatgcaggaggacacaaacccccttgagaaggaggccttgaagcaggaattcctgccaggtacttccagtctgattccaggaatgcctcaacaggttcctccttcagagtctgctggccagattgaccagaacttcaaaatgccacaagaaataaattacaaggaggcttttcagcatgaagttgctcatgaaatgcctcctggctccaaatctcctttttaggttacagaaggtagatgcttctgatttacttctctcaaagctagaagccaagaaaatggccagctagaaccaagatttaaggggctgtaaaaggcaagttcagggactctccagcctactccttttctgaaaaacccttaatcatgtgaacatttgaactagttataggataaaataaactcagaataaggatttaaaataagtaaccaagtggctgtgactttttcctcttgttttatcaacgttttggagactacacaatgaaaacacatctgttggggtgatcagacccaacacccggccatgggggctacaaagtccagccgagtcaaaggaaagagaaaagacaagtcaagagagaaagtgggaccagggggccaatgctagtatggaggctgtgaagtccccaagctctggaagcccacactatttgttggtgatcaaacaaagaaacaggtgatgaggatgtgggagttgaaagaaagtggtgtatcaagcgaatgaactacagctgtgagggtttagcattttctttgaaacatatggctacttgagataatgggagtgctagaagcaaggagccagcaagtctggacacattacaaaggccacaaggggttttatcctggaccccggacatgttccaagccctgcctcaacttttctcccaacactaagctttcctcccaacacacatccatctcgtgtgttcatgtcttaacttttgcttcacttcacagtcaggcctctccgagtattttttacacatatcctggagtctacctatgtcactgatagcagatatttttcttcaacatatattatcaatgttttaatacttttcttcaattttagtaactggtaaaatacatgtaagatgtaccatcttaaccatttttaagtgtacagatcagttgtattaagtagattcatattcttgtgcaaccatcatcaccatccggctgcaaaactctttcatcttgcaaaactgaaactctacacccattaaaaaataactcgccatttctctctctccccagcccctggcaaccaccattctttctgtctctgtgatttagattactctgtaagtatgttgtataaatagactcatacaatgtt

SEQ ID NO: 128076 - DNA, 2022 bp, Homo sapiens
  Payload ID: 5080
  Gene Symbol: DYDC2
  Gene Name: DPY30 domain containing 2
  Uniprot ID: Q96IM9
  ENST ID: ENST00000372197
  CDS Start-End: 367-900
aagaagtgcctttcgcctcccaccatgattctgagacctccccagcaatgtggaactaaacagctgcctccagcgtgaagaaggtgccacagagatggaaggagattccttacccacacctgggagacagctagccagccagccagccaactgggcgggggcacccgggcaggggtgccagatacagtattgtatctggcaacctcccggggcgctcagtgtggttttcccacccgggagtctggaagggtctcccgcagcccgcaggagacgcagcgctccccgctcagggggagcaggaggacagctggccgctttcgggagccccaggcgcgaagcggcctctctccgcctcaggctgccaggatggaaactaactacctgaagaggtgctttggaaattgcctggcccaggcactggcagaggtggcgaaggttcggcccagtgacccaatagaatacctggctcactggctttatcattacaggaaaacagcaaaagcaaaagaagagaatagggaaaagaagatccacctgcaggaggaatatgacagtagcctcaaggaaatggaaatgacagaaatgctgaaacaggaagagtatcagattcaacagaactgtgaaaagtgtcacaaggaactgacttctgaaactgtttccacgaagaagaccatattcatgcaggaggacacaaacccccttgagaaggaggccttgaagcaggaattcctgccaggtacttccagtctgattccaggaatgcctcaacaggttcctccttcagagtctgctggccagattgaccagaacttcaaaatgccacaagaaataaattacaaggaggcttttcagcatgaagttgctcatgaaatgcctcctggctccaaatctcctttttaggttacagaaggtagatgcttctgatttacttctctcaaagctagaagccaagaaaatggccagctagaaccaagatttaaggggctgtaaaaggcaagttcagggactctccagcctactccttttctgaaaaacccttaatcatgtgaacatttgaactagttataggataaaataaactcagaataaggatttaaaataagtaaccaagtggctgtgactttttcctcttgttttatcaacgttttggagactacacaatgaaaacacatctgttggggtgatcagacccaacacccggccatgggggctacaaagtccagccgagtcaaaggaaagagaaaagacaagtcaagagagaaagtgggaccagggggccaatgctagtatggaggctgtgaagtccccaagctctggaagcccacactatttgttggtgatcaaacaaagaaacaggtgatgaggatgtgggagttgaaagaaagtggtgtatcaagcgaatgaactacagctgtgagggtttagcattttctttgaaacatatggctacttgagataatgggagtgctagaagcaaggagccagcaagtctggacacattacaaaggccacaaggggttttatcctggaccccggacatgttccaagccctgcctcaacttttctcccaacactaagctttcctcccaacacacatccatctcgtgtgttcatgtcttaacttttgcttcacttcacagtcaggcctctccgagtattttttacacatatcctggagtctacctatgtcactgatagcagatatttttcttcaacatatattatcaatgttttaatacttttcttcaattttagtaactggtaaaatacatgtaagatgtaccatcttaaccatttttaagtgtacagatcagttgtattaagtagattcatattcttgtgcaaccatcatcaccatccggctgcaaaactctttcatcttgcaaaactgaaactctacacccattaaaaaataactcgccatttctctctctccccagcccctggcaaccaccattctttctgtctctgtgatttagattactctgtaagtatgttgtataaatagactcatacaatgtt

SEQ ID NO: 128077 - DNA, 1736 bp, Homo sapiens
  Payload ID: 5080
  Gene Symbol: DYDC2
  Gene Name: DPY30 domain containing 2
  ENST ID: ENST00000372198
  CDS Start-End: 39-614
tgctgccaccatgtaagaagtgcctttcgcctcccaccatgattctgagacctccccagcaatgtggaactgctgccaggatggaaactaactacctgaagaggtgctttggaaattgcctggcccaggcactggcagaggtggcgaaggttcggcccagtgacccaatagaatacctggctcactggctttatcattacaggaaaacagcaaaagcaaaagaagagaatagggaaaagaagatccacctgcaggaggaatatgacagtagcctcaaggaaatggaaatgacagaaatgctgaaacaggaagagtatcagattcaacagaactgtgaaaagtgtcacaaggaactgacttctgaaactgtttccacgaagaagaccatattcatgcaggaggacacaaacccccttgagaaggaggccttgaagcaggaattcctgccaggtacttccagtctgattccaggaatgcctcaacaggttcctccttcagagtctgctggccagattgaccagaacttcaaaatgccacaagaaataaattacaaggaggcttttcagcatgaagttgctcatgaaatgcctcctggctccaaatctcctttttaggttacagaaggtagatgcttctgatttacttctctcaaagctagaagccaagaaaatggccagctagaaccaagatttaaggggctgtaaaaggcaagttcagggactctccagcctactccttttctgaaaaacccttaatcatgtgaacatttgaactagttataggataaaataaactcagaataaggatttaaaataagtaaccaagtggctgtgactttttcctcttgttttatcaacgttttggagactacacaatgaaaacacatctgttggggtgatcagacccaacacccggccatgggggctacaaagtccagccgagtcaaaggaaagagaaaagacaagtcaagagagaaagtgggaccagggggccaatgctagtatggaggctgtgaagtccccaagctctggaagcccacactatttgttggtgatcaaacaaagaaacaggtgatgaggatgtgggagttgaaagaaagtggtgtatcaagcgaatgaactacagctgtgagggtttagcattttctttgaaacatatggctacttgagataatgggagtgctagaagcaaggagccagcaagtctggacacattacaaaggccacaaggggttttatcctggaccccggacatgttccaagccctgcctcaacttttctcccaacactaagctttcctcccaacacacatccatctcgtgtgttcatgtcttaacttttgcttcacttcacagtcaggcctctccgagtattttttacacatatcctggagtctacctatgtcactgatagcagatatttttcttcaacatatattatcaatgttttaatacttttcttcaattttagtaactggtaaaatacatgtaagatgtaccatcttaaccatttttaagtgtacagatcagttgtattaagtagattcatattcttgtgcaaccatcatcaccatccggctgcaaaactctttcatcttgcaaaactgaaactctacacccattaaaaaataactcgccatttctctctctccccagcccctggcaaccaccattctttctgtctctgtgatttagattactctgtaagtatgttgtataaatagactcatacaatgtt

SEQ ID NO: 128078 - DNA, 2254 bp, Homo sapiens
  Payload ID: 5080
  Gene Symbol: DYDC2
  Gene Name: DPY30 domain containing 2
  Uniprot ID: Q96IM9
  ENST ID: ENST00000372199
  CDS Start-End: 599-1132
tgctgccaccatgtaagaagtgcctttcgcctcccaccatgattctgagacctccccagcaatgtggaactaaggagattcctacttaccagttgttccatggtcacattttccttatacttgtaaatccacaatgctaaatattctatcggatccactgggcgaactcttgccacttctgcaagaccttgagttaaacaggccccaaggtgcttttgaagatatattgactccatttctaactcctaaaaagcatcttggctcaacataagaaagccctttcccacagaaacagctgcctccagcgtgaagaaggtgccacagagatggaaggagattccttacccacacctgggagacagctagccagccagccagccaactgggcgggggcacccgggcaggggtgccagatacagtattgtatctggcaacctcccggggcgctcagtgtggttttcccacccgggagtctggaagggtctcccgcagcccgcaggagacgcagcgctccccgctcagggggagcaggaggacagctggccgctttcgggagccccaggcgcgaagcggcctctctccgcctcaggctgccaggatggaaactaactacctgaagaggtgctttggaaattgcctggcccaggcactggcagaggtggcgaaggttcggcccagtgacccaatagaatacctggctcactggctttatcattacaggaaaacagcaaaagcaaaagaagagaatagggaaaagaagatccacctgcaggaggaatatgacagtagcctcaaggaaatggaaatgacagaaatgctgaaacaggaagagtatcagattcaacagaactgtgaaaagtgtcacaaggaactgacttctgaaactgtttccacgaagaagaccatattcatgcaggaggacacaaacccccttgagaaggaggccttgaagcaggaattcctgccaggtacttccagtctgattccaggaatgcctcaacaggttcctccttcagagtctgctggccagattgaccagaacttcaaaatgccacaagaaataaattacaaggaggcttttcagcatgaagttgctcatgaaatgcctcctggctccaaatctcctttttaggttacagaaggtagatgcttctgatttacttctctcaaagctagaagccaagaaaatggccagctagaaccaagatttaaggggctgtaaaaggcaagttcagggactctccagcctactccttttctgaaaaacccttaatcatgtgaacatttgaactagttataggataaaataaactcagaataaggatttaaaataagtaaccaagtggctgtgactttttcctcttgttttatcaacgttttggagactacacaatgaaaacacatctgttggggtgatcagacccaacacccggccatgggggctacaaagtccagccgagtcaaaggaaagagaaaagacaagtcaagagagaaagtgggaccagggggccaatgctagtatggaggctgtgaagtccccaagctctggaagcccacactatttgttggtgatcaaacaaagaaacaggtgatgaggatgtgggagttgaaagaaagtggtgtatcaagcgaatgaactacagctgtgagggtttagcattttctttgaaacatatggctacttgagataatgggagtgctagaagcaaggagccagcaagtctggacacattacaaaggccacaaggggttttatcctggaccccggacatgttccaagccctgcctcaacttttctcccaacactaagctttcctcccaacacacatccatctcgtgtgttcatgtcttaacttttgcttcacttcacagtcaggcctctccgagtattttttacacatatcctggagtctacctatgtcactgatagcagatatttttcttcaacatatattatcaatgttttaatacttttcttcaattttagtaactggtaaaatacatgtaagatgtaccatcttaaccatttttaagtgtacagatcagttgtattaagtagattcatattcttgtgcaaccatcatcaccatccggctgcaaaactctttcatcttgcaaaactgaaactctacacccattaaaaaataactcgccatttctctctctccccagcccctggcaaccaccattctttctgtctctgtgatttagattactctgtaagtatgttgtataaatagactcatacaatgtt

SEQ ID NO: 128079 - DNA, 439 bp, Homo sapiens
  Payload ID: 5080
  Gene Symbol: DYDC2
  Gene Name: DPY30 domain containing 2
  ENST ID: ENST00000411538
  CDS Start-End: 63-439
cgcgcctcaggagccagtgtaggcgccgcaaagcggaaggggcgcgcggataggctgccaggatggaaactaactacctgaagaggtgctttggaaattgcctggcccaggcactggcagaggtggcgaaggttcggcccagtgacccaatagaatacctggctcactggctttatcattacaggaaaacagcaaaagcaaaagaagagaatagggaaaagaagatccacctgcaggaggaatatgacagtagcctcaaggaaatggaaatgacagaaatgctgaaacaggaagagtatcagattcaacagaactgtgaaaagtgtcacaaggaactgacttctgaaactgtttccacgaagaagaccatattcatgcaggaggacacaaacccccttgagaaggaggccttgaagcaggaattcctgccaggtacttc

SEQ ID NO: 128080 - DNA, 1173 bp, Homo sapiens
  Payload ID: 5080
  Gene Symbol: DYDC2
  Gene Name: DPY30 domain containing 2
  Uniprot ID: Q96IM9
  ENST ID: ENST00000444807
  CDS Start-End: 310-843
aaacagctgcctccagcgtgaagaaggtgccacagagatggaaggagattccttacccacacctgggagacagctagccagccagccagccaactgggcgggggcacccgggcaggggtgccagatacagtattgtatctggcaacctcccggggcgctcagtgtggttttcccacccgggagtctggaagggtctcccgcagcccgcaggagacgcagcgctccccgctcagggggagcaggaggacagctggccgctttcgggagccccaggcgcgaagcggcctctctccgcctcaggctgccaggatggaaactaactacctgaagaggtgctttggaaattgcctggcccaggcactggcagaggtggcgaaggttcggcccagtgacccaatagaatacctggctcactggctttatcattacaggaaaacagcaaaagcaaaagaagagaatagggaaaagaagatccacctgcaggaggaatatgacagtagcctcaaggaaatggaaatgacagaaatgctgaaacaggaagagtatcagattcaacagaactgtgaaaagtgtcacaaggaactgacttctgaaactgtttccacgaagaagaccatattcatgcaggaggacacaaacccccttgagaaggaggccttgaagcaggaattcctgccaggtacttccagtctgattccaggaatgcctcaacaggttcctccttcagagtctgctggccagattgaccagaacttcaaaatgccacaagaaataaattacaaggaggcttttcagcatgaagttgctcatgaaatgcctcctggctccaaatctcctttttaggttacagaaggtagatgcttctgatttacttctctcaaagctagaagccaagaaaatggccagctagaaccaagatttaaggggctgtaaaaggcaagttcagggactctccagcctactccttttctgaaaaacccttaatcatgtgaacatttgaactagttataggataaaataaactcagaataaggatttaaaataagtaaccaagtggctgtgactttttcctcttgttttatcaacgttttggagactacacaatgaaaacacatctgttggggtgatcagacccaacacccggccatgggggctacaaagtccagccgagtc

SEQ ID NO: 128081 - DNA, 1723 bp, Homo sapiens
  Payload ID: 5080
  Gene Symbol: DYDC2
  Gene Name: DPY30 domain containing 2
  Uniprot ID: Q96IM9
  ENST ID: ENST00000616870
  CDS Start-End: 68-601
gagctcgcgcctcaggagccagtgtaggcgccgcaaagcggaaggggcgcgcggataggctgccaggatggaaactaactacctgaagaggtgctttggaaattgcctggcccaggcactggcagaggtggcgaaggttcggcccagtgacccaatagaatacctggctcactggctttatcattacaggaaaacagcaaaagcaaaagaagagaatagggaaaagaagatccacctgcaggaggaatatgacagtagcctcaaggaaatggaaatgacagaaatgctgaaacaggaagagtatcagattcaacagaactgtgaaaagtgtcacaaggaactgacttctgaaactgtttccacgaagaagaccatattcatgcaggaggacacaaacccccttgagaaggaggccttgaagcaggaattcctgccaggtacttccagtctgattccaggaatgcctcaacaggttcctccttcagagtctgctggccagattgaccagaacttcaaaatgccacaagaaataaattacaaggaggcttttcagcatgaagttgctcatgaaatgcctcctggctccaaatctcctttttaggttacagaaggtagatgcttctgatttacttctctcaaagctagaagccaagaaaatggccagctagaaccaagatttaaggggctgtaaaaggcaagttcagggactctccagcctactccttttctgaaaaacccttaatcatgtgaacatttgaactagttataggataaaataaactcagaataaggatttaaaataagtaaccaagtggctgtgactttttcctcttgttttatcaacgttttggagactacacaatgaaaacacatctgttggggtgatcagacccaacacccggccatgggggctacaaagtccagccgagtcaaaggaaagagaaaagacaagtcaagagagaaagtgggaccagggggccaatgctagtatggaggctgtgaagtccccaagctctggaagcccacactatttgttggtgatcaaacaaagaaacaggtgatgaggatgtgggagttgaaagaaagtggtgtatcaagcgaatgaactacagctgtgagggtttagcattttctttgaaacatatggctacttgagataatgggagtgctagaagcaaggagccagcaagtctggacacattacaaaggccacaaggggttttatcctggaccccggacatgttccaagccctgcctcaacttttctcccaacactaagctttcctcccaacacacatccatctcgtgtgttcatgtcttaacttttgcttcacttcacagtcaggcctctccgagtattttttacacatatcctggagtctacctatgtcactgatagcagatatttttcttcaacatatattatcaatgttttaatacttttcttcaattttagtaactggtaaaatacatgtaagatgtaccatcttaaccatttttaagtgtacagatcagttgtattaagtagattcatattcttgtgcaaccatcatcaccatccggctgcaaaactctttcatcttgcaaaactgaaactctacacccattaaaaaataactcgccatttctctctctccccagcccctggcaaccaccattctttctgtctctgtgatttagattactctgtaagtatgttgtataaatagactcatacaatgtt

SEQ ID NO: 128082 - DNA, 631 bp, Homo sapiens
  Payload ID: 5081
  Gene Symbol: DPY30
  Gene Name: dpy-30 histone methyltransferase complex regulatory subunit
  Uniprot ID: Q9C005
  ENST ID: ENST00000295066
  CDS Start-End: 250-549
acggccggagctgtttgtgctgggagctggtggcgcggtgcagggctcttaagaacgaacggcttgggcgcgggtaatcagctccctttcccccactttctcacttattctaggtacttgggactgtcgtagagtttccagaccccatgtaggcgcccagtcgtggactgtcccactctgctgctctactgctcgtggtgctcccgcgcccagactggtatccggggactgtgacttgcagggtccgccatggagccagagcagatgctggagggacaaacgcaggttgcagaaaatcctcactctgagtacggtctcacagacaacgttgagagaatagtagaaaatgagaagattaatgcagaaaagtcatcaaagcagaaggtagatctccagtctttgccaactcgtgcctacctggatcagacagttgtgcctatcttattacagggacttgctgtgcttgcaaaggaaagaccaccaaatcccattgaatttctagcatcttatcttttaaaaaacaaggcacagtttgaagatcgaaactgacttaatgggaagaacagaaaaatttagttgctactgtagatttacatgattaagaggcagctttaattgccatgatcattcc

SEQ ID NO: 128083 - DNA, 708 bp, Homo sapiens
  Payload ID: 5081
  Gene Symbol: DPY30
  Gene Name: dpy-30 histone methyltransferase complex regulatory subunit
  Uniprot ID: Q9C005
  ENST ID: ENST00000342166
  CDS Start-End: 117-416
gtcacttacggccggagctgtttgtgctgggagctggtggcgcggtgcagggctcttaagaacgaacggcttgggcgcggactggtatccggggactgtgacttgcagggtccgccatggagccagagcagatgctggagggacaaacgcaggttgcagaaaatcctcactctgagtacggtctcacagacaacgttgagagaatagtagaaaatgagaagattaatgcagaaaagtcatcaaagcagaaggtagatctccagtctttgccaactcgtgcctacctggatcagacagttgtgcctatcttattacagggacttgctgtgcttgcaaaggaaagaccaccaaatcccattgaatttctagcatcttatcttttaaaaaacaaggcacagtttgaagatcgaaactgacttaatgggaagaacagaaaaatttagttgctactgtagatttacatgattaagaggcagctttaattgccatgatcattccctctttttggatgtataagaaccttccggacaacagaacctatttctggaattgcagaagataacatatttcccttattttgatttaatcaccataaaccatacctatttaatgagtgtattctgtgcaatttttttctcagattgtctttaactttgtttttaaaatgaccttcaaaataaactgtcaaaacaccattattttaaagta

SEQ ID NO: 128084 - DNA, 989 bp, Homo sapiens
  Payload ID: 5082
  Gene Symbol: DRAP1
  Gene Name: DR1-associated protein 1 (negative cofactor 2 alpha)
  Uniprot ID: Q14919
  ENST ID: ENST00000312515
  CDS Start-End: 246-863
gggcgggagcggcggtccagactggggagggacgcgcaccggccaggaggcttcaagaggagggcactagggccctgcgagcggcgtcttaaccggcggcgctaggactccgcgggaaacggcgggggcggagcgggcggcaccaggacccaggggaaccgcgacgggcgggcggcgagcaggcccgggagccgggaggctgcgggcggcggcgctggacccgacgcggcgagagaggccccgagatgccgagcaagaagaagaagtacaacgcgcggttcccgccggcgcggatcaagaagatcatgcagacggacgaagagattgggaaggtggcggcggcggtgcctgtcatcatctcccgggcgctcgagctcttcctagagtcgctgttgaagaaggcctgccaggtgacccagtcgcggaacgcgaagaccatgaccacatcccacctgaagcagtgcatcgagctggagcagcagtttgacttcttgaaggacctggtggcatctgttcccgacatgcagggggacggggaagacaaccacatggatggggacaagggcgcccgcaggggccggaagccaggcagcggcggccggaagaacggtgggatgggaacgaaaagcaaggacaagaagctgtccgggacagactcggagcaggaggatgaatctgaggacacagatactgatggggaagaggagacatcacaacccccaccccaggccagccacccctctgcccactttcagagccccccgacacccttcctgcccttcgcctctactctgcctttgcccccagcgcccccgggcccctcagcacctgatgaagaggacgaagaagattacgactcctagcgccttctgccccccagaccatagccccttttagttggttttagttgctctggggggaggagagaaggtagagctgttcttaaatttattaaaaaaaaaaataaaagggaatctcagtgtctgttc

SEQ ID NO: 128085 - DNA, 819 bp, Homo sapiens
  Payload ID: 5082
  Gene Symbol: DRAP1
  Gene Name: DR1-associated protein 1 (negative cofactor 2 alpha)
  ENST ID: ENST00000376991
  CDS Start-End: 168-806
gagcggcgtcttaaccggcggcgctaggactccgcgggaaacggcgggggcggagcgggcggcaccaggacccaggggaaccgcgacgggcgggcggcgagcaggcccgggagccgggaggctgcgggcggcggcgctggacccgacgcggcgagagaggccccgagatgccgagcaagaagaagaagtacaacgcgcggttcccgccggcgcggatcaagaagatcatgcagacggacgaagagattgggaaggtggcggcggcggtgcctgtcatcatctcccgggcgctcgagctcttcctagagtcgctgttgaagaaggcctgccaggtgacccagtcgcggaacgcgaagaccatgaccacatcccacctgaagcagtgcatcgagctggagcagcagtttgacttcttgaaggacctggtggcatctgttcccgacatgcagggggacggggaagacaaccacatggatggggacaagggcgcccgcagatggactgtaccttcccaaaggggccggaagccaggcagcggcggccggaagaacggtgggatgggaacgaaaagcaaggacaagaagctgtccgggacagactcggagcaggaggatgaatctgaggacacagatactgatggggaagaggagacatcacaacccccaccccaggccagccacccctctgcccactttcagagccccccgacacccttcctgcccttcgcctctactctgcctttgcccccagcgcccccgggcccctcagcacctgatgaagaggacgaagaagattacgactcctagcgccttctgcccc

SEQ ID NO: 128086 - DNA, 751 bp, Homo sapiens
  Payload ID: 5082
  Gene Symbol: DRAP1
  Gene Name: DR1-associated protein 1 (negative cofactor 2 alpha)
  ENST ID: ENST00000532933
  CDS Start-End: 75-632
gcacccccttaggggacggtggcgacggggtctgaactctgctcccccacccgcaggcgcggatcaagaagatcatgcagacggacgaagagattgggaaggtggcggcggcggtgcctgtcatcatctcccgggcgctcgagctcttcctagagtcgctgttgaagaaggcctgccaggtgacccagtcgcggaacgcgaagaccatgaccacatcccacctgaagcagtgcatcgagctggagcagcagtttgacttcttgaaggacctggtggcatctgttcccgacatgcagggggacggggaagacaaccacatggatggggacaagggcgcccgcaggggccggaagccaggcagcggcggccggaagaacggtgggatgggaacgaaaagcaaggacaagaagctgtccgggacagactcggagcaggaggatgaatctgaggacacagatactgatggggaagaggagacatcacaacccccaccccaggccagccacccctctgcccactttcagagccccccgacacccttcctgcccttcgcctctactctgcctttgcccccagcgcccccgggcccctcagcacctgatgaagaggacgaagaagattacgactcctagcgccttctgccccccagaccatagccccttttagttggttttagttgctctggggggaggagagaaggtagagctgttcttaaatttattaaaaaaaaaaataaaagggaatctcagtg

SEQ ID NO: 128087 - DNA, 695 bp, Homo sapiens
  Payload ID: 5082
  Gene Symbol: DRAP1
  Gene Name: DR1-associated protein 1 (negative cofactor 2 alpha)
  ENST ID: ENST00000525501
  CDS Start-End: 229-695
cagactggggagggacgcgcaccggccaggaggcttcaagaggagggcactagggccctgcgagcggcgtcttaaccggcggcgctaggactccgcgggaaacggcgggggcggagcgggcggcaccaggacccaggggaaccgcgacgggcgggcggcgagcaggcccgggagccgggaggctgcgggcggcggcgctggacccgacgcggcgagagaggccccgagatgccgagcaagaagaagaagtacaacgcgcggttcccgccggcgcggatcaagaagatcatgcagacggacgaagagattgggaaggtggcggcggcggtgcctgtcatcatctcccgggcgctcgagctcttcctagagtcgctgttgaagaaggcctgccagggggacggggaagacaaccacatggatggggacaagggcgcccgcaggggccggaagccaggcagcggcggccggaagaacggtgggatgggaacgaaaagcaaggacaagaagctgtccgggacagactcggagcaggaggatgaatctgaggacacagatactgatggggaagaggagacatcacaacccccaccccaggccagccacccctctgcccactttcagagccccccgacacccttcctgcccttcgcctctactctgcctttgcccccagcgcccccgggcccctcagcacc

SEQ ID NO: 128088 - DNA, 581 bp, Homo sapiens
  Payload ID: 5082
  Gene Symbol: DRAP1
  Gene Name: DR1-associated protein 1 (negative cofactor 2 alpha)
  ENST ID: ENST00000527119
  CDS Start-End: 1-486
atgccgagcaagaagaagaagtacaacgcgcggttcccgccgtcgcggaacgcgaagaccatgaccacatcccacctgaagcagtgcatcgagctggagcagcagtttgacttcttgaaggacctggtggcatctgttcccgacatgcagggggacggggaagacaaccacatggatggggacaagggcgcccgcaggggccggaagccaggcagcggcggccggaagaacggtgggatgggaacgaaaagcaaggacaagaagctgtccgggacagactcggagcaggaggatgaatctgaggacacagatactgatggggaagaggagacatcacaacccccaccccaggccagccacccctctgcccactttcagagccccccgacacccttcctgcccttcgcctctactctgcctttgcccccagcgcccccgggcccctcagcacctgatgaagaggacgaagaagattacgactcctagcgccttctgccccccagaccatagccccttttagttggttttagttgctctggggggaggagagaaggtagagctgttcttaaatttattaaaaa

SEQ ID NO: 128089 - DNA, 3072 bp, Homo sapiens
  Payload ID: 5083
  Gene Symbol: DBN1
  Gene Name: drebrin 1
  Uniprot ID: Q16643
  ENST ID: ENST00000292385
  CDS Start-End: 611-2566
ggcggccggacgcggcccggaggcgcggggtcccgatgtggggcccggggccgcgtggccctgcgggagcccatcccccaccctaccccccgggcccgggggacaggtgtgcacggggcggccaagggcaccttcgccaccttcgagcgggcgaggtccgggcggggacggggcggggaccgagctagcggagccagcgcagcctgcccggctcagcccggcccggccacagcacaaaggaaagcgagggcgggggaggagcggagcgggctgggggccgggcgccccgcccaccggggggcctctcggagtgggccgccctccccccgaaacctgggctggagtgaggtggaaggatgtttgctgccacatggcgaccgcgaagtgactcccttaccgccgcgggtcgcggaggaggcagggggaaggtgcccatctggttcctaggcctcctctccctgctggcagatgggaacaggttcttcttgaggaaactgaggcaaagaggagggcaggtctgagggaccccgcttgggctggcctcacccgcacactgggagggcagccaggtggggactctgacctgggggcttctggaggagaggatgagatggctgggcatccatggcatggtactgcagcactggccagcagccaggcctggagggatggacgcgagagacaagctctcgtgtcctgcagggctctgtacacatatgaagatggctccgatgacctcaagcttgcagcatcaggagaagggggcttgcaggagctttcgggacactttgagaaccagaaggtgatgtacggcttctgcagtgtcaaggactcccaagctgctctgccaaaatacgtgctcatcaactgggtgggcgaagatgtgcctgatgcccgcaagtgcgcttgtgccagccacgtggctaaggtggcggagttcttccagggtgtcgacgtgatcgtgaacgccagcagcgtggaagacatagacgcgggtgccatcgggcagcggctctctaacgggctggcgcgactctccagccctgtgctgcaccgactgcggctgcgagaggatgagaacgcagagcccgtgggcaccacctaccagaagacggatgcagctgtggaaatgaagcggattaaccgagagcagttctgggagcaggccaagaaggaagaagagctgcggaaggaggaggagcggaagaaggccctggatgagaggctcaggttcgagcaggagcggatggagcaggagcggcaggagcaagaggagcgcgagcggcgctaccgggagcgggagcagcagatcgaggagcacaggaggaaacagcagactttagaagcggaagaggccaagaggcggttgaaggagcagtctatctttggtgaccatcgggatgaggaggaagagacccacatgaagaagtcagagtcggaggtggaggaggcagcagctattattgcccagcggcctgacaacccaagggagttcttcaagcagcaggaaagagtcgcatcggcctctgcgggcagctgtgatgtaccctcgcccttcaaccatcgaccaggcagccacctggacagccaccggaggatggcgcccactcccatccccacgcggagcccgtctgactccagcaccgcctccacccctgtcgctgagcagatagagcgggccctggatgaggtcacctcctcgcagcctccaccactgccaccgccacccccaccagcccaagagacccaggagcccagccccatcctagacagtgaggagaccagagcagcagcccctcaggcctgggccggccccatggaggagccccctcaggcacaggcgcctccccgggggccaggcagccctgcagaggacttgatgttcatggagtctgcagagcaggctgtcctggctgctcccgtggagcctgccacagctgacgccacggagatccacgatgcagctgacaccattgaaactgacactgccactgctgacaccactgttgccaacaacgtaccccccgccgccaccagcctcattgacctatggcctggcaacggggaaggggcctccacactccagggtgagcccagggcccccacgccaccctcgggtactgaggtcaccctggcagaggtgcccctgctggatgaggtggctccggagccactgctgccagcaggcgaaggctgtgccacccttctcaactttgatgagctgcctgagccgccagccaccttctgtgacccagaggaagtggaaggggagtccctggctgccccccagaccccaactctgccctcagcccttgaggagctggagcaagagcaggagccggagccccacctgctaaccaatggcgagaccacccagaaggaggggacccaggccagtgaggggtacttcagtcaatcacaggaggaggagtttgcccaatcggaagagctctgtgccaaggctccgcctcctgtgttctacaacaagcctccagagatcgacatcacatgctgggatgcagacccagttccagaagaggaggagggcttcgagggtggtgattagcggtggcgccagccctaggctacccttgccaaggccgcccacctgcatcagcctctggccagacggcccgccgtgcctgcattcgcagcagctccgcctggcacccactccggattccggccctggctggggacttggccgcttccctacccacagggcctgacttttacagcttttctctttttttaaaaagttgataggagacttgtacagttgactggctttcctctcgttggtagttgagacgctgttgcaaattccacccctccttccctggtccagattgtagctcttagtcctccctgctcagctggccgggttggaggcctcaccctgcttggggcctggcgtggggggagctctggtgggaaaatgtcccccacctcttttcctagttttatgtttcttgggaaaatatcactttgtattctctgtccagggcttcagatattttgcacgaattttaaaacatggcaataaatggctcgtgggctctggctccctgg

SEQ ID NO: 128090 - DNA, 2995 bp, Homo sapiens
  Payload ID: 5083
  Gene Symbol: DBN1
  Gene Name: drebrin 1
  Uniprot ID: Q16643
  ENST ID: ENST00000309007
  CDS Start-End: 221-2170
gggcggcgctaggaccgagcgagcggagggagcgagccgggcggagccagcgccccccgccccccgccggccggctcccctcccccggccgctggctcgctcggctcgcgacgctgcagaggctccgaggcggcggcggcgactccctctttccctccctcctcctccgtccgcccgtccgtccgcgcgtctgtccgttcggcccggtccggcccgaagcatggccggcgtcagcttcagcggccaccgcctggagctgctggcggcttacgaggaggtgatccgagaggagagcgcggccgactgggctctgtacacatatgaagatggctccgatgacctcaagcttgcagcatcaggagaagggggcttgcaggagctttcgggacactttgagaaccagaaggtgatgtacggcttctgcagtgtcaaggactcccaagctgctctgccaaaatacgtgctcatcaactgggtgggcgaagatgtgcctgatgcccgcaagtgcgcttgtgccagccacgtggctaaggtggcggagttcttccagggtgtcgacgtgatcgtgaacgccagcagcgtggaagacatagacgcgggtgccatcgggcagcggctctctaacgggctggcgcgactctccagccctgtgctgcaccgactgcggctgcgagaggatgagaacgcagagcccgtgggcaccacctaccagaagacggatgcagctgtggaaatgaagcggattaaccgagagcagttctgggagcaggccaagaaggaagaagagctgcggaaggaggaggagcggaagaaggccctggatgagaggctcaggttcgagcaggagcggatggagcaggagcggcaggagcaagaggagcgcgagcggcgctaccgggagcgggagcagcagatcgaggagcacaggaggaaacagcagactttagaagcggaagaggccaagaggcggttgaaggagcagtctatctttggtgaccatcgggatgaggaggaagagacccacatgaagaagtcagagtcggaggtggaggaggcagcagctattattgcccagcggcctgacaacccaagggagttcttcaagcagcaggaaagagtcgcatcggcctctgcgggcagctgtgatgtaccctcgcccttcaaccatcgaccaggcagccacctggacagccaccggaggatggcgcccactcccatccccacgcggagcccgtctgactccagcaccgcctccacccctgtcgctgagcagatagagcgggccctggatgaggtcacctcctcgcagcctccaccactgccaccgccacccccaccagcccaagagacccaggagcccagccccatcctagacagtgaggagaccagagcagcagcccctcaggcctgggccggccccatggaggagccccctcaggcacaggcgcctccccgggggccaggcagccctgcagaggacttgatgttcatggagtctgcagagcaggctgtcctggctgctcccgtggagcctgccacagctgacgccacggagatccacgatgcagctgacaccattgaaactgacactgccactgctgacaccactgttgccaacaacgtaccccccgccgccaccagcctcattgacctatggcctggcaacggggaaggggcctccacactccagggtgagcccagggcccccacgccaccctcgggtactgaggtcaccctggcagaggtgcccctgctggatgaggtggctccggagccactgctgccagcaggcgaaggctgtgccacccttctcaactttgatgagctgcctgagccgccagccaccttctgtgacccagaggaagtggaaggggagtccctggctgccccccagaccccaactctgccctcagcccttgaggagctggagcaagagcaggagccggagccccacctgctaaccaatggcgagaccacccagaaggaggggacccaggccagtgaggggtacttcagtcaatcacaggaggaggagtttgcccaatcggaagagctctgtgccaaggctccgcctcctgtgttctacaacaagcctccagagatcgacatcacatgctgggatgcagacccagttccagaagaggaggagggcttcgagggtggtgattagcggtggcgccagccctaggctacccttgccaaggccgcccacctgcatcagcctctggccagacggcccgccgtgcctgcattcgcagcagctccgcctggcacccactccggattccggccctggctggggacttggccgcttccctacccacagggcctgacttttacagcttttctctttttttaaaaagttgataggagacttgtacagttgactggctttcctctcgttggtagttgagacgctgttgcaaattccacccctccttccctggtccagattgtagctcttagtcctccctgctcagctggccgggttggaggcctcaccctgcttggggcctggcgtggggggagctctggtgggaaaatgtcccccacctcttttcctagttttatgtttcttgggaaaatatcactttgtattctctgtccagggcttcagatattttgcacgaattttaaaacatggcaataaatggctcgtgggctctggctccctgggaccccctccccgcccttcttttgaccccttcctgtctggcccaaaggaagtagcaggcccagctggggcccctcggctaccccccgtctcctgccgggcaggtcccaggttggaggccctaggcgcggttcaggtcagggctatggatggggcccaggggctttggtggcccctccccaactccttcctctttgcttgggttcctttttcacgtttagtaactgttttttttttttttttttttttttttttggaaagcacaaacttctgtaacgggtcgtgctcatgtctgttaataaagaaatccagatcccttcg

SEQ ID NO: 128091 - DNA, 2701 bp, Homo sapiens
  Payload ID: 5083
  Gene Symbol: DBN1
  Gene Name: drebrin 1
  Uniprot ID: Q16643
  ENST ID: ENST00000393565
  CDS Start-End: 117-2204
ctcgcgacgctgcagaggctccgaggcggcggcggcgactccctctttccctccctcctcctccgtccgcccgtccgtccgcgcgtctgtccgttcggcccggtccggcccgaagcatggccggcgtcagcttcagcggccaccgcctggagctgctggcggcttacgaggaggtgatccgagaggagagcgcggccgactgggctctgtacacatatgaagatggctccgatgacctcaagcttgcagcatcaggagaagggggcttgcaggagctttcgggacactttgagaaccagaaggtgatgtacggcttctgcagtgtcaaggactcccaagctgctctgccaaaatacgtgctcatcaactgggtgggcgaagatgtgcctgatgcccgcaagtgcgcttgtgccagccacgtggctaaggtggcggagttcttccagggtgtcgacgtgatcgtgaacgccagcagcgtggaagacatagacgcgggtgccatcgggcagcggctctctaacgggctggcgcgactctccagccctgtgctgcaccgactgcggctgcgagaggatgagaacgcagagcccgtgggcaccacctaccagaagacggatgcagctgtggaaatgaagcggattaaccgagagcagttctgggagcaggccaagaaggaagaagagctgcggaaggaggaggagcggaagaaggccctggatgagaggctcaggttcgagcaggagcggatggagcaggagcggcaggagcaagaggagcgcgagcggcgctaccgggagcgggagcagcagatcgaggagcacaggaggaaacagcagactttagaagcggaagaggccaagaggcggttgaaggagcagtctatctttggtgaccatcgggatgaggaggaagagacccacatgaagaagtcagagtcggaggtggaggaggcagcagctattattgcccagcggcctgacaacccaagggagttcttcaagcagcaggaaagagtcgcatcggcctctgcgggcagctgtgatgtaccctcgcccttcaaccatcgaccaggtcgtccgtactgccctttcataaaggcatcggacagtgggccttcctcctcctcctcttcctcctcctcccctccacggactccctttccctatatcacctgccaccgcaccccaaacctctcttcctccctcccatgcagccacctggacagccaccggaggatggcgcccactcccatccccacgcggagcccgtctgactccagcaccgcctccacccctgtcgctgagcagatagagcgggccctggatgaggtcacctcctcgcagcctccaccactgccaccgccacccccaccagcccaagagacccaggagcccagccccatcctagacagtgaggagaccagagcagcagcccctcaggcctgggccggccccatggaggagccccctcaggcacaggcgcctccccgggggccaggcagccctgcagaggacttgatgttcatggagtctgcagagcaggctgtcctggctgctcccgtggagcctgccacagctgacgccacggagatccacgatgcagctgacaccattgaaactgacactgccactgctgacaccactgttgccaacaacgtaccccccgccgccaccagcctcattgacctatggcctggcaacggggaaggggcctccacactccagggtgagcccagggcccccacgccaccctcgggtactgaggtcaccctggcagaggtgcccctgctggatgaggtggctccggagccactgctgccagcaggcgaaggctgtgccacccttctcaactttgatgagctgcctgagccgccagccaccttctgtgacccagaggaagtggaaggggagtccctggctgccccccagaccccaactctgccctcagcccttgaggagctggagcaagagcaggagccggagccccacctgctaaccaatggcgagaccacccagaaggaggggacccaggccagtgaggggtacttcagtcaatcacaggaggaggagtttgcccaatcggaagagctctgtgccaaggctccgcctcctgtgttctacaacaagcctccagagatcgacatcacatgctgggatgcagacccagttccagaagaggaggagggcttcgagggtggtgattagcggtggcgccagccctaggctacccttgccaaggccgcccacctgcatcagcctctggccagacggcccgccgtgcctgcattcgcagcagctccgcctggcacccactccggattccggccctggctggggacttggccgcttccctacccacagggcctgacttttacagcttttctctttttttaaaaagttgataggagacttgtacagttgactggctttcctctcgttggtagttgagacgctgttgcaaattccacccctccttccctggtccagattgtagctcttagtcctccctgctcagctggccgggttggaggcctcaccctgcttggggcctggcgtggggggagctctggtgggaaaatgtcccccacctcttttcctagttttatgtttcttgggaaaatatcactttgtattctctgtccagggcttcagatattttgcacgaattttaaaacatggcaataaatggctcgtgggctctg

SEQ ID NO: 128092 - DNA, 456 bp, Homo sapiens
  Payload ID: 5083
  Gene Symbol: DBN1
  Gene Name: drebrin 1
  ENST ID: ENST00000514833
  CDS Start-End: 85-456
aaaggatctcctagctggccccatctgagagggcacaggcgtggaggggaggagaggcctggaatggagggataatgagctggcatggccggcgtcagcttcagcggccaccgcctggagctgctggcggcttacgaggaggtgatccgagaggagagcgcggccgactgggctctgtacacatatgaagatggctccgatgacctcaagcttgcagcatcaggagaagggggcttgcaggagctttcgggacactttgagaaccagaaggtgatgtacggcttctgcagtgtcaaggactcccaagctgctctgccaaaatacgtgctcatcaactgggtgggcgaagatgtgcctgatgcccgcaagtgcgcttgtgccagccacgtggctaaggtggcggagttcttccagggtgtcgacgtgatcgtgaacgccagcagcgtggaagacata

SEQ ID NO: 128093 - DNA, 1044 bp, Homo sapiens
  Payload ID: 5083
  Gene Symbol: DBN1
  Gene Name: drebrin 1
  ENST ID: ENST00000477391
  CDS Start-End: 93-1044
ggcggcggcggcgactccctctttccctccctcctcctccgtccgcccgtccgtccgcgcgtctgtccgttcggcccggtccggcccgaagcatggccggcgtcagcttcagcggccaccgcctggagctgctggcggcttacgaggaggtgatccgagaggagagcgcggccgactgggctctgtacacatatgaagatggctccgatgacctcaagcttgcagcatcaggagggggcttgcaggagctttcgggacactttgagaaccagaaggtgatgtacggcttctgcagtgtcaaggactcccaagctgctctgccaaaatacgtgctcatcaactgggtgggcgaagatgtgcctgatgcccgcaagtgcgcttgtgccagccacgtggctaaggtggcggagttcttccagggtgtcgacgtgatcgtgaacgccagcagcgtggaagacatagacgcgggtgccatcgggcagcggctctctaacgggctggcgcgactctccagccctgtgctgcaccgactgcggctgcgagaggatgagaacgcagagcccgtgggcaccacctaccagaagacggatgcagctgtggaaatgaagcggattaaccgagagcagttctgggagcaggccaagaaggaagaagagctgcggaaggaggaggagcggaagaaggccctggatgagaggctcaggttcgagcaggagcggatggagcaggagcggcaggagcaagaggagcgcgagcggcgctaccgggagcgggagcagcagatcgaggagcacaggaggaaacagcagactttagaagcggaagaggccaagaggcggttgaaggagcagtctatctttggtgaccatcgggatgaggaggaagagacccacatgaagaagtcagagtcggaggtggaggaggcagcagctattattgcccagcggcctgacaacccaagggagttcttcaagcagcaggaaagagtcgcatcggcctctgcgggcagctgtgatgtaccctcgcccttcaaccatcgaccag

SEQ ID NO: 128094 - DNA, 1878 bp, Homo sapiens
  Payload ID: 5083
  Gene Symbol: DBN1
  Gene Name: drebrin 1
  ENST ID: ENST00000512501
  CDS Start-End: 216-1391
gtccttccccaggaagcagtggccacgctgcagctggaaaccagagggcctggcccccgggtggggagcaggcatttgggagggaggccagtctcccatgctgaggcttggaggtgggaacgggtgtgcctgttctgggaactgactgcgtcgtgctgaggacttgatgtctacatctcacaggtgaccatcgggatgaggaggaagagacccacatgaagaagtcagagtcggaggtggaggaggcagcagctattattgcccagcggcctgacaacccaagggagttcttcaagcagcaggaaagagtcgcatcggcctctgcgggcagctgtgatgtaccctcgcccttcaaccatcgaccaggcagccacctggacagccaccggaggatggcgcccactcccatccccacgcggagcccgtctgactccagcaccgcctccacccctgtcgctgagcagatagagcgggccctggatgaggtcacctcctcgcagcctccaccactgccaccgccacccccaccagcccaagagacccaggagcccagccccatcctagacagtgaggagaccagagcagcagcccctcaggcctgggccggccccatggaggagccccctcaggcacaggcgcctccccgggggccaggcagccctgcagaggacttgatgttcatggagtctgcagagcaggctgtcctggctgctcccgtggagcctgccacagctgacgccacggagatccacgatgcagctgacaccattgaaactgacactgccactgctgacaccactgttgccaacaacgtaccccccgccgccaccagcctcattgacctatggcctggcaacggggaaggggcctccacactccagggtgagcccagggcccccacgccaccctcgggtactgaggtcaccctggcagaggtgcccctgctggatgaggtggctccggagccactgctgccagcaggcgaaggctgtgccacccttctcaactttgatgagctgcctgagccgccagccaccttctgtgacccagaggaagtggaaggggagtccctggctgccccccagaccccaactctgccctcagcccttgaggagctggagcaagagcaggagccggagccccacctgctaaccaatggcgagaccacccagaaggaggggacccaggtgcggcagggactgcctggtgggagggatgggagggagtgggggctgagcagggtgctggccctgcattcctcatgcttgcaccagtacccccttctctgtgacccacattatttgaggggaagtccatcccaccctccctccctgggccggctctgcttttgttcccaaggcaggcatccttgtttccctggcaaccactgatggaatcattggttgctggggaaacgggctcaggcctgataggtcagccccagtcctgctgggtggggccaagtgacctgatgctttcccctgcaggccagtgaggggtacttcagtcaatcacaggaggaggagtttgcccaatcggaagagctctgtgccaaggctccgcctcctgtgttctacaacaagcctccaggtagtactgggctggatgatggggaggaatttgggtgcgggggctggatttgagtgtgggtagccaccccaccactacccaccgctcacagaggctggggacacaagcggtctgctaggtccctaactcctctccctttctaacgccacagagatcgacatcacatgctgggatgcagacccagttccagaagaggaggagggcttcgagggtggtgattagcggtggcgccagccctaggctacccttgccaaggccgcccacctgcatcagcctctggccagacgg

SEQ ID NO: 128095 - DNA, 477 bp, Homo sapiens
  Payload ID: 5083
  Gene Symbol: DBN1
  Gene Name: drebrin 1
  ENST ID: ENST00000506117
  CDS Start-End: 199-477
gaaacctgggctggagtgaggtggaaggatgtttgctgccacatggcgaccgcgaagtgactcccttaccgccgcgggtcgcggaggaggcagggggctctgtacacatatgaagatggctccgatgacctcaagcttgcagcatcaggagaagggggcttgcaggagctttcgggacactttgagaaccagaaggtgatgtacggcttctgcagtgtcaaggactcccaagctgctctgccaaaatacgtgctcatcaactgggtgggcgaagatgtgcctgatgcccgcaagtgcgcttgtgccagccacgtggctaaggtggcggagttcttccagggtgtcgacgtgatcgtgaacgccagcagcgtggaagacatagacgcgggtgccatcgggcagcggctctctaacgggctggcgcgactctccagccctgtgctgcaccgactgcggctgcgagaggatgagaacgca

SEQ ID NO: 128096 - DNA, 1447 bp, Homo sapiens
  Payload ID: 5084
  Gene Symbol: DBNL
  Gene Name: drebrin-like
  ENST ID: ENST00000411855
  CDS Start-End: 19-207
gagactgcggggcgggccatggcggcgaacctgagccggaacgggccagcgctgcaagaggcctacgtgcgggtggtcaccgagaagtccccgaccgactgggctctctttacctatgaaggcaacagcaatgacatccgcgtggctggcacaggggggggcccatgtgaccatcaacgcacgggccgaggaggatgtggagcctgagtgcatcatggagaaggtggccaaggcttcaggtgccaactacagctttcacaaggagagtggccgcttccaggacgtgggaccccaggccccagtgggctctgtgtaccagaagaccaatgccgtgtctgagattaaaagggttggtaaagacagcttctgggccaaagcagagaaggaggaggagaaccgtcggctggaggaaaagcggcgggccgaggaggcacagcggcagctggagcaggagcgccgggagcgtgagctgcgtgaggctgcacgccgggagcagcgctatcaggagcagggtggcgaggccagcccccagagcaggacgtgggagcagcagcaagaagtggtttcaaggaaccgaaatgagcaggagtctgccgtgcacccgagggagattttcaagcagaaggagagggccatgtccaccacctccatctccagtcctcagcctggcaagctgaggagccccttcctgcagaagcagctcacccaaccagagacccactttggcagagagccagctgctgccatctcaaggcccagggcagatctccctgctgaggagccggcgcccagcactcctccatgtctggtgcaggcagaagaggaggctgtgtatgaggaacctccagagcaggagaccttctacgagcagcccccactggtgcagcagcaaggtgctggctctgagcacattgaccaccacattcagggccaggggctcagtgggcaagggctctgtgcccgtgccctgtacgactaccaggcagccgacgacacagagatctcctttgaccccgagaacctcatcacgggcatcgaggtgatcgacgaaggctggtggcgtggctatgggccggatggccattttggcatgttccctgccaactacgtggagctcattgagtgaggctgagggcacatcttgcccttcccctctcagacatggcttccttattgctggaagaggaggcctgggagttgacattcagcactcttccaggaataggacccccagtgaggatgaggcctcagggctccctccggcttggcagactcagcctgtcaccccaaatgcagcaatggcctggtgattcccacacatccttcctgcatcccccgaccctcccagacagcttggctcttgcccctgacaggatactgagccaagccctgcctgtggccaagccctgagtggccactgccaagctgcggggaagggtcctgagca

SEQ ID NO: 128097 - DNA, 1854 bp, Homo sapiens
  Payload ID: 5084
  Gene Symbol: DBNL
  Gene Name: drebrin-like
  ENST ID: ENST00000441840
  CDS Start-End: 53-205
cccggcccggcccggaagctacagcagcggcgcggagactgcggggcgggccatggcggcgaacctgagccggaacgggccagcgctgcaagaggcctacgtgcgggtggtcaccgagaagtccccgaccgactgggctctctttacctatgaaggcaacagcaatgacatccgctgctgctcctgctgcagggggcccatgtgaccatcaacgcacgggccgaggaggatgtggagcctgagtgcatcatggagaaggtggccaaggcttcaggtgccaactacagctttcacaaggagagtggccgcttccaggacgtgggaccccaggccccagtgggctctgtgtaccagaagaccaatgccgtgtctgagattaaaagggttggtaaagacagcttctgggccaaagcagagaaggaggaggagaaccgtcggctggaggaaaagcggcgggccgaggaggcacagcggcagctggagcaggagcgccgggagcgtgagctgcgtgaggctgcacgccgggagcagcgctatcaggagcagggtggcgaggccagcccccagagcaggacgtgggagcagcagcaagaagtggtttcaaggaaccgaaatgagcaggagtctgccgtgcacccgagggagattttcaagcagaaggagagggccatgtccaccacctccatctccagtcctcagcctggcaagctgaggagccccttcctgcagaagcagctcacccaaccagagacccactttggcagagagccagctgctgccatctcaaggcccagggcagatctccctgctgaggagccggcgcccagcactcctccatgtctggtgcaggcagaagaggaggctgtgtatgaggaacctccagagcaggagaccttctacgagcagcccccactggtgcagcagcaaggtgctggctctgagcacattgaccaccacattcagggccaggggctcagtgggcaagggctctgtgcccgtgccctgtacgactaccaggcagccgacgacacagagatctcctttgaccccgagaacctcatcacgggcatcgaggtgatcgacgaaggctggtggcgtggctatgggccggatggccattttggcatgttccctgccaactacgtggagctcattgagtgaggctgagggcacatcttgcccttcccctctcagacatggcttccttattgctggaagaggaggcctgggagttgacattcagcactcttccaggaataggacccccagtgaggatgaggcctcagggctccctccggcttggcagactcagcctgtcaccccaaatgcagcaatggcctggtgattcccacacatccttcctgcatcccccgaccctcccagacagcttggctcttgcccctgacaggatactgagccaagccctgcctgtggccaagccctgagtggccactgccaagctgcggggaagggtcctgagcaggggcatctgggaggctctggctgccttctgcatttatttgccttttttctttttctcttgcttctaaggggtggtggccaccactgtttagaatgacccttgggaacagtgaacgtagagaattgtttttagcagagtttgtgaccaaagtcagagtggatcatggtggtttggcagcagggaatttgtcttgttggagcctgctctgtgctccccactccatttctctgtccctctgcctgggctatgggaagtggggatgcagatggccaagctcccaccctgggtattcaaaaacggcagacacaacatgttcctccacgcggctcactcgatgcctgcaggccccagtgtgtgcctcaactgattct

SEQ ID NO: 128098 - DNA, 897 bp, Homo sapiens
  Payload ID: 5084
  Gene Symbol: DBNL
  Gene Name: drebrin-like
  ENST ID: ENST00000452661
  CDS Start-End: 1-416
tcaagcagaaggagagggccatgtccaccacctccatctccagtcctcagcctgatctccctgctgaggagccggcgcccagcactcctccatgtctggtgcaggcagaagaggaggctgtgtatgaggaacctccagagcaggagaccttctacgagcagcccccactggtgcagcagcaaggtgctggctctgagcacattgaccaccacattcagggccaggggctcagtgggcaagggctctgtgcccgtgccctgtacgactaccaggcagccgacgacacagagatctcctttgaccccgagaacctcatcacgggcatcgaggtgatcgacgaaggctggtggcgtggctatgggccggatggccattttggcatgttccctgccaactacgtggagctcattgagtgaggctgagggcacatcttgcccttcccctctcagacatggcttccttattgctggaagaggaggcctgggagttgacattcagcactcttccaggaataggacccccagtgaggatgaggcctcagggctccctccggcttggcagactcagcctgtcaccccaaatgcagcaatggcctggtgattcccacacatccttcctgcatcccccgaccctcccagacagcttggctcttgcccctgacaggatactgagccaagccctgcctgtggccaagccctgagtggccactgccaagctgcggggaagggtcctgagcaggggcatctgggaggctctggctgccttctgcatttatttgccttttttctttttctcttgcttctaaggggtggtggccaccactgtttagaatgacccttgggaacagtgaacgtagagaattgtttttagcagagtttgtgaccaaagtcagagtgg

SEQ ID NO: 128099 - DNA, 9618 bp, Homo sapiens
  Payload ID: 5084
  Gene Symbol: DBNL
  Gene Name: drebrin-like
  ENST ID: ENST00000432854
  CDS Start-End: 1-1078
ggcaacagcaatgacatccgcgtggctggcacaggggacaggcgagggcgtgaacgatgtgcggaagggagcctgtgccagccacgtcagcaccatggccagcttcctgaagggggcccatgtgaccatcaacgcacgggccgaggaggatgtggagcctgagtgcatcatggagaaggtggccaaggcttcaggtgccaactacagctttcacaaggagagtggccgcttccaggacgtgggaccccaggccccagtgggctctgtgtaccagaagaccaatgccgtgtctgagattaaaagggttggtaaagacagcttctgggccaaagcagagaaggaggaggagaaccgtcggctggaggaaaagcggcgggccgaggaggcacagcggcagctggagcaggagcgccgggagcgtgagctgcgtgaggctgcacgccgggagcagcgctatcaggagcagggtggcgaggccagcccccagaggacgtgggagcagcagcaagaagtggtttcaaggaaccgaaatgagcaggagtctgccgtgcacccgagggagattttcaagcagaaggagagggccatgtccaccacctccatctccagtcctcagcctggcaagctgaggagccccttcctgcagaagcagctcacccaaccagagacccactttggcagagagccagctgctgccatctcaaggcccagggcagatctccctgctgaggagccggcgcccagcactcctccatgtctggtgcaggcagaagaggaggctgtgtatgaggaacctccagagcaggagaccttctacgagcagcccccactggtgcagcagcaaggtgctggctctgagcacattgaccaccacattcagggccaggggctcagtgggcaagggctctgtgcccgtgccctgtacgactaccaggcagccgacgacacagagatctcctttgaccccgagaacctcatcacgggcatcgaggtgatcgacgaaggctggtggcgtggctatgggccggatggccattttggcatgttccctgccaactacgtggagctcattgagtgaggctgagggcacatcttgcccttcccctctcagacatggcttccttattgctggaagaggaggcctgggagttgacattcagcactcttccaggaataggacccccagtgaggatgaggcctcagggctccctccggcttggcagactcagcctgtcaccccaaatgcagcaatggcctggtgattcccacacatccttcctgcatcccccgaccctcccagacagcttggctcttgcccctgacaggatactgagccaagccctgcctgtggccaagccctgagtggccactgccaagctgcggggaagggtcctgagcaggggcatctgggaggctctggctgccttctgcatttatttgccttttttctttttctcttgcttctaaggggtggtggccaccactgtttagaatgacccttgggaacagtgaacgtagagaattgtttttagcagagtttgtgaccaaagtcagagtggatcatggtggtttggcagcagggaatttgtcttgttggagcctgctctgtgctccccactccatttctctgtccctctgcctgggctatgggaagtggggatgcagatggccaagctcccaccctgggtattcaaaaacggcagacacaacatgttcctccacgcggctcactcgatgcctgcaggccccagtgtgtgcctcaactgattctgacttcaggaaaagtaacacagagtggccttggcctgttgtcttcccctattttctgtcccagctcatccgtgtctctgaagaacaaatatgcttttggaccacgaattcccagtttggtctacacaggctcgcagctctcacctgtcctgctgtagcctgaatgctcccatgtgggaatagcaccccaccacctgcccagtgtctgcctctgctccgtgtctggggtgagcaccctcaccctgagactgtggctgatgatgatcagccaccaggaagaggctaaatgttaagatgggactgaagttggagccttcctgcgttccagttcctctaggagaggccaagggctgccctgctcccagcttcagggagcctctgcctacatgggatggcccactgtgtggcgtcaggtacctggcacccactgagcatccggggaattaggtccctcctgtgccccagagctgctaggcagactgctaggcggttgactcaaggtgttacctgctagtgcctggggtgaaggctgcatggagcccaaccttgctcctggccttcctgtgctcaggcctctccccttttcgccagggcttcctggtgcctctcccatgaagagggaacttcccctccactcccatggaagacccaggtttgggctgttgccagctttgaggccccctgtgggcttgcctgtcccaacccaagaggcagggctcaaagtgccacccgggggttgcaaggacagcagaggaccacctgccctctgcaggaagctgtccaggaagccgtgtcctgggctgtggtccttgctccccatggggagagctgggtcacttggcctcttctaactggccccaagcacgccaattctggagcatggttactaagtggctctgaagcttcagggtcaccacaggcttgtcctgactgcaaactcatggagtggttgcagccctggctcagtgtcctgatgactaggtgtgggtactaggctcctgcccctggtgacacacgtatggagtgggggagggtgggtggctgcacccctggttctggagtccccacagctgatggcggtgtgagcctggcatgcacggctgcgctggactccaggctgttgggggaggtgcctttattgcccaagcccacccctcacttggccttgccctgggcagccacagcctccatggccttccgcaccgtttcctcatcacccaggaactgcatgggcttggtgggcttcagctccttgttcagctcatacacaatggggatccccgtgggcaggttcagctccatgatcgcctggtctgacatccctatgccggaaggaataggtgtccttagcccctctgtccccagcctgtttacacagcagacactatgtgacctttatggtccacagagccagttcccctggcaccaattccttcccagccctgagaacgaggccacagaaatgttgccaaaggtcaaggagtaactgagttagaccaagcagcctacagaaatagcccagtggtgaaaaaaatggggacttcagccccacccaagtggctgtgatctgtggtggtgctgtccatagttccctcagcccagtgtgactccagccagactgaagttgagggtcaggaagggacactcaccctttgttttttttttttcttttctttttctttttcttttttttgagatggagttttactcctcttgcccaggctggagtgcagtggcacgatcttggctcactgcaacctccatctcctgggttgaagtgattctgcctcagcctcccaagtagctgggattacaggtgagcgccaccacacccggctaattttgtatttttagtagaaacgggttttaccatgttggtcaggctggtctcaaactcctgacctcaggtgatctgcctgcctcagcctcccaaagtgctgggattacaggagtgagccaccgtgcccagcaccctttggtttctaaagtgctctaaattctagacatcctgaacagaggagcaagtgcggaatggagctggaggagggacagggaggccgagcctggtcgaaacctgaccctgcctgcctcctgcagcccctgagctgggaatagcagctcgacctttgatgttcgcgccactccacccctgctccgtgcaggagggtttaagaaaatgttctctggggagtcagagtgaaatccctcatattcaccaccaaaagtgcgtcccctttccccaaaccaggctgtgggagggtcatggggctgcatgaagtctccggaagggagaggaggcaggtggtccttccctctgcctggccccagtgccaggtgccaggtgtccgtgtttggagcgggcaggcttggggctggctgggtctccggggcctgccggtctgggtgctctggccaactgcccaacggccctaggagcaggaggtctggggcacacccttctagcctttccaggactcaacaagctttaaggtcattcagatgctaatttagactgcccttgtgtcagaatactaaggtgggaggcggagcggaggtgccagtcactctgggcgaggccttactgcgcccatgcatcccgggcccatttgtcagcccttgctcttcagtgggagcccagctgcaagcccagagtctggccactccatagtcctgcacccctcttttgattggtctttcctttgcccagagaggggctccagagggagataggtggtgaagctcatgcagggattctgaggacctgatgggggagggccctgcgaggggtccaagcctacatcaagaggaattcagtaccagggggagctccccaccaccccggaaaagggagaggcccagagatggaggtggcttgtccagggccccacagtaagttgggatttggagccagatgctctaagcccagcccttccgtttcctagctgggtgtcccttggcagatgccacctttggagcctgccccacctcgggacacagcgagcttcgagtgcagtcagcccctgtggagtgtgtcccagttacacagaaatggggaaaatttcacaaaactaaaaaatggcttctcagccctcctttttcagtgaatgatgtggagccccacgcctagaaagcctggtccatgggcgagagactttgctgagatgagaagccagctggggctgctgcccacccaccctgcccaggctcctgaaggtggcctcaccttccaggtgcttgacaatgccccgcaggctgttcccgtgggctgcaatgagcactcgcttgccggccttgatctggggaacaatctcctcgttccagaagggcagggcccgggcaatggtgtccttgaggctctcgcaggtggggagttccccgggcttcaggcctgcgtaccgacgctcctgggggacacaggcacgctgctttccctcccaagccagtgggcccccacccgactccccactctgcagcttcccagaggccttcccagcaaaggcagcccaccttgctaatggagttgtagtaggggtgcttctcgtccatcgggggcggcgggatgtcgaaggagcgcctccagatcttcacctgctcctccccgtgcttggcggccgtttctgccttgttgaggcctgtgaggcccccgtaatgccgctcattgaggcgccaagtgcgcaccacaggcagccacatctggtccgtgccgtccaggatggcccagagggtgcggatggcccgcttcagcactgacgtgtagcagatgtcaaactccatcttggcatccttgatggccttggctccccgcttggcctcctcggtccccttttcactcagctctgcatcgaaccagccacagaaacggttctcctggttccatgtgctctcgccgtgccggaccatcacgaggcggtgagtggccatggtggcagcagggaccacagaggactctggacggggacggctgcttcccaacactcccagctttataatagtgtcttcccagcccccacccaccccagccaactgccaatcagcattccaggcggtggcaggtgaccagtagctgagctgctgggggctgggggccaggggagtgtgcaggccaagaggctgtgcttaaaatagccccacgcatccaccagctcctggcctgggttcaggtggcatgtctataaccagctggcacccagagcccagactgagtggggctgctggtcagggatgggcgtgaagggcagaagtctgggccaggggagatggggatagcagggacagaggggctctccagggcaacgctcagtggcctatcagccattctctgctcagacagaggcacaaacaaaatcccaacccctttctcctgtgattggcagccaggctaggaggcggccctcagcaggcagaggaggagagccagaggagctggtgcagaccacagctttgtggagaggagtctggccttgtggaaggtaccaggcagcagcagcagaatgggcaagggctggggctgagccgggtttccaggacaaagggggaaagggcccctgtctttcctccggggtccctttgtcaaggtctcatccatacatgccccatgctcccaccctatctgccctcacccaagccacgctcactctcctagccgaaaccaccttgaaaaagagaaatccaagggggtttgggggcaggactgaggactgtcagaagtcttgattgttaggtaaatgctcagcttagcaggaacccacaacgtaggctgaagggtggcacggagttgagtctaggaccaagacttctgcattcaggtttgggggatgagagccaccaaggcagggaagagactatgagcaataaagtcacaattggggccctaatgaaggggccatggccagacccttgggcatgggccccatccagggcctcccatttcctcccaccccagtgaccacactgtcacctgcgacacttctgataacaggagcgggtaggtgagaggccagcagagggaccaccactctgagacttggatctgagtgtgcaagaaaccctcgacaggcctccctccatccctgctggcctacctggggaggggctcctggcttggggcctgtgaagctaaggctctgtacccaaaggttggcagacaagtcccagtgggcaaagtcctgtcggctgccaggacccccaaggctggcaggtggaacccatccctcctagcagtgccatgcgcaggtctcactgttccacactgatcctgattgaagccacatctcctcatctgcttttgtccctttgaccaagagttgattcactagcccaactaaacatgactgaggaccaggctctggcagtcccacaggggccagacatgaagcccatatttcagtggaggagggatcgtaccagcagctaaacatgcctaccgtagatagcaccagatgctaggaaggaaggaccataatgtactgggagagatgggaaaggagaggccggggacagccctgaggtgacatgtgagtggaaagagcggagtgcaaaggcctcagctatgatgagtcctacagggagagcaattcaggtagaggggttggcaaagacccaagccctacagaaagcaaacaagctggggcagcgaccatcaggggcacatggcagagaggtgggctttgtgtcccaacacagtgggaatcactggagactttgaagcatggtcatattttcaagtcacttgcagctgtgtaggagtggaagtagaagctgagtaccctgcaggtctcggcagctttgatgagaacaaggccgcttagccagggctgggtgcagaagcagtggcaaggatcccccagacctgggagacctcactgccaaccaagcaggaggtgtcaaaaaggaaaggggagcccaaagaagggctggacttcggggaagcaagcccctgcttctgacccttggctccggcttgactttcctttgattcatttgacaagtagttgctggcctctgcagtgtgccagagctttcttggaggggtacaggggtaggaaaaccaaaagccaccctcagggcctccatccaggaaggcatagcatggtgggcggcgaggaaggctgctgagtcaacaaggtggtcccaggaaggtggagggagcatcttcccatgtctctcccactgacagccaccaatcctggacagatgcaggagcagctgtcagtagacagataagaaaaggagatcagattcaaagttccgcagagaagtggtgaggtaacaagtattgcctagcctggacacacaggcggcttgaaacctcaagtgcaccaacagaaagagctccaggaagaatcagaggagtgggatgtgaagcccctcgaagtcagtgagttgggggaatccctccaatttttcttttcttctctaccccagctcctgggcagtaacatggaggtggcagtggtggcacagtgacggtagtgtgagctgggtacgcacttgaaacctgagagggtaacgctaccctctgtctagaggagccatggccccaaaagcatggggcaaccaccttctgcagctcctttctgcccccctgcgctgggccctggatgcagtttcagggagtatgcagcagggtaggtagggaaagagccccagatttgtggctggaggtcttggtagggatgttgcagggagctgttgtgtttcagggagagtacagagaagggagagatgaagtgagtgatccgataaagtgatatgtgaagtcattggcttgctgccaagctgcgcacagggctgaccctagatgcacattgcaggtcccagactgaccggtgtagatacaggactaatatgactagtagtgcaaacactttaaacagtcaacattctgcttaggatttaaacaaggtccagagtctcaacataatatttaaaatatccaggttatccaaaataacccagtgtatgaaaaccaggaaaatcttaacatgggagaaaagaagatgatcaatacatgcccatcctgagatgattcaactattggaatgatcagatacagacttcaaagcagctatttataaccagccttcagaaagtattggtgaatattcttaaacagaatggaaatgacaaagcatggagtccataaattagatgatagtttggaaaaagatataaacttacaaaccaagaagctcagtgaaccacacaactggataaattaacaacaaaagtccaagcttagacacatcataaagaaacttctgaaaactaaagaccaagaaaaataagatcagccagagaaaaacgatacatttcattcaggtgaacaattctttgaaagactggatcttcaccagaaactatagaggccagaaagaagtggaacatttttagttttgaaataactgtcacccaagaattctatatccagtaaaaatttctattttactggaataaaagaatgaaataaagacattctcaaatgaaggcaagctgaggaaattcataaccaaagaatctgctttaaaaaaatgttaaaccaagttcttcagacagaagagattactgggggcaattcaaaactttgggaatgcaggaagaacatcataaatggcaaaagtccacataaatatgaaactattctttacttctttaagagttatgtgatggttgaattaagtcatgatactgtctgatggaggcttcagtgtatacagatgtaagacaactagaacatgaggggagaagggtgaagggacctagatggtagtgaggtttctacatgctacttgaaatggcaaaacattaatctaaattgactgtaagagtatgtgtatttggccgggcagg

SEQ ID NO: 128100 - DNA, 1622 bp, Homo sapiens
  Payload ID: 5084
  Gene Symbol: DBNL
  Gene Name: drebrin-like
  ENST ID: ENST00000429716
  CDS Start-End: 31-294
agcagcggcgcggagactgcggggcgggccatggcggcgaacctgagccggaacgggccagcgctgcaagaggcctacgtgcgggtggtcaccgagaagtccccgaccgactgggctctctttacctatgaaggcaacagcaatgacatccgcgtggctggcacaggggacaggcgagggcgtgaacgatgtgcggaagggagcctgtgccagccacgtcagcaccatggccagcttcctgaagggggcccatgtgaccatcaacgcacgggccgaggaggatgtggagcctgagtgcatcatggagaaggtggccaaggcttcaggtgccaactacagctttcacaaggagagtggccgcttccaggacgtgggaccccaggccccagtgggctctgtgtaccagaagaccaatgccgtgtctgagattaaaagggttggtaaagacagcttctgggccaaagcagagaaggaggaggagaaccgtcggctggaggaaaagcggcgggccgaggaggcacagcggcagctggagcaggagcgccgggagcgtgagctgcgtgaggctgcacgccgggagcagcgctatcaggagcagggtggcgaggccagcccccagaggacgtgggagcagcagcaagaagtggtttcaaggaaccgaaatgagcaggagtctgccgtgcacccgagggagattttcaagcagaaggagagggccatgtccaccacctccatctccagtcctcagcctggcaagctgaggagccccttcctgcagaagcagctcacccaaccagagacccactttggcagagagccagctgctgccatctcaaggcccagggcagatctccctgctgaggagccggcgcccagcactcctccatgtctggtgcaggcagaagaggaggctgtgtatgaggaacctccagagcaggagaccttctacgagcagcccccactggtgcagcagcaaggtgctggctctgagcacattgaccaccacattcagggccaggggctcagtgggcaagggctctgtgcccgtgccctgtacgactaccaggcagccgacgacacagagatctcctttgaccccgagaacctcatcacgggcatcgaggtgatcgacgaaggctggtggcgtggctatgggccggatggccattttggcatgttccctgccaactacgtggagctcattgagtgaggctgagggcacatcttgcccttcccctctcagacatggcttccttattgctggaagaggaggcctgggagttgacattcagcactcttccaggaataggacccccagtgaggatgaggcctcagggctccctccggcttggcagactcagcctgtcaccccaaatgcagcaatggcctggtgattcccacacatccttcctgcatcccccgaccctcccagacagcttggctcttgcccctgacaggatactgagccaagccctgcctgtggccaagccctgagtggccactgccaagctgcggggaagggtcctgagcaggggcatctgggaggctctggctgccttctgcatttatttgccttttttctttttctcttgcttctaaggggtggtggccaccactgttta

SEQ ID NO: 128101 - DNA, 662 bp, Homo sapiens
  Payload ID: 5084
  Gene Symbol: DBNL
  Gene Name: drebrin-like
  ENST ID: ENST00000458579
  CDS Start-End: 64-147
caaaggggcggcccggcccggcccggaagctacagcagcggcgcggagactgcggggcgggccatggcggcgaacctgagccggaacgggccagcgctgcaagaggcctacgtgcgggtggtcaccgagaagtccccgaccgactgagggtggcctggaggagatggtggaggagctcaacagcgggaaggtgatgtacgccttctgcagagtgaaggaccccaactctggactgcccaaatttgtcctcatcaactggacaggcgagggcgtgaacgatgtgcggaagggagcctgtgccagccacgtcagcaccatggccagcttcctgaagggggcccatgtgaccatcaacgcacgggccgaggaggatgtggagcctgagtgcatcatggagaaggtggccaaggcttcaggtgccaactacagctttcacaaggagagtggccgcttccaggacgtgggaccccaggccccagtgggctctgtgtaccagaagaccaatgccgtgtctgagattaaaagggttggtaaagacagcttctgggccaaagcagagatggtcacactgaggctcgggtaagttaagccacaaggctaatgatcgactggctctggtgcccgtctttggccatgtgcctaaaactcagtcctgggcaggg

SEQ ID NO: 128102 - DNA, 1513 bp, Homo sapiens
  Payload ID: 5084
  Gene Symbol: DBNL
  Gene Name: drebrin-like
  ENST ID: ENST00000452943
  CDS Start-End: 37-1257
agctacagcagcggcgcggagactgcggggcgggccatggcggcgaacctgagccggaacgggccagcgctgcaagaggcctacgtgcgggtggtcaccgagaagtccccgaccgactgggctctctttacctatgaaggcaacagcaatgacatccgcgtggctggcacaggggagggtggcctggaggagatggtggaggagctcaacagcgggaaggtgatgtacgccttctgcagagtgaaggaccccaactctggactgcccaaatttgtcctcatcaactggggggcccatgtgaccatcaacgcacgggccgaggaggatgtggagcctgagtgcatcatggagaaggtggccaaggcttcaggtgccaactacagctttcacaaggagagtggccgcttccaggacgtgggaccccaggccccagtgggctctgtgtaccagaagaccaatgccgtgtctgagattaaaagggttggtaaagacagcttctgggccaaagcagagaaggaggaggagaaccgtcggctggaggaaaagcggcgggccgaggaggcacagcggcagctggagcaggagcgccgggagcgtgagctgcgtgaggctgcacgccgggagcagcgctatcaggagcagggtggcgaggccagcccccagagcaggacgtgggagcagcagcaagaagtggtttcaaggaaccgaaatgagcaggagtctgccgtgcacccgagggagattttcaagcagaaggagagggccatgtccaccacctccatctccagtcctcagcctggcaagctgaggagccccttcctgcagaagcagctcacccaaccagagacccactttggcagagagccagctgctgccatctcaaggcccagggcagatctccctgctgaggagccggcgcccagcactcctccatgtctggtgcaggcagaagaggaggctgtgtatgaggaacctccagagcaggagaccttctacgagcagcccccactggtgcagcagcaaggtgctggctctgagcacattgaccaccacattcagggccaggggctcagtgggcaagggctctgtgcccgtgccctgtacgactaccaggcagccgacgacacagagatctcctttgaccccgagaacctcatcacgggcatcgaggtgatcgacgaaggctggtggcgtggctatgggccggatggccattttggcatgttccctgccaactacgtggagctcattgagtgaggctgagggcacatcttgcccttcccctctcagacatggcttccttattgctggaagaggaggcctgggagttgacattcagcactcttccaggaataggacccccagtgaggatgaggcctcagggctccctccggcttggcagactcagcctgtcaccccaaatgcagcaatggcctggtgattcccacacatccttcctgcatcccccgaccctcccagacagcttggctcttgcccctgacaggatactgag

SEQ ID NO: 128103 - DNA, 561 bp, Homo sapiens
  Payload ID: 5084
  Gene Symbol: DBNL
  Gene Name: drebrin-like
  ENST ID: ENST00000439815
  CDS Start-End: 37-132
agctacagcagcggcgcggagactgcggggcgggccatggcggcgaacctgagccggaacgggccagcgctgcaagaggcctacgtgcgggtggtcaccgagaagtccccgaccgactgggggcccatgtgaccatcaacgcacgggccgaggaggatgtggagcctgagtgcatcatggagaaggtggccaaggcttcaggtgccaactacagctttcacaaggagagtggccgcttccaggacgtgggaccccaggccccagtgggctctgtgtaccagaagaccaatgccgtgtctgagattaaaagggttggtaaagacagcttctgggccaaagcagagaaggaggaggagaaccgtcggctggaggaaaagcggcgggccgaggaggcacagcggcagctggagcaggagcgccgggagcgtgagctgcgtgaggctgcacgccgggagcagcgctatcaggagcagggtggcgaggccagcccccagagcaggacgtgggagcagcagcaagaagtggtttcaaggaaccgaaatgagcaggtaagatgggggt

SEQ ID NO: 128104 - DNA, 1808 bp, Homo sapiens
  Payload ID: 5084
  Gene Symbol: DBNL
  Gene Name: drebrin-like
  Uniprot ID: Q9UJU6
  ENST ID: ENST00000448521
  CDS Start-End: 99-1391
gtttccggttgtcggaggcgaggcttgtcggctgtcaaaggggcggcccggcccggcccggaagctacagcagcggcgcggagactgcggggcgggccatggcggcgaacctgagccggaacgggccagcgctgcaagaggcctacgtgcgggtggtcaccgagaagtccccgaccgactgggctctctttacctatgaaggcaacagcaatgacatccgcgtggctggcacaggggagggtggcctggaggagatggtggaggagctcaacagcgggaaggtgatgtacgccttctgcagagtgaaggaccccaactctggactgcccaaatttgtcctcatcaactggacaggcgagggcgtgaacgatgtgcggaagggagcctgtgccagccacgtcagcaccatggccagcttcctgaagggggcccatgtgaccatcaacgcacgggccgaggaggatgtggagcctgagtgcatcatggagaaggtggccaaggcttcaggtgccaactacagctttcacaaggagagtggccgcttccaggacgtgggaccccaggccccagtgggctctgtgtaccagaagaccaatgccgtgtctgagattaaaagggttggtaaagacagcttctgggccaaagcagagaaggaggaggagaaccgtcggctggaggaaaagcggcgggccgaggaggcacagcggcagctggagcaggagcgccgggagcgtgagctgcgtgaggctgcacgccgggagcagcgctatcaggagcagggtggcgaggccagcccccagaggacgtgggagcagcagcaagaagtggtttcaaggaaccgaaatgagcaggagtctgccgtgcacccgagggagattttcaagcagaaggagagggccatgtccaccacctccatctccagtcctcagcctggcaagctgaggagccccttcctgcagaagcagctcacccaaccagagacccactttggcagagagccagctgctgccatctcaaggcccagggcagatctccctgctgaggagccggcgcccagcactcctccatgtctggtgcaggcagaagaggaggctgtgtatgaggaacctccagagcaggagaccttctacgagcagcccccactggtgcagcagcaaggtgctggctctgagcacattgaccaccacattcagggccaggggctcagtgggcaagggctctgtgcccgtgccctgtacgactaccaggcagccgacgacacagagatctcctttgaccccgagaacctcatcacgggcatcgaggtgatcgacgaaggctggtggcgtggctatgggccggatggccattttggcatgttccctgccaactacgtggagctcattgagtgaggctgagggcacatcttgcccttcccctctcagacatggcttccttattgctggaagaggaggcctgggagttgacattcagcactcttccaggaataggacccccagtgaggatgaggcctcagggctccctccggcttggcagactcagcctgtcaccccaaatgcagcaatggcctggtgattcccacacatccttcctgcatcccccgaccctcccagacagcttggctcttgcccctgacaggatactgagccaagccctgcctgtggccaagccctgagtggccactgccaagctgcggggaagggtcctgagcaggggcatctgggaggctctggctgccttctgcatttatttgccttttttctttttctcttgcttctaaggggtggtggccaccactgtttagaatg

SEQ ID NO: 128105 - DNA, 1415 bp, Homo sapiens
  Payload ID: 5084
  Gene Symbol: DBNL
  Gene Name: drebrin-like
  Uniprot ID: Q9UJU6
  ENST ID: ENST00000440166
  CDS Start-End: 203-1186
aaaggggcggcccggcccggcccggaagctacagcagcggcgcggagactgcggggcgggccatggcggcgaacctgagccggaacgggccagcgctgcaagaggcctacgtgcgggtggtcaccgagaagtccccgaccgactgacaggcgagggcgtgaacgatgtgcggaagggagcctgtgccagccacgtcagcaccatggccagcttcctgaagggggcccatgtgaccatcaacgcacgggccgaggaggatgtggagcctgagtgcatcatggagaaggtggccaaggcttcaggtgccaactacagctttcacaaggagagtggccgcttccaggacgtgggaccccaggccccagtgggctctgtgtaccagaagaccaatgccgtgtctgagattaaaagggttggtaaagacagcttctgggccaaagcagagaaggaggaggagaaccgtcggctggaggaaaagcggcgggccgaggaggcacagcggcagctggagcaggagcgccgggagcgtgagctgcgtgaggctgcacgccgggagcagcgctatcaggagcagggtggcgaggccagcccccagaggacgtgggagcagcagcaagaagtggtttcaaggaaccgaaatgagcaggagtctgccgtgcacccgagggagattttcaagcagaaggagagggccatgtccaccacctccatctccagtcctcagcctggcaagctgaggagccccttcctgcagaagcagctcacccaaccagagacccactttggcagagagccagctgctgccatctcaaggcccagggcagatctccctgctgaggagccggcgcccagcactcctccatgtctggtgcaggcagaagaggaggctgtgtatgaggaacctccagagcaggagaccttctacgagcagcccccactggtgcagcagcaaggtgctggctctgagcacattgaccaccacattcagggccaggggctcagtgggcaagggctctgtgcccgtgccctgtacgactaccaggcagccgacgacacagagatctcctttgaccccgagaacctcatcacgggcatcgaggtgatcgacgaaggctggtggcgtggctatgggccggatggccattttggcatgttccctgccaactacgtggagctcattgagtgaggctgagggcacatcttgcccttcccctctcagacatggcttccttattgctggaagaggaggcctgggagttgacattcagcactcttccaggaataggacccccagtgaggatgaggcctcagggctccctccggcttggcagactcagcctgtcaccccaaatgcagcaatggcctggtgattcccacacatccttcctgcatcccccgaccctcccagacagctt

SEQ ID NO: 128106 - DNA, 878 bp, Homo sapiens
  Payload ID: 5084
  Gene Symbol: DBNL
  Gene Name: drebrin-like
  ENST ID: ENST00000441904
  CDS Start-End: 22-168
gcggagactgcggggcgggccatggcggcgaacctgagccggaacgggccagcgctgcaagaggcctacgtgcgggtggtcaccgagaagtccccgaccgactggtgggcggcgagacgggccagggtcgggccaggggctgcctcagggggctctctttacctatgaaggcaacagcaatgacatccgcgtggctggcacaggggacaggcgagggcgtgaacgatgtgcggaagggagcctgtgccagccacgtcagcaccatggccagcttcctgaagggggcccatgtgaccatcaacgcacgggccgaggaggatgtggagcctgagtgcatcatggagaaggtggccaaggcttcaggtgccaactacagctttcacaaggagagtggccgcttccaggacgtgggaccccaggccccagtgggctctgtgtaccagaagaccaatgccgtgtctgagattaaaagggttggtaaagacagcttctgggccaaagcagagaaggaggaggagaaccgtcggctggaggaaaagcggcgggccgaggaggcacagcggcagctggagcaggagcgccgggagcgtgagctgcgtgaggctgcacgccgggagcagcgctatcaggagcagggtggcgaggccagcccccagaggacgtgggagcagcagcaagaagtggtttcaaggaaccgaaatgagcaggagtctgccgtgcacccgagggagattttcaagcagaaggagagggccatgtccaccacctccatctccagtcctcagcctggcaagctgaggagccccttcctgcagaagcagctcacccaaccagagacccactttggcagagagccagctgctgccatctcaaggccc

SEQ ID NO: 128107 - DNA, 1241 bp, Homo sapiens
  Payload ID: 5084
  Gene Symbol: DBNL
  Gene Name: drebrin-like
  Uniprot ID: Q9UJU6
  ENST ID: ENST00000456905
  CDS Start-End: 66-1214
gtcaaaggggcggcccggcccggcccggaagctacagcagcggcgcggagactgcggggcgggccatggcggcgaacctgagccggaacgggccagcgctgcaagaggcctacgtgcgggtggtcaccgagaagtccccgaccgactgggctctctttacctatgaaggcaacagcaatgacatccgcgtggctggcacaggggagggtggcctggaggagatggtggaggagctcaacagcgggaaggtgatgtacgccttctgcagagtgaaggaccccaactctggactgcccaaatttgtcctcatcaactggacaggcgagggcgtgaacgatgtgcggaagggagcctgtgccagccacgtcagcaccatggccagcttcctgaagggctctgtgtaccagaagaccaatgccgtgtctgagattaaaagggttggtaaagacagcttctgggccaaagcagagaaggaggaggagaaccgtcggctggaggaaaagcggcgggccgaggaggcacagcggcagctggagcaggagcgccgggagcgtgagctgcgtgaggctgcacgccgggagcagcgctatcaggagcagggtggcgaggccagcccccagagcaggacgtgggagcagcagcaagaagtggtttcaaggaaccgaaatgagcaggagtctgccgtgcacccgagggagattttcaagcagaaggagagggccatgtccaccacctccatctccagtcctcagcctggcaagctgaggagccccttcctgcagaagcagctcacccaaccagagacccactttggcagagagccagctgctgccatctcaaggcccagggcagatctccctgctgaggagccggcgcccagcactcctccatgtctggtgcaggcagaagaggaggctgtgtatgaggaacctccagagcaggagaccttctacgagcagcccccactggtgcagcagcaaggtgctggctctgagcacattgaccaccacattcagggccaggggctcagtgggcaagggctctgtgcccgtgccctgtacgactaccaggcagccgacgacacagagatctcctttgaccccgagaacctcatcacgggcatcgaggtgatcgacgaaggctggtggcgtggctatgggccggatggccattttggcatgttccctgccaactacgtggagctcattgagtgaggctgagggcacatcttgcccttcccc

SEQ ID NO: 128108 - DNA, 2068 bp, Homo sapiens
  Payload ID: 5084
  Gene Symbol: DBNL
  Gene Name: drebrin-like
  Uniprot ID: Q9UJU6
  ENST ID: ENST00000468694
  CDS Start-End: 28-1347
agcggcgcggagactgcggggcgggccatggcggcgaacctgagccggaacgggccagcgctgcaagaggcctacgtgcgggtggtcaccgagaagtccccgaccgactgggctctctttacctatgaaggcaacagcaatgacatccgcgtggctggcacaggggagggtggcctggaggagatggtggaggagctcaacagcgggaaggtgatgtacgccttctgcagagtgaaggaccccaactctggactgcccaaatttgtcctcatcaactggacaggcgagggcgtgaacgatgtgcggaagggagcctgtgccagccacgtcagcaccatggccagcttcctgaagggggcccatgtgaccatcaacgcacgggccgaggaggatgtggagcctgagtgcatcatggagaaggtggccaaggcttcaggtgccaactacagctttcacaaggagagtggccgcttccaggacgtgggaccccaggccccagtgggctctgtgtaccagaagaccaatgccgtgtctgagattaaaagggttggtaaagacagcttctgggccaaagcagagaaggaggaggagaaccgtcggctggaggaaaagcggcgggccgaggaggcacagcggcagctggagcaggagcgccgggagcgtgagctgcgtgaggctgcacgccgggagcagcgctatcaggagcagggtggcgaggccagcccccagagcaggacgtgggagcagcagcaagaagtggtttcaaggaaccgaaatgagcaggggtcaacatgtgcttccctccaggagtctgccgtgcacccgagggagattttcaagcagaaggagagggccatgtccaccacctccatctccagtcctcagcctggcaagctgaggagccccttcctgcagaagcagctcacccaaccagagacccactttggcagagagccagctgctgccatctcaaggcccagggcagatctccctgctgaggagccggcgcccagcactcctccatgtctggtgcaggcagaagaggaggctgtgtatgaggaacctccagagcaggagaccttctacgagcagcccccactggtgcagcagcaaggtgctggctctgagcacattgaccaccacattcagggccaggggctcagtgggcaagggctctgtgcccgtgccctgtacgactaccaggcagccgacgacacagagatctcctttgaccccgagaacctcatcacgggcatcgaggtgatcgacgaaggctggtggcgtggctatgggccggatggccattttggcatgttccctgccaactacgtggagctcattgagtgaggctgagggcacatcttgcccttcccctctcagacatggcttccttattgctggaagaggaggcctgggagttgacattcagcactcttccaggaataggacccccagtgaggatgaggcctcagggctccctccggcttggcagactcagcctgtcaccccaaatgcagcaatggcctggtgattcccacacatccttcctgcatcccccgaccctcccagacagcttggctcttgcccctgacaggatactgagccaagccctgcctgtggccaagccctgagtggccactgccaagctgcggggaagggtcctgagcaggggcatctgggaggctctggctgccttctgcatttatttgccttttttctttttctcttgcttctaaggggtggtggccaccactgtttagaatgacccttgggaacagtgaacgtagagaattgtttttagcagagtttgtgaccaaagtcagagtggatcatggtggtttggcagcagggaatttgtcttgttggagcctgctctgtgctccccactccatttctctgtccctctgcctgggctatgggaagtggggatgcagatggccaagctcccaccctgggtattcaaaaacggcagacacaacatgttcctccacgcggctcactcgatgcctgcaggccccagtgtgtgcctcaactgattctgacttcaggaaaagtaacacagagtggc

SEQ ID NO: 128109 - DNA, 2004 bp, Homo sapiens
  Payload ID: 5084
  Gene Symbol: DBNL
  Gene Name: drebrin-like
  Uniprot ID: Q9UJU6
  ENST ID: ENST00000490734
  CDS Start-End: 196-1206
gtttccggttgtcggaggcgaggcttgtcggctgtcaaaggggcggcccggcccggcccggaagctacagcagcggcgcggagactgcggggcgggccatggcggcgaacctgagccggaacgggccagcgctgcaagaggcctacgtgcgggtggtcaccgagaagtccccgaccgactgggctctctttacctatgaaggcaacagcaatgacatccgcgtggctggcacaggggggggcccatgtgaccatcaacgcacgggccgaggaggatgtggagcctgagtgcatcatggagaaggtggccaaggcttcaggtgccaactacagctttcacaaggagagtggccgcttccaggacgtgggaccccaggccccagtgggctctgtgtaccagaagaccaatgccgtgtctgagattaaaagggttggtaaagacagcttctgggccaaagcagagaaggaggaggagaaccgtcggctggaggaaaagcggcgggccgaggaggcacagcggcagctggagcaggagcgccgggagcgtgagctgcgtgaggctgcacgccgggagcagcgctatcaggagcagggtggcgaggccagcccccagagcaggacgtgggagcagcagcaagaagtggtttcaaggaaccgaaatgagcaggagtctgccgtgcacccgagggagattttcaagcagaaggagagggccatgtccaccacctccatctccagtcctcagcctggcaagctgaggagccccttcctgcagaagcagctcacccaaccagagacccactttggcagagagccagctgctgccatctcaaggcccagggcagatctccctgctgaggagccggcgcccagcactcctccatgtctggtgcaggcagaagaggaggctgtgtatgaggaacctccagagcaggagaccttctacgagcagcccccactggtgcagcagcaaggtgctggctctgagcacattgaccaccacattcagggccaggggctcagtgggcaagggctctgtgcccgtgccctgtacgactaccaggcagccgacgacacagagatctcctttgaccccgagaacctcatcacgggcatcgaggtgatcgacgaaggctggtggcgtggctatgggccggatggccattttggcatgttccctgccaactacgtggagctcattgagtgaggctgagggcacatcttgcccttcccctctcagacatggcttccttattgctggaagaggaggcctgggagttgacattcagcactcttccaggaataggacccccagtgaggatgaggcctcagggctccctccggcttggcagactcagcctgtcaccccaaatgcagcaatggcctggtgattcccacacatccttcctgcatcccccgaccctcccagacagcttggctcttgcccctgacaggatactgagccaagccctgcctgtggccaagccctgagtggccactgccaagctgcggggaagggtcctgagcaggggcatctgggaggctctggctgccttctgcatttatttgccttttttctttttctcttgcttctaaggggtggtggccaccactgtttagaatgacccttgggaacagtgaacgtagagaattgtttttagcagagtttgtgaccaaagtcagagtggatcatggtggtttggcagcagggaatttgtcttgttggagcctgctctgtgctccccactccatttctctgtccctctgcctgggctatgggaagtggggatgcagatggccaagctcccaccctgggtattcaaaaacggcagacacaacatgttcctccacgcggctcactcgatgcctgcaggccccagtgtgtgcctcaactgattctgacttcaggaaaagtaacacagagtggccttggcctgttgtcttcccctattttctgtcccagctcatccgtgtctctgaagaacaaatatgcttttggaccacg

SEQ ID NO: 128110 - DNA, 693 bp, Homo sapiens
  Payload ID: 5084
  Gene Symbol: DBNL
  Gene Name: drebrin-like
  ENST ID: ENST00000464762
  CDS Start-End: 37-423
agctacagcagcggcgcggagactgcggggcgggccatggcggcgaacctgagccggaacgggccagcgctgcaagaggcctacgtgcgggtggtcaccgagaagtccccgaccgactgggctctctttacctatgaaggcaacagcaatgacatccgcgtggctggcacaggggagggtggcctggaggagatggtggaggagctcaacagcgggaaggtgatgtacgccttctgcagagtgaaggaccccaactctggactgcccaaatttgtcctcatcaactggacaggcgagggcgtgaacgatgtgcggaagggagcctgtgccagccacgtcagcaccatggccagcttcctgaaggtaaggccagggggcccatgtgaccatcaacgcacgggccgaggaggatgtggagcctgagtgcatcatggagaaggtggccaaggcttcaggtgccaactacagctttcacaaggagagtggccgcttccaggacgtgggaccccaggccccagtgggctctgtgtaccagaagaccaatgccgtgtctgagattaaaagggttggtaaagacagcttctgggccaaagcagagaaggaggaggagaaccgtcggctggaggaaaagcggcgggccgaggaggcacagcggcagctggagcaggagcgccgggagcgtgagctgcgtga

SEQ ID NO: 128111 - DNA, 553 bp, Homo sapiens
  Payload ID: 5084
  Gene Symbol: DBNL
  Gene Name: drebrin-like
  ENST ID: ENST00000485932
  CDS Start-End: 33-155
acagcagcggcgcggagactgcggggcgggccatggcggcgaacctgagccggaacgggccagcgctgcaagaggcctacgtgcgggtggtcaccgagaagtccccgaccgactggtgggcggcgagacgggccaggggctctctttacctatgaaggcaacagcaatgacatccgcgtggctggcacaggggggggcccatgtgaccatcaacgcacgggccgaggaggatgtggagcctgagtgcatcatggagaaggtggccaaggcttcaggtgccaactacagctttcacaaggagagtggccgcttccaggacgtgggaccccaggccccagtgggctctgtgtaccagaagaccaatgccgtgtctgagattaaaagggttggtaaagacagcttctgggccaaagcagagaaggaggaggagaaccgtcggctggaggaaaagcggcgggccgaggaggcacagcggcagctggagcaggagcgccgggagcgtgagctgcgtgaggctgcacgccgggagcagcgctatcaggagcagggtggc

SEQ ID NO: 128112 - DNA, 1401 bp, Homo sapiens
  Payload ID: 5084
  Gene Symbol: DBNL
  Gene Name: drebrin-like
  ENST ID: ENST00000498733
  CDS Start-End: 37-183
agctacagcagcggcgcggagactgcggggcgggccatggcggcgaacctgagccggaacgggccagcgctgcaagaggcctacgtgcgggtggtcaccgagaagtccccgaccgactggtgggcggcgagacgggccagggtcgggccaggggctgcctcagggggctctctttacctatgaaggcaacagcaatgacatccgcgtggctggcacaggggagggtggcctggaggagatggtggaggagctcaacagcgggaaggtgatgtacgccttctgcagagtgaaggaccccaactctggactgcccaaatttgtcctcatcaactggacaggcgagggcgtgaacgatgtgcggaagggagcctgtgccagccacgtcagcaccatggccagcttcctgaagggggcccatgtgaccatcaacgcacgggccgaggaggatgtggagcctgagtgcatcatggagaaggtggccaaggcttcaggtgccaactacagctttcacaaggagagtggccgcttccaggacgtgggaccccaggccccagtgggctctgtgtaccagaagaccaatgccgtgtctgagattaaaagggttggtaaagacagcttctgggccaaagcagagaaggaggaggagaaccgtcggctggaggaaaagcggcgggccgaggaggcacagcggcagctggagcaggagcgccgggagcgtgagctgcgtgaggctgcacgccgggagcagcgctatcaggagcagggtggcgaggccagcccccagagcaggacgtgggagcagcagcaagaagtggtttcaaggaaccgaaatgagcaggagtctgccgtgcacccgagggagattttcaagcagaaggagagggccatgtccaccacctccatctccagtcctcagcctggcaagctgaggagccccttcctgcagaagcagctcacccaaccagagacccactttggcagagagccagctgctgccatctcaaggcccagggcagatctccctgctgaggagccggcgcccagcactcctccatgtctggtgcaggcagaagaggaggctgtgtatgaggaacctccagagcaggagaccttctacgagcagcccccactggtgcagcagcaaggtgctggctctgagcacattgaccaccacattcagggccaggggctcagtgggcaagggctctgtgcccgtgccctgtacgactaccaggcagccgacgacacagagatctcctttgaccccgagaacctcatcacgggcatcgaggtgatcgacgaaggctggtggcgtggctatgggccggatggccattttggcatgttccctgccaactacgtggagctcattgagtgaggctgagggcacatcttgccctt

SEQ ID NO: 128113 - DNA, 2117 bp, Homo sapiens
  Payload ID: 5084
  Gene Symbol: DBNL
  Gene Name: drebrin-like
  Uniprot ID: Q9UJU6
  ENST ID: ENST00000494774
  CDS Start-End: 22-1317
gcggagactgcggggcgggccatggcggcgaacctgagccggaacgggccagcgctgcaagaggcctacgtgcgggtggtcaccgagaagtccccgaccgactgggctctctttacctatgaaggcaacagcaatgacatccgcgtggctggcacaggggagggtggcctggaggagatggtggaggagctcaacagcgggaaggtgatgtacgccttctgcagagtgaaggaccccaactctggactgcccaaatttgtcctcatcaactggacaggcgagggcgtgaacgatgtgcggaagggagcctgtgccagccacgtcagcaccatggccagcttcctgaagggggcccatgtgaccatcaacgcacgggccgaggaggatgtggagcctgagtgcatcatggagaaggtggccaaggcttcaggtgccaactacagctttcacaaggagagtggccgcttccaggacgtgggaccccaggccccagtgggctctgtgtaccagaagaccaatgccgtgtctgagattaaaagggttggtaaagacagcttctgggccaaagcagagaaggaggaggagaaccgtcggctggaggaaaagcggcgggccgaggaggcacagcggcagctggagcaggagcgccgggagcgtgagctgcgtgaggctgcacgccgggagcagcgctatcaggagcagggtggcgaggccagcccccagagcaggacgtgggagcagcagcaagaagtggtttcaaggaaccgaaatgagcaggagtctgccgtgcacccgagggagattttcaagcagaaggagagggccatgtccaccacctccatctccagtcctcagcctggcaagctgaggagccccttcctgcagaagcagctcacccaaccagagacccactttggcagagagccagctgctgccatctcaaggcccagggcagatctccctgctgaggagccggcgcccagcactcctccatgtctggtgcaggcagaagaggaggctgtgtatgaggaacctccagagcaggagaccttctacgagcagcccccactggtgcagcagcaaggtgctggctctgagcacattgaccaccacattcagggccaggggctcagtgggcaagggctctgtgcccgtgccctgtacgactaccaggcagccgacgacacagagatctcctttgaccccgagaacctcatcacgggcatcgaggtgatcgacgaaggctggtggcgtggctatgggccggatggccattttggcatgttccctgccaactacgtggagctcattgagtgaggctgagggcacatcttgcccttcccctctcagacatggcttccttattgctggaagaggaggcctgggagttgacattcagcactcttccaggaataggacccccagtgaggatgaggcctcagggctccctccggcttggcagactcagcctgtcaccccaaatgcagcaatggcctggtgattcccacacatccttcctgcatcccccgaccctcccagacagcttggctcttgcccctgacaggatactgagccaagccctgcctgtggccaagccctgagtggccactgccaagctgcggggaagggtcctgagcaggggcatctgggaggctctggctgccttctgcatttatttgccttttttctttttctcttgcttctaaggggtggtggccaccactgtttagaatgacccttgggaacagtgaacgtagagaattgtttttagcagagtttgtgaccaaagtcagagtggatcatggtggtttggcagcagggaatttgtcttgttggagcctgctctgtgctccccactccatttctctgtccctctgcctgggctatgggaagtggggatgcagatggccaagctcccaccctgggtattcaaaaacggcagacacaacatgttcctccacgcggctcactcgatgcctgcaggccccagtgtgtgcctcaactgattctgacttcaggaaaagtaacacagagtggccttggcctgttgtcttcccctattttctgtcccagctcatccgtgtctctgaagaacaaatatgcttttggaccacgaa

SEQ ID NO: 128114 - DNA, 5102 bp, Homo sapiens
  Payload ID: 5085
  Gene Symbol: DROSHA
  Gene Name: drosha, ribonuclease type III
  Uniprot ID: Q9NRR4
  ENST ID: ENST00000344624
  CDS Start-End: 48-4172
gagcttatattctctgtggaagatgtgacatatccaggcggaacatcatgatgcagggaaacacatgtcacagaatgtcgttccacccgggacgagggtgtccccgaggacgaggaggacatggagccagaccctcagcaccatcctttaggccccaaaatctgaggctgcttcaccctcagcagcctcctgtgcaatatcaatatgaacctccaagtgccccttccaccactttctcaaactctccagcccccaattttctccctccacgaccagactttgtacccttccccccacccatgcctccgtcagcgcaaggccctcttcccccctgcccaatcaggccgcctttccccaaccaccagatgaggcaccccttcccagttcctccttgttttcctcccatgccaccaccaatgccttgtcctaataaccccccagtccctggggcacctcctggacaaggcactttccccttcatgatgccccctccctccatgcctcatcccccgccccctccagtcatgccgcagcaggttaattatcagtaccctccgggctattctcaccacaacttcccacctcccagttttaatagtttccagaacaaccctagttctttcctgcccagtgctaataacagcagtagtcctcatttcagacatctccctccatacccactcccaaaggctcccagtgagagaaggtccccagaaaggctgaaacactatgatgaccacaggcaccgagatcacagtcatgggcgaggtgagaggcatcggtccctggatcggcgggagcgaggccgcagtcccgacaggagaagacaagacagccggtacagatctgattatgaccgagggagaacaccatctcgccaccgcagctacgaacggagcagagagcgagaacgggagagacacaggcatcgagacaaccgaagatcaccatctctggaaaggtcctacaaaaaagagtataagagatctggaaggagttacggtttatcggttgttcctgaacctgctggatgcacaccagaattacctggggagattattaaaaatacagattcttgggccccacccctggagattgtgaatcatcgctccccaagtagggagaagaagagagctcgttgggaggaagaaaaagaccgttggagtgacaaccagagttctggcaaagacaagaactatacctcaatcaaggaaaaagagcccgaggagaccatgcctgacaagaatgaggaggaagaagaagaacttcttaagcctgtgtggattcgatgcactcattcagaaaactactactccagtgaccccatggatcaggtgggagattctacagtggttggaacgagtaggcttcgtgacttatatgacaaatttgaggaggagttggggagcaggcaagaaaaggccaaagctgctcggcctccgtgggaacctccaaagacgaagctcgatgaagatttagagagttccagtgaatccgagtgtgagtctgatgaggacagcacctgttctagcagctcagactctgaagtttttgacgttattgcagaaatcaaacgcaaaaaggcccaccctgaccgacttcatgatgaactttggtacaacgatccaggccagatgaatgatggaccactctgcaaatgcagcgcaaaggcaagacgcacaggaattaggcacagcatttatcctggagaagaggccatcaagccctgtcgtcctatgaccaacaatgctggcagacttttccactaccggatcacagtctccccgcctacgaactttttaactgacaggccaactgttatagaatacgatgatcacgagtatatctttgaaggattttctatgtttgcacatgcccccctgaccaatattccactgtgtaaagtaattagattcaacatagactacacgattcatttcattgaagagatgatgccggagaatttttgtgtgaaagggcttgaactcttttcactgttcctattcagagatattttggaattatatgactggaatcttaaaggtcctttgtttgaagacagccctccctgctgcccaagatttcatttcatgccacgttttgtaagatttcttccagatggaggaaaggaagtgctgtccatgcaccagattctcctgtacttgttaaggtgcagcaaagccctggtgcctgaggaggagattgccaatatgcttcagtgggaggagctggagtggcagaaatatgcagaagaatgcaaaggcatgattgttaccaaccctgggacgaaaccaagctctgtccgtatcgatcaactggatcgtgaacagttcaaccccgatgtgattacttttccgattatcgtccactttgggatacgccctgcacagttgagttatgcaggagacccacagtaccaaaaactgtggaagagttatgtgaaacttcgccacctcctagcaaatagtcccaaagtcaaacaaactgacaaacagaagctggcacagagggaggaagccctccaaaaaatacggcagaagaatacaatgagacgagaagtaacggtggagctaagtagccaaggattctggaaaactggcatccgttctgatgtctgtcagcatgcaatgatgctacctgttctgacccatcatatccgctaccaccaatgcctaatgcatttggacaagttgataggatatactttccaagatcgttgtctgttgcagctggccatgactcatccaagtcatcatttaaattttggaatgaatcctgatcatgccaggaattcattatctaactgtggaattcggcagcccaaatacggagacagaaaagttcatcacatgcacatgcggaagaaagggattaacaccttgataaatatcatgtcacgccttggccaagatgacccaactccctcgaggattaaccacaatgaacggttggaattcctgggtgatgctgttgttgaatttctgaccagcgtccatttgtactatttgtttcctagtctggaagaaggaggattagcaacctatcggactgccattgttcagaatcagcaccttgccatgctagcaaagaaacttgaactggatcgatttatgctgtatgctcacgggcctgacctttgtagagaatcggaccttcgacatgcaatggccaattgttttgaagcgttaataggagctgtttacttggagggaagcctggaggaagccaagcagttatttggacgcttgctctttaatgatccggacctgcgcgaagtctggctcaattatcctctccacccactccaactacaagagccaaatactgatcgacaacttattgaaacttctccagttctacaaaaacttactgagtttgaagaagcaattggagtaatttttactcatgttcgacttctggcaagggcattcacattgagaactgtgggatttaaccatctgaccctaggccacaatcagagaatggaattcctaggtgactccataatgcaactggtagccacagagtacttattcattcatttcccagatcatcatgaaggacacttaactttgttgcgaagctctttggtgaataatagaactcaggccaaggtagcggaggagctgggcatgcaggagtacgccataaccaacgacaagaccaagaggcctgtggcgcttcgcaccaagaccttggcggaccttttggaatcatttattgcagcgctgtacattgataaggatttggaatatgttcatactttcatgaatgtctgcttctttccacgattgaaagagttcattttgaatcaggattggaatgaccccaaatcccagcttcagcagtgttgcttgacacttaggacagaaggaaaagagccagacattcctctgtacaagactctgcagacagtgggcccatcccatgcccgaacctacactgtggctgtttatttcaagggagaaagaataggctgtgggaaaggaccaagtattcagcaagcggaaatgggagcagcaatggatgcgcttgaaaaatataattttccccagatggcccatcagaagcggttcatcgaacggaagtacagacaagagttaaaagaaatgaggtgggaaagagagcatcaagagagagagccagatgagactgaagacatcaagaaataaaggagggcatgcaagtgtggagtatttacttgctcagtaactgtgactgttgtctattgagacctagcctagttttcctgcagacaatgaatgaagtgtgctcattgaaataaaatacagagtcaaatcgctattgttgttttaatgatctgtttttagctggatggtctttattacaaagtattagatttttcttctatttaacggaaaacttgactttggtgaatgtgcattacttccttttattttgctctttaaataataaaattcaagaagcatattctatgtggaatagatcctgtttttccatctgtgtcccagattgtgaccctagactttcaattgacaagtaaaaaattgactttactagacattttgactgtgctctagtaacatctatcctttttcaaatctctggatttttaagtagattgttcagctttcatccggtggctgttcatcaagttatcagctgcaaatattgaacttacctctctctaagcagtgagtgttttgtagaaggaatccgtttaacaattaattggctaatgggagaaggggaaagactgatattcaagtcatacagattctttgaatcattagaataggagagaaatcatgattctaagccaggccacactttaaaccaagtgctctcaccctggggttagtggaacctttaagaagttaatgaacagacttcaaggaagtcaaaaacctcccaatactatattcaattttctgtgtgtgtttgagatttgagagggcatggggagcaggaaggaggagggtttatagcttttatcagcctctctaagtgggccctgcagtaaaaggctaacatgacattcaaagacataacattttaaaaaaagttattccaaactaaacatcactggtttcttattaataaaggcaaaacttctttgt

SEQ ID NO: 128115 - DNA, 4991 bp, Homo sapiens
  Payload ID: 5085
  Gene Symbol: DROSHA
  Gene Name: drosha, ribonuclease type III
  Uniprot ID: Q9NRR4
  ENST ID: ENST00000442743
  CDS Start-End: 48-4061
gagcttatattctctgtggaagatgtgacatatccaggcggaacatcatgatgcagggaaacacatgtcacagaatgtcgttccacccgggacgagggtgtccccgaggacgaggaggacatggagccagaccctcagcaccatcctttaggccccaaaatctgaggctgcttcaccctcagcagcctcctgtgcaatatcaatatgaacctccaagtgccccttccaccactttctcaaactctccagcccccaattttctccctccacgaccagactttgtacccttccccccacccatgcctccgtcagcgcaaggccctcttcccccctgcccaatcaggccgcctttccccaaccaccagatgaggcaccccttcccagttcctccttgttttcctcccatgccaccaccaatgccttgtcctaataaccccccagtccctggggcacctcctggacaaggcactttccccttcatgatgccccctccctccatgcctcatcccccgccccctccagtcatgccgcagcaggttaattatcagtaccctccgggctattctcaccacaacttcccacctcccagttttaatagtttccagaacaaccctagttctttcctgcccagtgctaataacagcagtagtcctcatttcagacatctccctccatacccactcccaaaggctcccagtgagagaaggtccccagaaaggctgaaacactatgatgaccacaggcaccgagatcacagtcatgggcgaggtgagaggcatcggtccctggatcggcgggagcgaggccgcagtcccgacaggagaagacaagacagccggtacagatctgattatgaccgagggagaacaccatctcgccaccgcagctacgaacggagcagagagcgagaacgggagagacacaggcatcgagacaaccgaagatcaccatctctggaaaggtcctacaaaaaagagtataagagatctggaagtcgctccccaagtagggagaagaagagagctcgttgggaggaagaaaaagaccgttggagtgacaaccagagttctggcaaagacaagaactatacctcaatcaaggaaaaagagcccgaggagaccatgcctgacaagaatgaggaggaagaagaagaacttcttaagcctgtgtggattcgatgcactcattcagaaaactactactccagtgaccccatggatcaggtgggagattctacagtggttggaacgagtaggcttcgtgacttatatgacaaatttgaggaggagttggggagcaggcaagaaaaggccaaagctgctcggcctccgtgggaacctccaaagacgaagctcgatgaagatttagagagttccagtgaatccgagtgtgagtctgatgaggacagcacctgttctagcagctcagactctgaagtttttgacgttattgcagaaatcaaacgcaaaaaggcccaccctgaccgacttcatgatgaactttggtacaacgatccaggccagatgaatgatggaccactctgcaaatgcagcgcaaaggcaagacgcacaggaattaggcacagcatttatcctggagaagaggccatcaagccctgtcgtcctatgaccaacaatgctggcagacttttccactaccggatcacagtctccccgcctacgaactttttaactgacaggccaactgttatagaatacgatgatcacgagtatatctttgaaggattttctatgtttgcacatgcccccctgaccaatattccactgtgtaaagtaattagattcaacatagactacacgattcatttcattgaagagatgatgccggagaatttttgtgtgaaagggcttgaactcttttcactgttcctattcagagatattttggaattatatgactggaatcttaaaggtcctttgtttgaagacagccctccctgctgcccaagatttcatttcatgccacgttttgtaagatttcttccagatggaggaaaggaagtgctgtccatgcaccagattctcctgtacttgttaaggtgcagcaaagccctggtgcctgaggaggagattgccaatatgcttcagtgggaggagctggagtggcagaaatatgcagaagaatgcaaaggcatgattgttaccaaccctgggacgaaaccaagctctgtccgtatcgatcaactggatcgtgaacagttcaaccccgatgtgattacttttccgattatcgtccactttgggatacgccctgcacagttgagttatgcaggagacccacagtaccaaaaactgtggaagagttatgtgaaacttcgccacctcctagcaaatagtcccaaagtcaaacaaactgacaaacagaagctggcacagagggaggaagccctccaaaaaatacggcagaagaatacaatgagacgagaagtaacggtggagctaagtagccaaggattctggaaaactggcatccgttctgatgtctgtcagcatgcaatgatgctacctgttctgacccatcatatccgctaccaccaatgcctaatgcatttggacaagttgataggatatactttccaagatcgttgtctgttgcagctggccatgactcatccaagtcatcatttaaattttggaatgaatcctgatcatgccaggaattcattatctaactgtggaattcggcagcccaaatacggagacagaaaagttcatcacatgcacatgcggaagaaagggattaacaccttgataaatatcatgtcacgccttggccaagatgacccaactccctcgaggattaaccacaatgaacggttggaattcctgggtgatgctgttgttgaatttctgaccagcgtccatttgtactatttgtttcctagtctggaagaaggaggattagcaacctatcggactgccattgttcagaatcagcaccttgccatgctagcaaagaaacttgaactggatcgatttatgctgtatgctcacgggcctgacctttgtagagaatcggaccttcgacatgcaatggccaattgttttgaagcgttaataggagctgtttacttggagggaagcctggaggaagccaagcagttatttggacgcttgctctttaatgatccggacctgcgcgaagtctggctcaattatcctctccacccactccaactacaagagccaaatactgatcgacaacttattgaaacttctccagttctacaaaaacttactgagtttgaagaagcaattggagtaatttttactcatgttcgacttctggcaagggcattcacattgagaactgtgggatttaaccatctgaccctaggccacaatcagagaatggaattcctaggtgactccataatgcaactggtagccacagagtacttattcattcatttcccagatcatcatgaaggacacttaactttgttgcgaagctctttggtgaataatagaactcaggccaaggtagcggaggagctgggcatgcaggagtacgccataaccaacgacaagaccaagaggcctgtggcgcttcgcaccaagaccttggcggaccttttggaatcatttattgcagcgctgtacattgataaggatttggaatatgttcatactttcatgaatgtctgcttctttccacgattgaaagagttcattttgaatcaggattggaatgaccccaaatcccagcttcagcagtgttgcttgacacttaggacagaaggaaaagagccagacattcctctgtacaagactctgcagacagtgggcccatcccatgcccgaacctacactgtggctgtttatttcaagggagaaagaataggctgtgggaaaggaccaagtattcagcaagcggaaatgggagcagcaatggatgcgcttgaaaaatataattttccccagatggcccatcagaagcggttcatcgaacggaagtacagacaagagttaaaagaaatgaggtgggaaagagagcatcaagagagagagccagatgagactgaagacatcaagaaataaaggagggcatgcaagtgtggagtatttacttgctcagtaactgtgactgttgtctattgagacctagcctagttttcctgcagacaatgaatgaagtgtgctcattgaaataaaatacagagtcaaatcgctattgttgttttaatgatctgtttttagctggatggtctttattacaaagtattagatttttcttctatttaacggaaaacttgactttggtgaatgtgcattacttccttttattttgctctttaaataataaaattcaagaagcatattctatgtggaatagatcctgtttttccatctgtgtcccagattgtgaccctagactttcaattgacaagtaaaaaattgactttactagacattttgactgtgctctagtaacatctatcctttttcaaatctctggatttttaagtagattgttcagctttcatccggtggctgttcatcaagttatcagctgcaaatattgaacttacctctctctaagcagtgagtgttttgtagaaggaatccgtttaacaattaattggctaatgggagaaggggaaagactgatattcaagtcatacagattctttgaatcattagaataggagagaaatcatgattctaagccaggccacactttaaaccaagtgctctcaccctggggttagtggaacctttaagaagttaatgaacagacttcaaggaagtcaaaaacctcccaatactatattcaattttctgtgtgtgtttgagatttgagagggcatggggagcaggaaggaggagggtttatagcttttatcagcctctctaagtgggccctgcagtaaaaggctaacatgacattcaaagacataacattttaaaaaaagttattccaaactaaacatcactggtttcttattaataaaggcaaaacttctttgt

SEQ ID NO: 128116 - DNA, 1124 bp, Homo sapiens
  Payload ID: 5085
  Gene Symbol: DROSHA
  Gene Name: drosha, ribonuclease type III
  ENST ID: ENST00000512076
  CDS Start-End: 1-1124
ctattctcaccacaacttcccacctcccagttttaatagtttccagaacaaccctagttctttcctgcccagtgctaataacagcagtagtcctcatttcagacatctccctccatacccactcccaaaggctcccagtgagagaaggtccccagaaaggctgaaacactatgatgaccacaggcaccgagatcacagtcatgggcgaggtgagaggcatcggtccctggatcggcgggagcgaggccgcagtcccgacaggagaagacaagacagccggtacagatctgattatgaccgagggagaacaccatctcgccaccgcagctacgaacggagcagtcgctccccaagtagggagaagaagagagctcgttgggaggaagaaaaagaccgttggagtgacaaccagagttctggcaaagacaagaactatacctcaatcaaggaaaaagagcccgaggagaccatgcctgacaagaatgaggaggaagaagaagaacttcttaagcctgtgtggattcgatgcactcattcagaaaactactactccagtgaccccatggatcaggtgggagattctacagtggttggaacgagtaggcttcgtgacttatatgacaaatttgaggaggagttggggagcaggcaagaaaaggccaaagctgctcggcctccgtgggaacctccaaagacgaagctcgatgaagatttagagagttccagtgaatccgagtgtgagtctgatgaggacagcacctgttctagcagctcagactctgaagtttttgacgttattgcagaaatcaaacgcaaaaaggcccaccctgaccgacttcatgatgaactttggtacaacgatccaggccagatgaatgatggaccactctgcaaatgcagcgcaaaggcaagacgcacaggaattaggcacagcatttatcctggagaagaggccatcaagccctgtcgtcctatgaccaacaatgctggcagacttttccactaccggatcacagtctccccgcctacgaactttttaactgacaggccaactgttatagaatacgatgatcacgagtatatctttgaaggattttctatgtttgcacatgcccccctgacca

SEQ ID NO: 128117 - DNA, 4681 bp, Homo sapiens
  Payload ID: 5085
  Gene Symbol: DROSHA
  Gene Name: drosha, ribonuclease type III
  Uniprot ID: Q9NRR4
  ENST ID: ENST00000513349
  CDS Start-End: 370-4383
gctttttaattccctcggtttcctgttccggaggcgcgggcggtgccactgtcttggtacctgcggtagtagcctggctttgctctgacggcgatctcgcggcccgagagccttttatagacagctccttcagtgtctctgtttccaaaccgcaaccgagaagagacagacggagaaaagagagttacttttccaggttgcttttcccggggatgtgaaggatacagaaatgactgtgaatcaacccatatcatcaaggagctgataatctagtggaagagttagacgtgtgcatacttcactatgatatgaggcagtctctgagcttatattctctgtggaagatgtgacatatccaggcggaacatcatgatgcagggaaacacatgtcacagaatgtcgttccacccgggacgagggtgtccccgaggacgaggaggacatggagccagaccctcagcaccatcctttaggccccaaaatctgaggctgcttcaccctcagcagcctcctgtgcaatatcaatatgaacctccaagtgccccttccaccactttctcaaactctccagcccccaattttctccctccacgaccagactttgtacccttccccccacccatgcctccgtcagcgcaaggccctcttcccccctgcccaatcaggccgcctttccccaaccaccagatgaggcaccccttcccagttcctccttgttttcctcccatgccaccaccaatgccttgtcctaataaccccccagtccctggggcacctcctggacaaggcactttccccttcatgatgccccctccctccatgcctcatcccccgccccctccagtcatgccgcagcaggttaattatcagtaccctccgggctattctcaccacaacttcccacctcccagttttaatagtttccagaacaaccctagttctttcctgcccagtgctaataacagcagtagtcctcatttcagacatctccctccatacccactcccaaaggctcccagtgagagaaggtccccagaaaggctgaaacactatgatgaccacaggcaccgagatcacagtcatgggcgaggtgagaggcatcggtccctggatcggcgggagcgaggccgcagtcccgacaggagaagacaagacagccggtacagatctgattatgaccgagggagaacaccatctcgccaccgcagctacgaacggagcagagagcgagaacgggagagacacaggcatcgagacaaccgaagatcaccatctctggaaaggtcctacaaaaaagagtataagagatctggaagtcgctccccaagtagggagaagaagagagctcgttgggaggaagaaaaagaccgttggagtgacaaccagagttctggcaaagacaagaactatacctcaatcaaggaaaaagagcccgaggagaccatgcctgacaagaatgaggaggaagaagaagaacttcttaagcctgtgtggattcgatgcactcattcagaaaactactactccagtgaccccatggatcaggtgggagattctacagtggttggaacgagtaggcttcgtgacttatatgacaaatttgaggaggagttggggagcaggcaagaaaaggccaaagctgctcggcctccgtgggaacctccaaagacgaagctcgatgaagatttagagagttccagtgaatccgagtgtgagtctgatgaggacagcacctgttctagcagctcagactctgaagtttttgacgttattgcagaaatcaaacgcaaaaaggcccaccctgaccgacttcatgatgaactttggtacaacgatccaggccagatgaatgatggaccactctgcaaatgcagcgcaaaggcaagacgcacaggaattaggcacagcatttatcctggagaagaggccatcaagccctgtcgtcctatgaccaacaatgctggcagacttttccactaccggatcacagtctccccgcctacgaactttttaactgacaggccaactgttatagaatacgatgatcacgagtatatctttgaaggattttctatgtttgcacatgcccccctgaccaatattccactgtgtaaagtaattagattcaacatagactacacgattcatttcattgaagagatgatgccggagaatttttgtgtgaaagggcttgaactcttttcactgttcctattcagagatattttggaattatatgactggaatcttaaaggtcctttgtttgaagacagccctccctgctgcccaagatttcatttcatgccacgttttgtaagatttcttccagatggaggaaaggaagtgctgtccatgcaccagattctcctgtacttgttaaggtgcagcaaagccctggtgcctgaggaggagattgccaatatgcttcagtgggaggagctggagtggcagaaatatgcagaagaatgcaaaggcatgattgttaccaaccctgggacgaaaccaagctctgtccgtatcgatcaactggatcgtgaacagttcaaccccgatgtgattacttttccgattatcgtccactttgggatacgccctgcacagttgagttatgcaggagacccacagtaccaaaaactgtggaagagttatgtgaaacttcgccacctcctagcaaatagtcccaaagtcaaacaaactgacaaacagaagctggcacagagggaggaagccctccaaaaaatacggcagaagaatacaatgagacgagaagtaacggtggagctaagtagccaaggattctggaaaactggcatccgttctgatgtctgtcagcatgcaatgatgctacctgttctgacccatcatatccgctaccaccaatgcctaatgcatttggacaagttgataggatatactttccaagatcgttgtctgttgcagctggccatgactcatccaagtcatcatttaaattttggaatgaatcctgatcatgccaggaattcattatctaactgtggaattcggcagcccaaatacggagacagaaaagttcatcacatgcacatgcggaagaaagggattaacaccttgataaatatcatgtcacgccttggccaagatgacccaactccctcgaggattaaccacaatgaacggttggaattcctgggtgatgctgttgttgaatttctgaccagcgtccatttgtactatttgtttcctagtctggaagaaggaggattagcaacctatcggactgccattgttcagaatcagcaccttgccatgctagcaaagaaacttgaactggatcgatttatgctgtatgctcacgggcctgacctttgtagagaatcggaccttcgacatgcaatggccaattgttttgaagcgttaataggagctgtttacttggagggaagcctggaggaagccaagcagttatttggacgcttgctctttaatgatccggacctgcgcgaagtctggctcaattatcctctccacccactccaactacaagagccaaatactgatcgacaacttattgaaacttctccagttctacaaaaacttactgagtttgaagaagcaattggagtaatttttactcatgttcgacttctggcaagggcattcacattgagaactgtgggatttaaccatctgaccctaggccacaatcagagaatggaattcctaggtgactccataatgcaactggtagccacagagtacttattcattcatttcccagatcatcatgaaggacacttaactttgttgcgaagctctttggtgaataatagaactcaggccaaggtagcggaggagctgggcatgcaggagtacgccataaccaacgacaagaccaagaggcctgtggcgcttcgcaccaagaccttggcggaccttttggaatcatttattgcagcgctgtacattgataaggatttggaatatgttcatactttcatgaatgtctgcttctttccacgattgaaagagttcattttgaatcaggattggaatgaccccaaatcccagcttcagcagtgttgcttgacacttaggacagaaggaaaagagccagacattcctctgtacaagactctgcagacagtgggcccatcccatgcccgaacctacactgtggctgtttatttcaagggagaaagaataggctgtgggaaaggaccaagtattcagcaagcggaaatgggagcagcaatggatgcgcttgaaaaatataattttccccagatggcccatcagaagcggttcatcgaacggaagtacagacaagagttaaaagaaatgaggtgggaaagagagcatcaagagagagagccagatgagactgaagacatcaagaaataaaggagggcatgcaagtgtggagtatttacttgctcagtaactgtgactgttgtctattgagacctagcctagttttcctgcagacaatgaatgaagtgtgctcattgaaataaaatacagagtcaaatcgctattgttgttttaatgatctgtttttagctggatggtctttattacaaagtattagatttttcttctatttaacggaaaacttgactttggtgaatgtgcattacttccttttattttgctctttaaataataaaattcaagaagcatattctatgtggaatagatc

SEQ ID NO: 128118 - DNA, 5305 bp, Homo sapiens
  Payload ID: 5085
  Gene Symbol: DROSHA
  Gene Name: drosha, ribonuclease type III
  Uniprot ID: Q9NRR4
  ENST ID: ENST00000511367
  CDS Start-End: 246-4370
ctgtcttggtacctgcggtagtagcctggctttgctctgacggcgatctcgcggcccgagagccttttataggttgcttttcccggggatgtgaaggatacagaaatgactgtgaatcaacccatatcatcaaggagctgataatctagtggaagagttagacgtgtgcatacttcactatgatatgaggcagtctctgagcttatattctctgtggaagatgtgacatatccaggcggaacatcatgatgcagggaaacacatgtcacagaatgtcgttccacccgggacgagggtgtccccgaggacgaggaggacatggagccagaccctcagcaccatcctttaggccccaaaatctgaggctgcttcaccctcagcagcctcctgtgcaatatcaatatgaacctccaagtgccccttccaccactttctcaaactctccagcccccaattttctccctccacgaccagactttgtacccttccccccacccatgcctccgtcagcgcaaggccctcttcccccctgcccaatcaggccgcctttccccaaccaccagatgaggcaccccttcccagttcctccttgttttcctcccatgccaccaccaatgccttgtcctaataaccccccagtccctggggcacctcctggacaaggcactttccccttcatgatgccccctccctccatgcctcatcccccgccccctccagtcatgccgcagcaggttaattatcagtaccctccgggctattctcaccacaacttcccacctcccagttttaatagtttccagaacaaccctagttctttcctgcccagtgctaataacagcagtagtcctcatttcagacatctccctccatacccactcccaaaggctcccagtgagagaaggtccccagaaaggctgaaacactatgatgaccacaggcaccgagatcacagtcatgggcgaggtgagaggcatcggtccctggatcggcgggagcgaggccgcagtcccgacaggagaagacaagacagccggtacagatctgattatgaccgagggagaacaccatctcgccaccgcagctacgaacggagcagagagcgagaacgggagagacacaggcatcgagacaaccgaagatcaccatctctggaaaggtcctacaaaaaagagtataagagatctggaaggagttacggtttatcggttgttcctgaacctgctggatgcacaccagaattacctggggagattattaaaaatacagattcttgggccccacccctggagattgtgaatcatcgctccccaagtagggagaagaagagagctcgttgggaggaagaaaaagaccgttggagtgacaaccagagttctggcaaagacaagaactatacctcaatcaaggaaaaagagcccgaggagaccatgcctgacaagaatgaggaggaagaagaagaacttcttaagcctgtgtggattcgatgcactcattcagaaaactactactccagtgaccccatggatcaggtgggagattctacagtggttggaacgagtaggcttcgtgacttatatgacaaatttgaggaggagttggggagcaggcaagaaaaggccaaagctgctcggcctccgtgggaacctccaaagacgaagctcgatgaagatttagagagttccagtgaatccgagtgtgagtctgatgaggacagcacctgttctagcagctcagactctgaagtttttgacgttattgcagaaatcaaacgcaaaaaggcccaccctgaccgacttcatgatgaactttggtacaacgatccaggccagatgaatgatggaccactctgcaaatgcagcgcaaaggcaagacgcacaggaattaggcacagcatttatcctggagaagaggccatcaagccctgtcgtcctatgaccaacaatgctggcagacttttccactaccggatcacagtctccccgcctacgaactttttaactgacaggccaactgttatagaatacgatgatcacgagtatatctttgaaggattttctatgtttgcacatgcccccctgaccaatattccactgtgtaaagtaattagattcaacatagactacacgattcatttcattgaagagatgatgccggagaatttttgtgtgaaagggcttgaactcttttcactgttcctattcagagatattttggaattatatgactggaatcttaaaggtcctttgtttgaagacagccctccctgctgcccaagatttcatttcatgccacgttttgtaagatttcttccagatggaggaaaggaagtgctgtccatgcaccagattctcctgtacttgttaaggtgcagcaaagccctggtgcctgaggaggagattgccaatatgcttcagtgggaggagctggagtggcagaaatatgcagaagaatgcaaaggcatgattgttaccaaccctgggacgaaaccaagctctgtccgtatcgatcaactggatcgtgaacagttcaaccccgatgtgattacttttccgattatcgtccactttgggatacgccctgcacagttgagttatgcaggagacccacagtaccaaaaactgtggaagagttatgtgaaacttcgccacctcctagcaaatagtcccaaagtcaaacaaactgacaaacagaagctggcacagagggaggaagccctccaaaaaatacggcagaagaatacaatgagacgagaagtaacggtggagctaagtagccaaggattctggaaaactggcatccgttctgatgtctgtcagcatgcaatgatgctacctgttctgacccatcatatccgctaccaccaatgcctaatgcatttggacaagttgataggatatactttccaagatcgttgtctgttgcagctggccatgactcatccaagtcatcatttaaattttggaatgaatcctgatcatgccaggaattcattatctaactgtggaattcggcagcccaaatacggagacagaaaagttcatcacatgcacatgcggaagaaagggattaacaccttgataaatatcatgtcacgccttggccaagatgacccaactccctcgaggattaaccacaatgaacggttggaattcctgggtgatgctgttgttgaatttctgaccagcgtccatttgtactatttgtttcctagtctggaagaaggaggattagcaacctatcggactgccattgttcagaatcagcaccttgccatgctagcaaagaaacttgaactggatcgatttatgctgtatgctcacgggcctgacctttgtagagaatcggaccttcgacatgcaatggccaattgttttgaagcgttaataggagctgtttacttggagggaagcctggaggaagccaagcagttatttggacgcttgctctttaatgatccggacctgcgcgaagtctggctcaattatcctctccacccactccaactacaagagccaaatactgatcgacaacttattgaaacttctccagttctacaaaaacttactgagtttgaagaagcaattggagtaatttttactcatgttcgacttctggcaagggcattcacattgagaactgtgggatttaaccatctgaccctaggccacaatcagagaatggaattcctaggtgactccataatgcaactggtagccacagagtacttattcattcatttcccagatcatcatgaaggacacttaactttgttgcgaagctctttggtgaataatagaactcaggccaaggtagcggaggagctgggcatgcaggagtacgccataaccaacgacaagaccaagaggcctgtggcgcttcgcaccaagaccttggcggaccttttggaatcatttattgcagcgctgtacattgataaggatttggaatatgttcatactttcatgaatgtctgcttctttccacgattgaaagagttcattttgaatcaggattggaatgaccccaaatcccagcttcagcagtgttgcttgacacttaggacagaaggaaaagagccagacattcctctgtacaagactctgcagacagtgggcccatcccatgcccgaacctacactgtggctgtttatttcaagggagaaagaataggctgtgggaaaggaccaagtattcagcaagcggaaatgggagcagcaatggatgcgcttgaaaaatataattttccccagatggcccatcagaagcggttcatcgaacggaagtacagacaagagttaaaagaaatgaggtgggaaagagagcatcaagagagagagccagatgagactgaagacatcaagaaataaaggagggcatgcaagtgtggagtatttacttgctcagtaactgtgactgttgtctattgagacctagcctagttttcctgcagacaatgaatgaagtgtgctcattgaaataaaatacagagtcaaatcgctattgttgttttaatgatctgtttttagctggatggtctttattacaaagtattagatttttcttctatttaacggaaaacttgactttggtgaatgtgcattacttccttttattttgctctttaaataataaaattcaagaagcatattctatgtggaatagatcctgtttttccatctgtgtcccagattgtgaccctagactttcaattgacaagtaaaaaattgactttactagacattttgactgtgctctagtaacatctatcctttttcaaatctctggatttttaagtagattgttcagctttcatccggtggctgttcatcaagttatcagctgcaaatattgaacttacctctctctaagcagtgagtgttttgtagaaggaatccgtttaacaattaattggctaatgggagaaggggaaagactgatattcaagtcatacagattctttgaatcattagaataggagagaaatcatgattctaagccaggccacactttaaaccaagtgctctcaccctggggttagtggaacctttaagaagttaatgaacagacttcaaggaagtcaaaaacctcccaatactatattcaattttctgtgtgtgtttgagatttgagagggcatggggagcaggaaggaggagggtttatagcttttatcagcctctctaagtgggccctgcagtaaaaggctaacatgacattcaaagacataacattttaaaaaaagttattccaaactaaacatcactggtttcttattaataaaggcaaaacttctttgtaaaac

SEQ ID NO: 128119 - DNA, 585 bp, Homo sapiens
  Payload ID: 5085
  Gene Symbol: DROSHA
  Gene Name: drosha, ribonuclease type III
  ENST ID: ENST00000512302
  CDS Start-End: 1-585
catttcagacatctccctccatacccactcccaaaggctcccagtgagagaaggtccccagaaaggctgaaacactatgatgaccacaggcaccgagatcacagtcatgggcgaggtgagaggcatcggtccctggatcggcgggagcgaggccgcagtcccgacaggagaagacaagacagccggtacagatctgattatgaccgagggagaacaccatctcgccaccgcagctacgaacggagcaggagttacggtttatcggttgttcctgaacctgctggatgcacaccagaattacctggggagattattaaaaatacagattcttgggccccacccctggagattgtgaatcatcgctccccaagtagggagaagaagagagctcgttgggaggaagaaaaagaccgttggagtgacaaccagagttctggcaaagacaagaactatacctcaatcaaggaaaaagagcccgaggagaccatgcctgacaagaatgaggaggaagaagaagaacttcttaagcctgtgtggattcgatgcactcattcagaaaactactactccagtgaccccatggat

SEQ ID NO: 128120 - DNA, 860 bp, Homo sapiens
  Payload ID: 5085
  Gene Symbol: DROSHA
  Gene Name: drosha, ribonuclease type III
  ENST ID: ENST00000507438
  CDS Start-End: 257-860
gctttcgttgacgcgccaatcaccgcgcacaaggccctgcggtgggctgaagagttttccctcccttggcccagctttctcaggttgcttttcccggggatgtgaaggatacagaaatgactgtgaatcaacccatatcatcaaggagctgataatctagtggaagagttagacgtgtgcatacttcactatgatatgaggcagtctctgagcttatattctctgtggaagatgtgacatatccaggcggaacatcatgatgcagggaaacacatgtcacagaatgtcgttccacccgggacgagggtgtccccgaggacgaggaggacatggagccagaccctcagcaccatcctttaggccccaaaatctgaggctgcttcaccctcagcagcctcctgtgcaatatcaatatgaacctccaagtgccccttccaccactttctcaaactctccagcccccaattttctccctccacgaccagactttgtacccttccccccacccatgcctccgtcagcgcaaggccctcttcccccctgcccaatcaggccgcctttccccaaccaccagatgaggcaccccttcccagttcctccttgttttcctcccatgccaccaccaatgccttgtcctaataaccccccagtccctggggcacctcctggacaaggcactttccccttcatgatgccccctccctccatgcctcatcccccgccccctccagtcatgccgcagcaggttaattatcagtaccctccgggctattctcaccacaacttcccacctcccagttttaatagtttccagaacaaccctagttctttcctgcccagtgctaataacagcagtagtc

SEQ ID NO: 128121 - DNA, 1915 bp, Homo sapiens
  Payload ID: 5086
  Gene Symbol: DSN1
  Gene Name: DSN1 homolog, MIS12 kinetochore complex component
  Uniprot ID: Q9H410
  ENST ID: ENST00000373734
  CDS Start-End: 173-922
gcatgcgcccttggttggcgggagtttcggaggcggtgaccgtgacgtagaaggtggagaccgcttcaccctgatcagggagtatcggctgcgggtgcgcaaggcgtccaggagtgacctggggctgtggagagcgacccgtggccttgtgtttcagagtttaccacctaggatgacttcagtgactagatcagagatcatagatgagctcagccggtctatcagtgtcgatttagcagaaagcaaacggcttggctgtctcctgctttccagtttccagttctctattcagaaacttgaacctttcctaagggacactaagggcttcagtcttgaaagttttagagccaaagcatcttctctttctgaagaattgaaacattttgcagacggactggaaactgatggaactctacaaaaatgttttgaagattcaaatggaaaagcatcagatttttctttggaagcatctgtggctgagatgaaggaatacataacaaagttttctttagaacgtcagacttgggatcagctcttgcttcactaccagcaggaggctaaagagatattgtccagaggatcaactgaggccaaaattactgaggtcaaagtggaacctatgacatatcttgggtcttctcagaatgaagttcttaatacaaaacctgactaccagaaaatattacagaaccagagcaaagtctttgactgtatggagttggtgatggatgaactgcaaggatcagtgaaacagctgcaggcctttatggatgaaagtacccagtgcttccagaaggtgtcagtacagctcggaaagagaagcatgcaacaattagatccctcaccagctcgaaaactgttgaagcttcagctacagaacccacctgccatacatggatctggatctggatcttgtcagtgactttatgagagtttctgccacaaggtgcccaagaggagaggaatgggaagagtgccccagcacgtggtgactgcgtgatttctgctcgttgcctttgaagataactggcaggactgactgtagaacactttgacttttttcaaaaagtgatggaatttgtacatccaaatgaatattgtatagacaattttcccaggaatgtgcaaaatgcttgaaagttcaaacttcttttttgaaatgatcttcagatccagtggcccattcttttatctttatcctgtgaaggtgtttttcaggttttgaaacaatccaaaaatcatttaggaccaagtctaaggaaacattttagtggccaagttggattccgattgtaaaggaatgatactaattttctagcatggctctgaaggtgattttaggtagaagagttttgaggctgggcgcaatggctcacgcctgtaatcctagcattttgggtgactgaggcgggtggattgcttgagcccagaagttgaagaccagcctgagaaataaggtgaaaccctgtctacaaaaaatacaaaaagttagctgggtgtggtggcgtgtgcctgtagtgctagctactcagaaggctgaggtgggaggattgtttgagcccaggaggttgaggctgcagtgagttctaattgcgccactgcactccagcctgagcgacagagtgagacactgtcttaaaaaaaattaaaaattgtaaaaaaatgaaaaaaaaagttttgagcattatttgcatcattgggatacatatgtcacttcacaagatgttcaatttgaaggaaataccactcattctctatgtcctgttgtctgtagtgtgcttcagtttttcatattgagttgacctaaatcctggattcatgacaagaaaggagtaagtactactattcattgttctatttgtttataatctgtattataaaattgcacataattaaaagctttcccttgtcttca

SEQ ID NO: 128122 - DNA, 1922 bp, Homo sapiens
  Payload ID: 5086
  Gene Symbol: DSN1
  Gene Name: DSN1 homolog, MIS12 kinetochore complex component
  ENST ID: ENST00000373740
  CDS Start-End: 75-929
gcaaggcgtccaggagtgacctggggctgtggagagcgacccgtggccttgtgtttcagagtttaccacctaggatgacttcagtgactagatcagagatcatagatgaacaatctgccagttatcaagacaggaggcaatcctggcggcgagcaagtatgaaagaaacgaaccggcggaagtcgctgcatcccattcaccagggcatcacagagctcagccggtctatcagtgtcgatttagcagaaagcaaacggcttggctgtctcctgctttccagtttccagttctctattcagaaacttgaacctttcctaagggacactaagggcttcagtcttgaaagttttagagccaaagcatcttctctttctgaagaattgaaacattttgcagacggactggaaactgatggaactctacaaaaatgttttgaagattcaaatggaaaagcatcagatttttctttggaagcatctgtggctgagatgaaggaatacataacaaagttttctttagaacgtcagacttgggatcagctcttgcttcactaccagcaggaggctaaagagatattgtccagaggatcaactgaggccaaaattactgaggtcaaagtggaacctatgacatatcttgggtcttctcagaatgaagttcttaatacaaaacctgactaccagaaaatattacagaaccagagcaaagtctttgactgtatggagttggtgatggatgaactgcaaggatcagtgaaacagctgcaggcctttatggatgaaagtacccagtgcttccagaaggtgtcagtacagctcggaaagagaagcatgcaacaattagatccctcaccagctcgaaaactgttgaagcttcagctacagaacccacctgccatacatggatctggatctggatcttgtcagtgactttatgagagtttctgccacaaggtgcccaagaggagaggaatgggaagagtgccccagcacgtggtgactgcgtgatttctgctcgttgcctttgaagataactggcaggactgactgtagaacactttgacttttttcaaaaagtgatggaatttgtacatccaaatgaatattgtatagacaattttcccaggaatgtgcaaaatgcttgaaagttcaaacttcttttttgaaatgatcttcagatccagtggcccattcttttatctttatcctgtgaaggtgtttttcaggttttgaaacaatccaaaaatcatttaggaccaagtctaaggaaacattttagtggccaagttggattccgattgtaaaggaatgatactaattttctagcatggctctgaaggtgattttaggtagaagagttttgaggctgggcgcaatggctcacgcctgtaatcctagcattttgggtgactgaggcgggtggattgcttgagcccagaagttgaagaccagcctgagaaataaggtgaaaccctgtctacaaaaaatacaaaaagttagctgggtgtggtggcgtgtgcctgtagtgctagctactcagaaggctgaggtgggaggattgtttgagcccaggaggttgaggctgcagtgagttctaattgcgccactgcactccagcctgagcgacagagtgagacactgtcttaaaaaaaattaaaaattgtaaaaaaatgaaaaaaaaagttttgagcattatttgcatcattgggatacatatgtcacttcacaagatgttcaatttgaaggaaataccactcattctctatgtcctgttgtctgtagtgtgcttcagtttttcatattgagttgacctaaatcctggattcatgacaagaaaggagtaagtactactattcattgttctatttgtttataatctgtattataaaattgcacataattaaaagctttcccttgtcttca

SEQ ID NO: 128123 - DNA, 2233 bp, Homo sapiens
  Payload ID: 5086
  Gene Symbol: DSN1
  Gene Name: DSN1 homolog, MIS12 kinetochore complex component
  Uniprot ID: Q9H410
  ENST ID: ENST00000373750
  CDS Start-End: 170-1240
tgcgcccttggttggcgggagtttcggaggcggtgaccgtgacgtagaaggtggagaccgcttcaccctgatcagggagtatcggctgcgggtgcgcaaggcgtccaggagtgacctggggctgtggagagcgacccgtggccttgtgtttcagagtttaccacctaggatgacttcagtgactagatcagagatcatagatgaaaaaggaccagtgatgtctaagactcatgatcatcaattggaatcaagtctcagtcctgtggaagtgtttgctaaaacatctgcctccctggagatgaatcaaggcgtttcagaggaaagaattcaccttggctctagccctaaaaaagggggaaattgtgatctcagccaccaggaaagacttcagtcgaagtcccttcatttgtctcctcaagaacaatctgccagttatcaagacaggaggcaatcctggcggcgagcaagtatgaaagaaacgaaccggcggaagtcgctgcatcccattcaccagggcatcacagagctcagccggtctatcagtgtcgatttagcagaaagcaaacggcttggctgtctcctgctttccagtttccagttctctattcagaaacttgaacctttcctaagggacactaagggcttcagtcttgaaagttttagagccaaagcatcttctctttctgaagaattgaaacattttgcagacggactggaaactgatggaactctacaaaaatgttttgaagattcaaatggaaaagcatcagatttttctttggaagcatctgtggctgagatgaaggaatacataacaaagttttctttagaacgtcagacttgggatcagctcttgcttcactaccagcaggaggctaaagagatattgtccagaggatcaactgaggccaaaattactgaggtcaaagtggaacctatgacatatcttgggtcttctcagaatgaagttcttaatacaaaacctgactaccagaaaatattacagaaccagagcaaagtctttgactgtatggagttggtgatggatgaactgcaaggatcagtgaaacagctgcaggcctttatggatgaaagtacccagtgcttccagaaggtgtcagtacagctcggaaagagaagcatgcaacaattagatccctcaccagctcgaaaactgttgaagcttcagctacagaacccacctgccatacatggatctggatctggatcttgtcagtgactttatgagagtttctgccacaaggtgcccaagaggagaggaatgggaagagtgccccagcacgtggtgactgcgtgatttctgctcgttgcctttgaagataactggcaggactgactgtagaacactttgacttttttcaaaaagtgatggaatttgtacatccaaatgaatattgtatagacaattttcccaggaatgtgcaaaatgcttgaaagttcaaacttcttttttgaaatgatcttcagatccagtggcccattcttttatctttatcctgtgaaggtgtttttcaggttttgaaacaatccaaaaatcatttaggaccaagtctaaggaaacattttagtggccaagttggattccgattgtaaaggaatgatactaattttctagcatggctctgaaggtgattttaggtagaagagttttgaggctgggcgcaatggctcacgcctgtaatcctagcattttgggtgactgaggcgggtggattgcttgagcccagaagttgaagaccagcctgagaaataaggtgaaaccctgtctacaaaaaatacaaaaagttagctgggtgtggtggcgtgtgcctgtagtgctagctactcagaaggctgaggtgggaggattgtttgagcccaggaggttgaggctgcagtgagttctaattgcgccactgcactccagcctgagcgacagagtgagacactgtcttaaaaaaaattaaaaattgtaaaaaaatgaaaaaaaaagttttgagcattatttgcatcattgggatacatatgtcacttcacaagatgttcaatttgaaggaaataccactcattctctatgtcctgttgtctgtagtgtgcttcagtttttcatattgagttgacctaaatcctggattcatgacaagaaaggagtaagtactactattcattgttctatttgtttataatctgtattataaaattgcacataattaaaagctttcccttgtcttca

SEQ ID NO: 128124 - DNA, 2441 bp, Homo sapiens
  Payload ID: 5086
  Gene Symbol: DSN1
  Gene Name: DSN1 homolog, MIS12 kinetochore complex component
  Uniprot ID: Q9H410
  ENST ID: ENST00000426836
  CDS Start-End: 374-1444
accctgatcagggagtatcggctgcgggtgcgcaaggcgtccaggagtgacctggggctgtggagagcgacccgtggccttgtgtttcaggtacggaggttccggactggacgggcgtcaggaagtcacagacttgtcctctgatgtggccccgcccgccgccgcactaatctcttcggcgtcgtacccgtcggcccagctcgacccgccgcagccccggccccgaccgtggacactgggggtccccgagggcgctgcgacctcctcccgggtgaaatgaaacccgagggcagtcccccttaccgaccccattagagacgtatctgccgtgccaggggtctaggctccagaaacagggagtttaccacctaggatgacttcagtgactagatcagagatcatagatgaaaaaggaccagtgatgtctaagactcatgatcatcaattggaatcaagtctcagtcctgtggaagtgtttgctaaaacatctgcctccctggagatgaatcaaggcgtttcagaggaaagaattcaccttggctctagccctaaaaaagggggaaattgtgatctcagccaccaggaaagacttcagtcgaagtcccttcatttgtctcctcaagaacaatctgccagttatcaagacaggaggcaatcctggcggcgagcaagtatgaaagaaacgaaccggcggaagtcgctgcatcccattcaccagggcatcacagagctcagccggtctatcagtgtcgatttagcagaaagcaaacggcttggctgtctcctgctttccagtttccagttctctattcagaaacttgaacctttcctaagggacactaagggcttcagtcttgaaagttttagagccaaagcatcttctctttctgaagaattgaaacattttgcagacggactggaaactgatggaactctacaaaaatgttttgaagattcaaatggaaaagcatcagatttttctttggaagcatctgtggctgagatgaaggaatacataacaaagttttctttagaacgtcagacttgggatcagctcttgcttcactaccagcaggaggctaaagagatattgtccagaggatcaactgaggccaaaattactgaggtcaaagtggaacctatgacatatcttgggtcttctcagaatgaagttcttaatacaaaacctgactaccagaaaatattacagaaccagagcaaagtctttgactgtatggagttggtgatggatgaactgcaaggatcagtgaaacagctgcaggcctttatggatgaaagtacccagtgcttccagaaggtgtcagtacagctcggaaagagaagcatgcaacaattagatccctcaccagctcgaaaactgttgaagcttcagctacagaacccacctgccatacatggatctggatctggatcttgtcagtgactttatgagagtttctgccacaaggtgcccaagaggagaggaatgggaagagtgccccagcacgtggtgactgcgtgatttctgctcgttgcctttgaagataactggcaggactgactgtagaacactttgacttttttcaaaaagtgatggaatttgtacatccaaatgaatattgtatagacaattttcccaggaatgtgcaaaatgcttgaaagttcaaacttcttttttgaaatgatcttcagatccagtggcccattcttttatctttatcctgtgaaggtgtttttcaggttttgaaacaatccaaaaatcatttaggaccaagtctaaggaaacattttagtggccaagttggattccgattgtaaaggaatgatactaattttctagcatggctctgaaggtgattttaggtagaagagttttgaggctgggcgcaatggctcacgcctgtaatcctagcattttgggtgactgaggcgggtggattgcttgagcccagaagttgaagaccagcctgagaaataaggtgaaaccctgtctacaaaaaatacaaaaagttagctgggtgtggtggcgtgtgcctgtagtgctagctactcagaaggctgaggtgggaggattgtttgagcccaggaggttgaggctgcagtgagttctaattgcgccactgcactccagcctgagcgacagagtgagacactgtcttaaaaaaaattaaaaattgtaaaaaaatgaaaaaaaaagttttgagcattatttgcatcattgggatacatatgtcacttcacaagatgttcaatttgaaggaaataccactcattctctatgtcctgttgtctgtagtgtgcttcagtttttcatattgagttgacctaaatcctggattcatgacaagaaaggagtaagtactactattcattgttctatttgtttataatctgtattataaaattgcacataattaaaagctttcccttgtcttcatcta

SEQ ID NO: 128125 - DNA, 631 bp, Homo sapiens
  Payload ID: 5086
  Gene Symbol: DSN1
  Gene Name: DSN1 homolog, MIS12 kinetochore complex component
  ENST ID: ENST00000438549
  CDS Start-End: 207-631
agaaggtggagaccgcttcaccctgatcagggagtatcggctgcgggtgcgcaaggcgtccaggagtgacctggggctgtggagagcgacccgtggccttgtgtttcagccaccaggaaagacttcagtcgaagtcccttcatttgtctcctcaagaacaatctgccagttatcaagacaggaggcaatcctggcggcgagcaagtatgaaagaaacgaaccggcggaagtcgctgcatcccattcaccagggcatcacagagctcagccggtctatcagtgtcgatttagcagaaagcaaacggcttggctgtctcctgctttccagtttccagttctctattcagaaacttgaacctttcctaagggacactaagggcttcagtcttgaaagttttagagccaaagcatcttctctttctgaagaattgaaacattttgcagacggactggaaactgatggaactctacaaaaatgttttgaagattcaaatggaaaagcatcagatttttctttggaagcatctgtggctgagatgaaggaatacataacaaagttttctttagaacgtcagacttgggatcagctcttgcttcactaccagcaggaggctaaagagatattgtccag

SEQ ID NO: 128126 - DNA, 1146 bp, Homo sapiens
  Payload ID: 5086
  Gene Symbol: DSN1
  Gene Name: DSN1 homolog, MIS12 kinetochore complex component
  ENST ID: ENST00000447406
  CDS Start-End: 422-1146
gggagtttcggaggcggtgaccgtgacgtagaaggtggagaccgcttcaccctgatcagggagtatcggctgcgggtgcgcaaggcgtccaggagtgacctggggctgtggagagcgacccgtggccttgtgtttcaggtacggaggttccggactggacgggcgtcaggaagtcacagacttgtcctctgatgtggccccgcccgccgccgcactaatctcttcggcgtcgtacccgtcggcccagctcgacccgccgcagccccggccccgaccgtggacactgggggtccccgagggcgctgcgacctcctcccgggtgaaatgaaacccgagggcagtcccccttaccgaccccattagagacgtatctgccgtgccaggggtctaggctccagaaacagggagtttaccacctaggatgacttcagtgactagatcagagatcatagatgaaaaaggaccagtgatgtctaagactcatgatcatcaattggaatcaagtctcagtcctgtggaagtgtttgctaaaacatctgcctccctggagatgaatcaaggcgtttcagaggaaagaattcaccttggctctagccctaaaaaagggggaaattgtgatctcagccaccaggaaagacttcagtcgaagtcccttcatttgtctcctcaagaacaatctgccagttatcaagacaggaggcaatcctggcggcgagcaagtatgaaagaaacgaaccggcggaagtcgctgcatcccattcaccagggcatcacagagctcagccggtctatcagtgtcgatttagcagaaagcaaacggcttggctgtctcctgctttccagtttccagttctctattcagaaacttgaacctttcctaagggacactaagggcttcagtcttgaaagttttagagccaaagcatcttctctttctgaagaattgaaacattttgcagacggactggaaactgatggaactctacaaaaatgttttgaagattcaaatggaaaagcatcagatttttctttggaagcatctgtggctgagatgaaggaatacataacaaagttttctttagaacgtcagacttgggatcagctcttgcttcactaccagcaggaggctaaagagatattgtccag

SEQ ID NO: 128127 - DNA, 2129 bp, Homo sapiens
  Payload ID: 5086
  Gene Symbol: DSN1
  Gene Name: DSN1 homolog, MIS12 kinetochore complex component
  Uniprot ID: Q9H410
  ENST ID: ENST00000448110
  CDS Start-End: 114-1136
gaccgcttcaccctgatcagggagtatcggctgcgggtgcgcaaggcgtccaggagtgacctggggctgtggagagcgacccgtggccttgtgtttcagaaaaaggaccagtgatgtctaagactcatgatcatcaattggaatcaagtctcagtcctgtggaagtgtttgctaaaacatctgcctccctggagatgaatcaaggcgtttcagaggaaagaattcaccttggctctagccctaaaaaagggggaaattgtgatctcagccaccaggaaagacttcagtcgaagtcccttcatttgtctcctcaagaacaatctgccagttatcaagacaggaggcaatcctggcggcgagcaagtatgaaagaaacgaaccggcggaagtcgctgcatcccattcaccagggcatcacagagctcagccggtctatcagtgtcgatttagcagaaagcaaacggcttggctgtctcctgctttccagtttccagttctctattcagaaacttgaacctttcctaagggacactaagggcttcagtcttgaaagttttagagccaaagcatcttctctttctgaagaattgaaacattttgcagacggactggaaactgatggaactctacaaaaatgttttgaagattcaaatggaaaagcatcagatttttctttggaagcatctgtggctgagatgaaggaatacataacaaagttttctttagaacgtcagacttgggatcagctcttgcttcactaccagcaggaggctaaagagatattgtccagaggatcaactgaggccaaaattactgaggtcaaagtggaacctatgacatatcttgggtcttctcagaatgaagttcttaatacaaaacctgactaccagaaaatattacagaaccagagcaaagtctttgactgtatggagttggtgatggatgaactgcaaggatcagtgaaacagctgcaggcctttatggatgaaagtacccagtgcttccagaaggtgtcagtacagctcggaaagagaagcatgcaacaattagatccctcaccagctcgaaaactgttgaagcttcagctacagaacccacctgccatacatggatctggatctggatcttgtcagtgactttatgagagtttctgccacaaggtgcccaagaggagaggaatgggaagagtgccccagcacgtggtgactgcgtgatttctgctcgttgcctttgaagataactggcaggactgactgtagaacactttgacttttttcaaaaagtgatggaatttgtacatccaaatgaatattgtatagacaattttcccaggaatgtgcaaaatgcttgaaagttcaaacttcttttttgaaatgatcttcagatccagtggcccattcttttatctttatcctgtgaaggtgtttttcaggttttgaaacaatccaaaaatcatttaggaccaagtctaaggaaacattttagtggccaagttggattccgattgtaaaggaatgatactaattttctagcatggctctgaaggtgattttaggtagaagagttttgaggctgggcgcaatggctcacgcctgtaatcctagcattttgggtgactgaggcgggtggattgcttgagcccagaagttgaagaccagcctgagaaataaggtgaaaccctgtctacaaaaaatacaaaaagttagctgggtgtggtggcgtgtgcctgtagtgctagctactcagaaggctgaggtgggaggattgtttgagcccaggaggttgaggctgcagtgagttctaattgcgccactgcactccagcctgagcgacagagtgagacactgtcttaaaaaaaattaaaaattgtaaaaaaatgaaaaaaaaagttttgagcattatttgcatcattgggatacatatgtcacttcacaagatgttcaatttgaaggaaataccactcattctctatgtcctgttgtctgtagtgtgcttcagtttttcatattgagttgacctaaatcctggattcatgacaagaaaggagtaagtactactattcattgttctatttgtttataatctgtattataaaattgcacataattaaaagctttcccttgtcttca

SEQ ID NO: 128128 - DNA, 13776 bp, Homo sapiens
  Payload ID: 5087
  Gene Symbol: DTWD1
  Gene Name: DTW domain containing 1
  Uniprot ID: Q8N5C7
  ENST ID: ENST00000251250
  CDS Start-End: 208-1122
gttcgaggactcgcgggtgtgcagggatgcggtttaatattttcatgtgattcctaaaagaatctgaggctcaagaaaagagggcatcttaatatcctgcactttcagtcattgagggcatgatcacaaagatcaaagccatttttaggcagtgcacctatgatatgtgttttagaaatagccgttaaactttggtttgaatgaagaatgtctctcaatccacctatatttctcaaacgaagtgaagaaaatagttcaaaatttgtggaaacaaaacagtcacaaactacttccatagcttcagaagatccccttcaaaacttatgtttagcatctcaagaagttcttcaaaaagctcagcaaagtgggagatcaaaatgtctcaaatgtggtggttccagaatgttctactgctatacatgttatgttccagttgaaaatgtacctattgaacagattccacttgtgaagcttccattgaagattgacatcattaaacatccaaatgaaacagatggcaaaagtactgctatacatgcaaaactcttagcacctgaatttgtaaacatttacacgtatccgtgtattccagaatatgaagaaaaggaccatgaagttgcactcatttttcctggacctcagtctatctcaataaaagatatttcttttcatctgcaaaaaaggattcaaaataatgttagaggcaaaaatgatgaccctgacaagccatcttttaaacgcaaaagaactgaagaacaagagttctgtgatttgaatgacagcaagtgcaaaggcacaacactgaaaaaaattatatttatagatagcacctggaaccaaacaaacaaaatattcactgatgagcgacttcaagggttgttacaagttgagttgaaaacaagaaaaacttgcttttggcgccatcaaaaaggaaagccagatactttcctttctacaattgaagccatttactactttctggtagactaccatactgatatattaaaagagaaatacagagggcaatatgacaatcttttatttttctattcttttatgtaccagttgataaagaatgccaaatgctctggagataaggaaacaggaaaacttacacattagtttttaacaagccacttatgtctttttattttgctaacattaataaacttatatttgtgctttgttttttcttaagaaataatcatatataatgcctgtaagaccatttgaaaaaattccagtttcatatatatcacttcatatttcttgaaggaaattgtatctgggggaatttttcagagatactgttgattgaaaaacttacttcagaagttatttgctcagtgaaacctcagtttcattactacattttaatatagtgtgttatgtctctgtgattagatataacatattccattagatctaattagctatttatttcaacatctttatatcttttcacctgtactcatgaccacctttagaagtaaatggggttacaatctgctggctgaaaaataggtcataagtgatttttcttgaggttagtagcaaacataggcagaactagaattagaattctggtatctagggctgtttctttaagtcctaaggttgttaaaagcagagactctggagctagactacctgaatctaaatctcagcctttctgcttatcagccatgtcattttcttccatttgtacaaagcaggcaatactgagcaactaccttataggaataactgagttaatatctaaggggctttcagcagtacctgaaatatagtaagtgttacatatatgtttactctttttattttatttggaattgtgaactgataataattgaagcctacctgctagtggccatctctgctgccaggtgaaaagagcctgacttagaatgaagtcagcgaaggaaagcagagtggagagaaaaagagagactgagtcctgatgacatcatttatttacctagacctagctgcttgtgaatagagccctactgtgctgaatagcttctgtctgctcttttctattctgctccctgctctgtgaggtaggttcctttgctctcttgcttttggttgggttcaacaaatgggaagcaccagtgggagattagaagttgagaggaaaatgaaatgatgttatttatttccctggctcctttcctgccatgtcatcatcagttggctgtgttcctctactaaatagtaccttatcaggaatcctatctcttctgttcccaagcagttaccccagttacctcactaggtttagttcctgctccctccctttaccccttttcacttagggttggtaatagcttacagttattactagccccagtatagttcactacaacttgttgctttacctaaaccctgctcatacatttgtaaatactgtagttgttttattacactcttctcaaatgtccccacttgaaatagccttctatttcttttggggactctgataaattcacctgtttgggtgaaataatagcacatttcctgaagtatatacagtgggacacatgatgttttatgggggaaagagttcttggtgaaattagtttgctgtacattacgttgtttccctcccagggattcagaaggcaaaacatattaaaggttctgaaaagtcctgaaataaacattttgaactttatttaagctgatatatcttaaacttacttgaatatgtagcacctattaacatgccatggaaataggacgtttggagtattgtaattaagaacaattcctattaatatacatggggcaactgagaattaaagaggtaagtaaattattgatagatcatacacctagttagtagcagagcctgttctagaatctggaacttctgatttggtttggttcagtaaggtcaccattatattatgctattcataaaaaggaatgtggattatataaggcttgaacattattagtcttacagtcttagccaaataaactaactggcttgcttattttagcagttattctacaagaatggaattaaaatagattttttttttcatgtttagaacttggccctgggaatagaggaaggcttgaattgatttaagcagggccaaagttggatttctctaggctaaatttggacttccctgagccaaaatctattgcatttaactggctttacaaaccaactaaacataacagttcagagggaaaagaaaaaaaaaagcgagagacagagaacaattctatcactcatttgcctccatctctcagctggcataagaaagatgacccacgtacttcataagagcctaatttacagctaaggccagataaaatctcaggttcttttcaaaagaagttagtaatacctattagaacaatgaattgactatacttgtcttagttttttttgtttgttttttgttttttgtttttttggtgtgatagatgtaacagtggccctaattctttatccttgcttgtattcatggtcatttttcaggttcctttgaagtactccccccactgtgattctgggtcatctgcattcagagatttagtgcatttttacttacacttgtgcttctgctgttgacataagaatatgcatggctgagttagcctgctggagcatgagactccatggaacagagccaggttgccctggtcaccctcactgaatcttgtctagattggctgatggccagccaaacccaagatatgtgaatgattccagccaagatcagcagagtcatctaactgacacctacctgattccaaacatgtgagcaaggaatgtctattatgccaccaatgtcttatagctatttattgtggctatagatatctcatctttggatgcattatcagatcatcttcttcaagtaccttagaagattctcagtctcatgtttcttgggctcttgaccacttgctttgccttagctaccacctcatatagtaacagattaccagcaggtttgtatgattcctctgcttgagatcaattagccatatgttcagaatccctggcctataacaacacttctgtgctttaaaaaccccatgccacaatgactgttaaaagggctaggcgatgtagtctggtaggtttgtgaagttaactgtctgaaaaacttggatcaatggactagaaaaagctgctgggtaaattgctcttcttctgatggactgtatagagacactgtttttcatcttgcctgtccagaagcgtactctgtggccaagcaagtgtacttgccacatgattggcagtgtctcttcatggcttttcatgaaacagcagcaagtgctacacagtaatttatcagtttgcatttgcctcccattattgccagcctcacttcctttcttcctcgctcttaccagcctggattgtacctttaataaagtagtggatatatttcctttagggtctctttttctagggaagtcaggtgttttagtctggatttagttagaaaagcagcatcgttacaagtattacatgaataaagaagtttagtaaagaaattaaggtttaccccaatgtgagaattactggggtaataaaggtctggaaggctgcagcagaagagatttagagaagcagtgactaactaggtcagccggagattctcaaagtactcatgacttcatttgtagaaacatgtatatcttaagcatatcaagtgtctcattcctctaatctttctaggagccctttggttcatcctgaaggtccccctaaatcccttcagaagtcttaaaaaggagtaaatggccacaccttttatttgttcttttctttgaggccatgttaatggcagtcccttgatttggtctttgtactaggctgtttttaatgatcacattttatttgatgagaaacaattttattttctagttctgcatatcctaggttatgtatttcatttcagttccatttccatacccattgccttaattttgagcttgtctgtttcttacatttctcattttgacagaataagctgactgttattaagtacaatagataaggtacctaagagcctcgaaacatcaccaaataccatgaatgcattaggtatattttttgtcttccatgttactggaagcattaattatagcaactttttatctccaaatactgacaattaaaagaccctagtgaaaactttaaccaaacacttactgaccctacattgaaggccaccagccaaaaatcaccacccatacataagagccaaacatcactagacacttggtgaaatccttcaaatataaaaggggaaaaggaggggagaaaatccaaaggaaatagacaaacggagaataatggcaacaaaaaaaaaactgtcttcaaaataagagtatattatattcacaaaacaagaataggagagtgtgaaaaagaacaagcaataaaaaagatctcagaaatttaaaaagtgattgctgaaataaaaattaaatataagagttgaagataaaatatagcataagaatagaaaattctgaattccaaatacctaaggccaatcttagttaaaagttgtaaatgcaaccataggctacatgttacattgtatttaattaaaaaccttaagaggaaaggcaatagagcttgtaacagctattacccttggttgtaaaggagaaggttggagattatttgtataccaactacttaagtttacaaaaaataatgagcattaggtagatggaatgaaagtctattcatacactgtatattaagctctatatacactgcatatcatcatcatgacattgagtttctagctggattgcagagatgagccaaagcgcttctccccaaattattatttattcatttttgagacagagtctcactcttgtctcccaggctgcagtgcagtggtgcgatctcagctcactacaacctccacctcccaagttcaagcaattatcatgccttagccccccgagtagctgggatcacaggcatgtgccaccacaccccgctaatttttgtatttttagtagagatggagttttgtcatgtttggccagccttatctgaaactcctgacctcaagtgatcctgcctttgcttcccaaagtgctgggattaacaggcctgagccacaacacccagcctaaattatttttaattatgacattttttgtattcccttgaggcactgacaactatagtcttattttatatgttatagtgaatcatatttatctcattatatattacagaatattttgtttgatggagaaaattcactgacctgtgctgtaatgtttataccagcaattagctgattgatttactatgacctcactctttattcagcagttctgccactattactagctaatccaacaacgaggccttattttggctttctttcgaaaggtcatttctgaccccagcttgaagtttgtttattttcacttgaagagatctctcagaaagtcaaagaaaataggaggaaaaaaacttaagattaagggccaatctaagaggtccttcatttgaataataggagtaacagaatgggaaaggcgtggaaaaaaatttgtgatttctaaaattgaggacattaagtcattagagtaaaaaaaagatgtacattaaggcttatcatcaaggaatttcagaacactgtggatagaaaatactaaaagatttcaaacagaagaaataggtcgtatatcgaccaataatcaggatattaaaggacttcttaacaacattggaaactagaagacatggggtgatgcctttagaactttaagtgaaaatagttttctatttggattctatttttagtcatgcaattaatcaagtatgaatatagtataaagacacagaaggtctcaaaggtattacctcccatatattcttgagataaagatgcttaggagaatactgaagatgttttccagtaaaacggagaaggaaaccaaaaaccaaaaaagagagcattaagaagtcagcaggccaggcgcggtggctcacgcctctaatcccagcactttaggaggccaaggcaggtggatcgcctgaggtctggagtttaagaccagcctggctaacatggcgaaactctgtctctactaaaaatacaaaaattagtcgggtgtgatggcatgtgtctgtaatcccagctactcgggaggctgaagcaggagaatcacttagaacctgggaggcagaagttgtagtgagccgagatggtgccattgcactccagcctgggtgacagagtgagactccgtctcaaaaaaaataaataaaaaaataaaaagtcagcaaagggaagtttcagggtttcaggattcattcatccattctaaaaaattttgagtgcatactatgtgtcaaattattgtctaggtgatggctatagcatgccgaggtagtaagtgctaagaagaaaataaagcagagtaaggaactgatagtgactggtgcaggaaaggggtgccagtttaaatagcatggtcagatggaaaagcctgtgataaggtaaaattgagcagagacctaaatgagagagagtgaaccatgcgaataattaagtgaataatgttttaattatagggaacaatatgtgtgtgtctatatatatatatacacacaaaggtactgaggcagcagtatacttggcatgtttgaggaataacaaggacactagtttggaacagtgtgtgggagggaaaaaatgatagaagatgacatcatagggagtaatggtgtggagccatggtaagatgttaagattttactctgagtgatgagataggaagccatcagagaatttaagcaaatgagtgacaggatctgacttatatttttaaaggattatttggcttctttatgaaaaatagactgcaagagagtaagaaataaaataggaagatcaattagaatgctatttcagtagtccatttgagagatgatatttgcctggacaagggttgtgatcatgggcgagtggtacagaatgacaagatcctgcatgtatttttaaggtagagccagtatttgcagatagtttagacattgtggtagatatgaaaatgtgctgcctatatcccccttctaggaaggacttgctaattagctgcagggagtgtgaagaacagaaatccaccagtatcagcacttcatctgcaacagctatagaaaaagcttcacctgaggttaccctcgtcttagatctcagggcagccctcagtggagatgtaaggccttgctacttcagcctcatttattacactgtcaggcaaaaccttcctcagagctccctctattacaacttaatttcttcttctgcccaatcctgcttcctccccttcccctgaaaggtgacactttctaataaacatcttacaccccaaactccatctcagcattcctctttagaggactcgacctgtggtaattgttagtaggagtgatctgagctgccaatgagaatcccatcacatgtggcacatggaacaaaagcccatggctcaaggtggtaacttttattagtggtaaaatgagaagatttacccacggaagagaatgtgccagcaagtgcagtatatcaggtatttgagactcatgaaggaaatagtaaatttaagaataacagaattgaatggccaagtgccactaatgctctgtagaaagagggcttctttggttgcatacaaatctcatctagaatttaatagtccaagtagccaaactggtatttgtccttaagaataaatactggaagatcaagcacagaaagtctagaatagaggcatgtgaatggacatacttgtgtcaagtatgtacatgaactgtgaaggtctctgtattacgtgcagtgcccaccagagagcattcagtactgaagagtctctaaacaataaagcaaactaaacacattgcctagttgacgtcatccttcctgcttcagttattcgccacccagtgctagcacagtgggcacatgaatggaatgtccactgtggaaaggatgaagactaagcatagggttcagtagcttgagtttcaacttaccaaggctgccttagctgctgctgctgttgaatgtccaacctacaagcaacacagacaatactgcacccctgatataataccattcttcaatatcaagttggttacattgggccccttccacactggaaggaccagcatttccttgtcatagaaatagacacaatttccagataggagtttgcttttcctctttgcagagcctcagtcagtatcaccatttgagtttacttagtattgtattgaccagcatgcgatctcacattatatcatatcagatccggaaacctattttatggaaaaccaagcgcaggagtggacccatatccacaggatccactaataatatcacttttttcaccacttggaatttgtcagcttgatagaacattggaacaacctgctgaaggtacagctgaacaccagctcataggcaaattctacaaggataggatgccatactccaagatacagagtatgtactggatcaattatccttatatagcatgtgccccaatatgaagaataaatgggtcttggaacccatttattcctaggggtagatgcaaagagagtagaagaagaggtgcctcccctccgtgccatcacttttaatgacccatatggtactttgcacctcttcataactctgaactctgcagtgagaggtcttggtcccacaaggggacacagttttgctgagagatatataaaaaatctcactgaaaaacataagctgcagcagctacctggatactttcggttccttgtgtctgtctagggagcagcagccaataaaaggagtcaagatcagttgaccctaatcaagaggagattggaatcctggttacacaatctgggcagaagtaataaatgtggtgcccaagtgataaacctaccaaattgagactaatgtgtaggtgtggcaacccatcctcaaaagggcatgatggcctggaactcaggcctctcaaggaatgtgggtctgaattataccagataaaccaccaggagcagcagaggtggtagcagaggctgagggaaatctagaattgatagtggaggatgaggggatgtgacaagtattgatggcattcccaagccccactgcagcagcaagcactgtaatttgtcccactaatctcccatcttctaaatttctgagaggtcaagaaaagaggtctcttgattcctttaggaactgctccctaagcatacagggagacatagatctatgtggagcaaagggtggattgtaataagcaaagagatacactgcctgattcactttaagaaaggactgacctcccagttgcaaggaatgaggtcagcagcctccaactgtcagctccttcagagtctgcttcaactgcagaaggacactgtgcttgaggtcatacccttcccatgtctggtgactgaagtccagctgaatgtagctgccaaagttaccttaatgcccatgggaagcaaaaaatcaaagagtttaaacagaattttgagaaatcccaaatcagttttttttcagcatatgacattttggagtagtttgttattcagcaatagataacagaaattggtatcaggagtggggtgttaccataacaaaaggttaaaccttacatggtaaaaaggactttgcctctgtcattaagttaagcactttgaaatgtagagattatcctgaattatctaggtaggctcaatataagcatgagtccttaaaagtggaagacggatacatgagaggatgtcagaatgatgtgaaatgagaagaactcaacctgctattgttggctttacaggtgagtgataggaaccacaagccccaagcagcctctggaagctggaaaaagcaaagaaacagattctttccagagtgtccagaaaggaatgcagttcagctaacatcttgattttagatcagtgagatttttgtgttggacttctacagaactatataagaataaattgtgttgcttaagcacactataatacatgtggcaagaagctgccagctaagccttgaagaatagtgaacaaactcttactggaggatgggaaggcagtaaataaattattgaattattgaaataaatggaggattgagttatgcattgacagaatgcttagcaataattttgcttgtcttaatgtggaacagaaaatgaaacttaatagcttgtagatgtcttaaggagatttccaggtgaatgttgaaagtactgatgaacttattatggctgcatctcataatgtacaggaagacatttactgagtgaactaaagaaggaactgttcaatttgaaagcagaatttagaggaaatttttcaacctagtacttgtcatttttttatagaaaaggaaaaatagatggaagatggagccaaaatcccagagggaggagccaagaagcaaggagagcaatggattaggaaaccactaccagagggatgaactgaaccacaatcaaggaatagcctcttcctttggtgtagggggaccctgaaaacaatttaattttatgcttcctgtttccttgtctccttttttgaatgatagtctctgtgtggtgttcctatcctagaaaaccttaactgggacaagctactctcaagcatcttcacttgagaaacagtaactgaggaagtttattgtatctggacatggtttagatgataagattctgaacttaaacttatgccataatggagtgagactcttagggtacagagtaagtacatttttgcatgttagtgagacaagaactgtggccgggggcagactgtgatagtttttgaagatgtccctcaaacaattccttcccttccttggactcctctcttcagagggtagagtccatttccttttccttttaatctggattggccttctaactcactttgaccaataaaatgtggtaaaagtaaggtctggcagttttcactttcactctcctgaaccttcatattagaattccaggatatccttctagagatatccatatctctagggacatggtgagtccctagagacaccacatggaaaggccacctagggaagaactgagatgccccagtcaatagcactgccttagtcagtttgggctagtataacagaaatatcatagattgagtgactttttttctttaaaaaaatgagattgtggaacctgaaaatacagtgtagtaagagtggagagaaaggccacctaaggaagaactgagacgtcccagtcaatagcactgccttagtcagttggagctactgtaacaaaaaatatcatagattgagtgacttaaacaacagaaatttatatcttacatttctggagactgaaaatatggaaatccaagatcagagtttcagcatggttaggtgtttagtgggcgctcccttcctggtttgcagacagccatcttcctgctatatcctcacatgatgcagagagagagaactctggtatctttgtccccttataagggcaccaatctcatcatggagggtcttcaacctcatggcttcttggaaccaaattacttcccaaagtcctcacctccaaatctagcacattgaggtttagggcttcaacatatgaatttcagtgcatagaaagcaccaagtcctcagacaaagagaacttgaaccttctaactcagcttagccattatctgcatgcaaccacataagtgaccctgggtaacaccatctggagctgaagaaccaccagccagtacacagaaatgagaaattttaaaatggttgatttaggtaattaagttttggggtggtttattacatagcaattgataactgatacaacagtcttttcgttagtagaagagggggtaagaaagaaagacttatgaagaaaagacctgtagaaaatcgggcctacgtacctctatttttttttcatactcccgtgttttttttagtccatgctggtggtatcctcatcaatgcaattttctttaaaactctgtgagcctttatatcagattagtccaccccattagaacaaaagcaacttctataaatattgagacattccctttctacctttggctaagaattggggtgctatagataattcccaaaagattatctagcctacagggccgatgaggtatagcttgaagtcattctaaagtcttcacaaaggatcttacagcctttgattttattatcactctgggaccacgttttactgttggcacgttcggcttttctcatcttttccctgagatcatttatgatgtggaaattactttgctggctgaagttgggaatagaaaacagtagagaatacttcaagagtattctaggtatgcactaagtttatgggaagatatgccatctacataatttaccttcctctctaggcccatcataaaaatctttgaaaaattaatactacattttagtatgaatataagttaaacttagaggtgatatctattttgtggttaaatgtgttataaacatttatttagtgaaatacagtacaattacaacaagcatcaatgaatatttaatgagcagctgttaatttctgaagcagaaagaaagatgaataaaagttctggttttacttttaaaagtgaaggctaactgttagctcaagaaatactttatgtttgtcctatatgaaagtgttgattgcacctggttctttgctgtaaattaaataaaaattcaaatatttgtaaaa

SEQ ID NO: 128129 - DNA, 1584 bp, Homo sapiens
  Payload ID: 5087
  Gene Symbol: DTWD1
  Gene Name: DTW domain containing 1
  Uniprot ID: Q8N5C7
  ENST ID: ENST00000403028
  CDS Start-End: 199-1113
gctagtaactgcctggctcctccctctggtgtctcccggaaagcgctccgtctggtccgtgcgcgatcacggcccggcgcgtggctcgggctcgggcggagctggagacgtgtggagctgttcgaggactcgcgggtgtgcagtgcacctatgatatgtgttttagaaatagccgttaaactttggtttgaatgaagaatgtctctcaatccacctatatttctcaaacgaagtgaagaaaatagttcaaaatttgtggaaacaaaacagtcacaaactacttccatagcttcagaagatccccttcaaaacttatgtttagcatctcaagaagttcttcaaaaagctcagcaaagtgggagatcaaaatgtctcaaatgtggtggttccagaatgttctactgctatacatgttatgttccagttgaaaatgtacctattgaacagattccacttgtgaagcttccattgaagattgacatcattaaacatccaaatgaaacagatggcaaaagtactgctatacatgcaaaactcttagcacctgaatttgtaaacatttacacgtatccgtgtattccagaatatgaagaaaaggaccatgaagttgcactcatttttcctggacctcagtctatctcaataaaagatatttcttttcatctgcaaaaaaggattcaaaataatgttagaggcaaaaatgatgaccctgacaagccatcttttaaacgcaaaagaactgaagaacaagagttctgtgatttgaatgacagcaagtgcaaaggcacaacactgaaaaaaattatatttatagatagcacctggaaccaaacaaacaaaatattcactgatgagcgacttcaagggttgttacaagttgagttgaaaacaagaaaaacttgcttttggcgccatcaaaaaggaaagccagatactttcctttctacaattgaagccatttactactttctggtagactaccatactgatatattaaaagagaaatacagagggcaatatgacaatcttttatttttctattcttttatgtaccagttgataaagaatgccaaatgctctggagataaggaaacaggaaaacttacacattagtttttaacaagccacttatgtctttttattttgctaacattaataaacttatatttgtgctttgttttttcttaagaaataatcatatataatgcctgtaagaccatttgaaaaaattccagtttcatatatatcacttcatatttcttgaaggaaattgtatctgggggaatttttcagagatactgttgattgaaaaacttacttcagaagttatttgctcagtgaaacctcagtttcattactacattttaatatagtgtgttatgtctctgtgattagatataacatattccattagatctaattagctatttatttcaacatctttatatcttttcacctgtactcatgaccacctttagaagtaaatggggttacaatctgctggctgaaaaataggtcataagtgatttttcttgaggttagtagcaaacataggcagaactagaattagaattctggtatcta

SEQ ID NO: 128130 - DNA, 936 bp, Homo sapiens
  Payload ID: 5087
  Gene Symbol: DTWD1
  Gene Name: DTW domain containing 1
  Uniprot ID: Q8N5C7
  ENST ID: ENST00000557968
  CDS Start-End: 142-471
cgtgcgcgatcacggcccggcgcgtggctcgggctcgggcggagctggagacgtgtggagctgttcgaggactcgcgggtgtgcagtgcacctatgatatgtgttttagaaatagccgttaaactttggtttgaatgaagaatgtctctcaatccacctatatttctcaaacgaagtgaagaaaatagttcaaaatttgtggaaacaaaacagtcacaaactacttccatagcttcagaagatccccttcaaaacttatgtttagcatctcaagaagttcttcaaaaagctcagcaaagtgggagatcaaaatgtctcaaatgtggtggttccagaatgttctactgctatacatgttatgttccagttgaaaatgtacctattgaacagattccacttgtgaagtttagcctatatcatcttggccagtccatggtctcctcagcatctaaaatcacatgtataggctaatggaaagtttactagccaagaataagtaagtgtggaatttaatatgatcttcacagtttgctccgaaaaaacaagaacttgaggataatactgatgtggtgctcagagaccctagggagagggaaggtagtttcaactgagaccgagcgtcatgaggaaactctgatgtagtgttcagccagaagtagactgatgtaaaatcatttgtgaactgcctacttaaatggtaaattttccataactagaagttggtttgatgattagaagcaattgggcctaacttataaatgatcattgggcctaacttataaatgattgctaggcctaagcggggagggtaggagatacagcatttgaaaccctaattgaaaactatttgaggaattcatttgtaggccaaggtcctccaggggtgtattatttatactgttctgtccccaacataattgtccaggaagaaaaaaa

SEQ ID NO: 128131 - DNA, 583 bp, Homo sapiens
  Payload ID: 5087
  Gene Symbol: DTWD1
  Gene Name: DTW domain containing 1
  ENST ID: ENST00000559405
  CDS Start-End: 301-583
agacgtgtggagctgttcgaggactcgcgggtgtgcaggtctgagtaccactccgatccctggtggaggtccccgcgcctctctggagaccagtggtctggccccagaggtgcggccgcgggaagtggacattctttgtcaggaccctagcggaggtcgcgctgggtgtcgcctgtgagggggatcctcggtttctgcgcggtctcttgctttttttaggatcttgcgggccctttgggaaaaagtgcacctatgatatgtgttttagaaatagccgttaaactttggtttgaatgaagaatgtctctcaatccacctatatttctcaaacgaagtgaagaaaatagttcaaaatttgtggaaacaaaacagtcacaaactacttccatagcttcagaagatccccttcaaaacttatgtttagcatctcaagaagttcttcaaaaagctcagcaaagtgggagatcaaaatgtctcaaatgtggtggttccagaatgttctactgctatacatgttatgttccagttgaaaatgtacctattgaacagattccacttgtgaagcttccattgaagattgaca

SEQ ID NO: 128132 - DNA, 678 bp, Homo sapiens
  Payload ID: 5087
  Gene Symbol: DTWD1
  Gene Name: DTW domain containing 1
  ENST ID: ENST00000559164
  CDS Start-End: 99-678
gctggagacgtgtggagctgttcgaggactcgcgggtgtgcagtgcacctatgatatgtgttttagaaatagccgttaaactttggtttgaatgaagaatgtctctcaatccacctatatttctcaaacgaagtgaagaaaatagttcaaaatttgtggaaacaaaacagtcacaaactacttccatagcttcagaagatccccttcaaaacttatgtttagcatctcaagaagttcttcaaaaagctcagcaaagtgggagatcaaaatgtctcaaatgtggtggttccagaatgttctactgctatacatgttatgttccagttgaaaatgtacctattgaacagattccacttgtgaagcttccattgaagattgacatcattaaacatccaaatgaaacagatggcaaaagtactgctatacatgcaaaactcttagcacctgaatttgtaaacatttacacgtatccgtgtattccagaatatgaagaaaaggaccatgaaagacaggtctcactatgttgcccagactggtctcgaactcctagggctcaagtgatcctctcaccttggcctcccaaagtgccgggattacaggttgcactcatttttcctggacctcagtctatctcaataaaagatatttcttttcatctgcaaaaaaggattcaaaata

SEQ ID NO: 128133 - DNA, 1131 bp, Homo sapiens
  Payload ID: 5087
  Gene Symbol: DTWD1
  Gene Name: DTW domain containing 1
  Uniprot ID: Q8N5C7
  ENST ID: ENST00000558653
  CDS Start-End: 185-1099
tcgggctcgggcggagctggagacgtgtggagctgttcgaggactcgcgggtgtgcaggtctgagtaccactccgatccctggtggaggtccccgcgcctctctggagaccagtggtctggccccagagtgcacctatgatatgtgttttagaaatagccgttaaactttggtttgaatgaagaatgtctctcaatccacctatatttctcaaacgaagtgaagaaaatagttcaaaatttgtggaaacaaaacagtcacaaactacttccatagcttcagaagatccccttcaaaacttatgtttagcatctcaagaagttcttcaaaaagctcagcaaagtgggagatcaaaatgtctcaaatgtggtggttccagaatgttctactgctatacatgttatgttccagttgaaaatgtacctattgaacagattccacttgtgaagcttccattgaagattgacatcattaaacatccaaatgaaacagatggcaaaagtactgctatacatgcaaaactcttagcacctgaatttgtaaacatttacacgtatccgtgtattccagaatatgaagaaaaggaccatgaagttgcactcatttttcctggacctcagtctatctcaataaaagatatttcttttcatctgcaaaaaaggattcaaaataatgttagaggcaaaaatgatgaccctgacaagccatcttttaaacgcaaaagaactgaagaacaagagttctgtgatttgaatgacagcaagtgcaaaggcacaacactgaaaaaaattatatttatagatagcacctggaaccaaacaaacaaaatattcactgatgagcgacttcaagggttgttacaagttgagttgaaaacaagaaaaacttgcttttggcgccatcaaaaaggaaagccagatactttcctttctacaattgaagccatttactactttctggtagactaccatactgatatattaaaagagaaatacagagggcaatatgacaatcttttatttttctattcttttatgtaccagttgataaagaatgccaaatgctctggagataaggaaacaggaaaacttacacattagtttttaacaagccacttatgtctttttatttt

SEQ ID NO: 128134 - DNA, 552 bp, Homo sapiens
  Payload ID: 5087
  Gene Symbol: DTWD1
  Gene Name: DTW domain containing 1
  ENST ID: ENST00000560632
  CDS Start-End: 97-552
tggagacgtgtggagctgttcgaggactcgcgggtgtgcagtgcacctatgatatgtgttttagaaatagccgttaaactttggtttgaatgaagaatgtctctcaatccacctatatttctcaaacgaagtgaagaaaatagttcaaaatttgtggaaacaaaacagtcacaaactacttccatagcttcagaagatccccttcaaaacttatgtttagcatctcaagaagttcttcaaaaagctcagcaaagtgggagatcaaaatgtctcaaatgtggtggttccagaatgttctactgctatacatgttatgttccagttgaaaatgtacctattgaacagattccacttgtgaagattgacatcattaaacatccaaatgaaacagatggcaaaagtactgctatacatgcaaaactcttagcacctgaatttgtaaacatttacacgtatccgtgtattccagaatatgaagaaaaggaccatgaagttgcactcatttttcctggacctcagtctatctcaataaaagatatttcttttcatctg

SEQ ID NO: 128135 - DNA, 1201 bp, Homo sapiens
  Payload ID: 5087
  Gene Symbol: DTWD1
  Gene Name: DTW domain containing 1
  ENST ID: ENST00000557988
  CDS Start-End: 105-413
ggcggagctggagacgtgtggagctgttcgaggactcgcgggtgtgcagtgcacctatgatatgtgttttagaaatagccgttaaactttggtttgaatgaagaatgtctctcaatccacctatatttctcaaacgaagtgaagaaaatagttcaaaatttgtggaaacaaaacagtcacaaactacttccatagcttcagaagatccccttcaaaacttatgtttagcatctcaagaagttcttcaaaaagctcagcaaagtgggagatcaaaatgtctcaaatgtggtggttccagaatgttctactgctatacatgttatgttccagttgaaaatgtacctattgaacagattccacttgtgaaggagaatccaatgcctgaagatctgtcactgtctcccatgtcctagatgggaccatcaagttgcaggaaaaccagctcagggatcctgctgattttacattatgcttccattgaagattgacatcattaaacatccaaatgaaacagatggcaaaagtactgctatacatgcaaaactcttagcacctgaatttgtaaacatttacacgtatccgtgtattccagaatatgaagaaaaggaccatgaagttgcactcatttttcctggacctcagtctatctcaataaaagatatttcttttcatctgcaaaaaaggattcaaaataatgttagaggcaaaaatgatgaccctgacaagccatcttttaaacgcaaaagaactgaagaacaagagttctgtgatttgaatgacagcaagtgcaaaggcacaacactgaaaaaaattatatttatagatagcacctggaaccaaacaaacaaaatattcactgatgagcgacttcaagggttgttacaagttgagttgaaaacaagaaaaacttgcttttggcgccatcaaaaaggaaagccagatactttcctttctacaattgaagccatttactactttctggtagactaccatactgatatattaaaagagaaatacagagggcaatatgacaatcttttatttttctattcttttatgtaccagttgataaagaatgccaaatgctctggagataaggaaacaggaaaacttacacattagtttttaacaagccacttatgtctttttattttgctaacattaataaacttatatttgtgctttgttttttcttaagaaa

SEQ ID NO: 128136 - DNA, 4365 bp, Homo sapiens
  Payload ID: 5088
  Gene Symbol: DTWD2
  Gene Name: DTW domain containing 2
  ENST ID: ENST00000304058
  CDS Start-End: 72-770
ggagtcggcggctcgggcagctctgcgattagggcggcggagttggcgggtgcacgttggaaatctcggaaatgccaggcacagctacctaccggcctcagaaagtgtgtttgtgtccatttctcccagcgcaccctctgcatatctctacccacttgtacataattcagcatccagcagaggaaaacaaagtgttgcgtacagttcctctactagcagcatgcctcccccaggacaagtgtaaagtgaagatcggtcgtcgcttcagtgaagaaagagatcctgaactttcaactgtttgccggaagtctggtacattaatattatatccaggggctgaagctgctaatttggaagaatttatattagattctcctgtttatccttctacaatcatcatcattgatggtacatggagccaggctaaggacattttctataagaactccttgttccgacatcccaaacaggtgcaattaaaaactagcatttctagtcagtatgtaattcggatgcagccgactaatagatgcctttctacactggagtgtgcagctgttgctctttccatcttggagaaaaataattacatacaagagactttgcttcgccctcttcaagctttatgctcctttcaacttcagcatggtgcccaaattcgcctcagcaaggaacaccttctgaaaaatggattatatcctaaaccaatgccaaagaacaaacgcaaactcaggaaaatggaattgttaatgaatagtgttaaaatttagtacagttattcttttggtgctagcttaactgtcttcatctaacaataccaaattaagttttcatatagttaaggtctgtaggtttttgacttgctaaagaaggagaattgcatactaatcttacccagaagaaggaagtaaaccaaatattcataaatacaaataaacagaaattcactggctcactgaaaagcaggatttcctactgtacttgtttttaaaaatgtgcctctaatacatgttttcaaacccaaatttaaaatatgatttgttgttgtgataggttagaagttcttacttgtaaaatagaagaaaattgttgtagtggattggaacggtgttgtgtccattaatgtttataaataattaggtgtagaccaataatataagattcctacatcagtttgcagtcctgactttacagtttgaaataagtagcaaaagaaaattatgataatcaagtaatttattattttgtaaaatagtataaaggaataaggaaattttaagtattgtttaggggccaaatttgaactcagctaatatgatttaagcgctctattaattgccctgatttttaaagaggtgcatgtaattttgaaatagcacacattttcatttgtaatcactctggataaatttgtatttttcagtgttcattgaacaggcttattgactctggtaaacttattttattgatgttttcatatggaaaataataagtggaatatgatacaattgttattttcagaacatatttctttagggctatttaatataacctttttaacgagcaaaaactttccatttgagagaaaaaattcttcctgctctgtgggaaaatatttgctgagattttgtatagaataagagacatgtatgtaacatatatgtatattcagcacaagtctactgcaattatgtacacattttggcaggaagaggggattttgtttagtctttgtttatgagttctagagtttcctgtatctagtgttaagttgtaaggaaaaactaaacatgccatttaaaggtaaacttggtaactatttatagagcatacaccaatgattatttctcacagttttcatgatcatttgtttattatttacttggattagactcattaaaaggtataatgctggtcacaattagaatgctaatatttggggaaactatgcagaaaatattttaaaatattaaaagagtgctggcttctattgttgatttatttttggatttaaaaacaaattagggctgggcccattagctcacacctgtaatcccagcactttgggaggctgagatgtgagaattgcttgagcccaggagtttgagaccagcctgggcaatatggtgagactccatctccatacaaaattaaaaaaaaaataattagccagatgtggtggtgtgcacttgtagtcctagctacttgggaggctaaggtgggaggatcgctggagcccaggacatcaaggttgcaaggagctatgttcattccactgcactccagcctgggctacagagtgagacctgtctaaaataaataaataaataaacaaactagctcatttacaatgtaaagcacttaatatcaaatgattatttggtgtactagaaaagaaacagcatataataatgtataatagtttcttaacaagtggggctaaaatcattttgtagtaatttttcacattgatattaaacttcatgagtttcttttagtcattattattattattattattatttgagatggaatctcgctctgtcgcccaggctggagtgcagtggcgcaatcttggctcactgaaagctctgcctcctgggttcacgccattcttctgcctcagcctcctgagtagctgggactacaggtgcccaccaccacgcccggctaattttttgtatttttagtagagatggggtttcaccgtattagccaggatggtctcgatctcctgacctcgtgatctgtctgccttggcctccaaaagtgctgggaccgtgcccagccatcattattattttttaaaaagaaaactccccctacccccagtataccattttgtatctcaaaattttactttattgatttttaagagtaatttctacttttatcttttaaataaaacattttagagtatttttgaagacttaaaaagcttaaaatttagtgtttttggaaatgtataaaattttcttgaagtatgtatagttttccaaattactttactgacctgttaactcactgtacttgttttttacttattttttcctgacctcttaacaaggtgagtccatttaatcatctgtggtataaaatgcttctctagtcacctgttctcattaaacagttgtaagtaagttttaaaagccattattttaattactaaaagttctcaagtgtgtagtattatctgagtattttaattgaaaaattaatcaggcttttaaaaattacttttttattgtattagttggcttttaaattcagattctttatatttgcttgatttttcctggaagttccaagttttatgaatttgtagctgatagtaggttttacttgtgtaccccatctgcactttgatgttgtgtagatcgttttgtgagttatttgaaccgtgtaactcagagaatagtatttcctcatacataaagtgacctcacttttaatcagctcctttatagtatgttgaaaatcactgcgtgtaatgagaggtattgagagtttcttgcacacatgagtgtaaaaggttgagaactagattatacaaagtagtaagtcacagtgcatggcaactttctacaggttggattataagacttatgtggaataggagaattatattgggaaaaaattattttctctaacttgaagactccagagacacttttcttagtcatgaccagtaatatttttcatatattttggaagaaataagctcctcactataccaccagttagtgatttatttatttatgtattttagagacagggcctccttctgtcacccagtttggagtgcagtggtgtaatcatagcttactgcagcatcaaactcctgggctcaagtgttcctcctgcctcagcctcccaagtagctagaacctcagccccatgccaccacactcagctaattttaaattttactaatttcatttaatttttgtggagatgggggtcttgctgtgttgtttaggctggtcctgaactcctggcctcaagcgatccttctgccttggcctctcagtaaattatatagaagagcacttctgtataatttactcagtttcttcatcacatatttccaactgttgccctaaataggtttaaaaatgtgatcatgttattagaaaatcctttccattgaatttcagggatgctgaatttcagggagctaaattgttgacccttgcctgtagttgttattggttcagaagtaaattttattgatgctacaagtaaaaaattagatctgacttagtaaactcaaaagttttacaaaactgtattttactatgtagatgtatttctttaaaataggtatggatggatatttttatgaataaataatattgcattata

SEQ ID NO: 128137 - DNA, 1275 bp, Homo sapiens
  Payload ID: 5088
  Gene Symbol: DTWD2
  Gene Name: DTW domain containing 2
  ENST ID: ENST00000515439
  CDS Start-End: 29-637
atgccacggcctgaccggagtgtccgccatggagtcgcagaaagaggcacgaacactccaggagcccgttgcgcggccttctggggcctcaagctctcagacgccgaacgacaaggagcggcgggagggcggcgcagtgccggcggcggctgccctgggcgcagaggcggacgacgacagtgcggacgggctgtgggagctgccggtggagccggccgagcggaggcctgagtgcacccgctgcagccggcctcagaaagtgtgtttgtgtccatttctcccagcgcaccctctgcatatctctacccacttgtacataattcagcatccagcagaggtgcaattaaaaactagcatttctagtcagtatgtaattcggatgcagccgactaatagatgcctttctacactggagtgtgcagctgttgctctttccatcttggagaaaaataattacatacaagagactttgcttcgccctcttcaagctttatgctcctttcaacttcagcatggtgcccaaattcgcctcagcaaggaacaccttctgaaaaatggattatatcctaaaccaatgccaaagaacaaacgcaaactcaggaaaatggaattgttaatgaatagtgttaaaatttagtacagttattcttttggtgctagcttaactgtcttcatctaacaataccaaattaagttttcatatagttaaggtctgtaggtttttgacttgctaaagaaggagaattgcatactaatcttacccagaagaaggaagtaaaccaaatattcataaatacaaataaacagaaattcactggctcactgaaaagcaggatttcctactgtacttgtttttaaaaatgtgcctctaatacatgttttcaaacccaaatttaaaatatgatttgttgttgtgataggttagaagttcttacttgtaaaatagaagaaaattgttgtagtggattggaacggtgttgtgtccattaatgtttataaataattaggtgtagaccaataatataagattcctacatcagtttgcagtcctgactttacagtttgaaataagtagcaaaagaaaattatgataatcaagtaatttattattttgtaaaatagtataaaggaataaggaaattttaagtattgtttaggggccaaatttgaactcagctaatatgatttaagcgctctattaattgccctgatttttaaagaggtgcatgtaattttgaaatagcacacattttcatttgtaatcactctggataa

SEQ ID NO: 128138 - DNA, 1370 bp, Homo sapiens
  Payload ID: 5088
  Gene Symbol: DTWD2
  Gene Name: DTW domain containing 2
  ENST ID: ENST00000506980
  CDS Start-End: 29-442
atgccacggcctgaccggagtgtccgccatggagtcgcagaaagaggcacgaacactccaggagcccgttgcgcggccttctggggcctcaagctctcagacgccgaacgacaaggagcggcgggagggcggcgcagtgccggcggcggctgccctgggcgcagaggcggacgacgacagtgcggacgggctgtgggagctgccggtggagccggccgagcggaggcctgagtgcacccgctgcagccggcctcagaaagtgtgtttgtgtccatttctcccagcgcaccctctgcatatctctacccacttgtacataattcagcatccagcagaggaaaacaaagtgttgcgtacagttcctctactagcagcatgcctcccccaggacaagtgtaaagtgaagatcggtcgtcgcttcagtgaagaaaggtgcaattaaaaactagcatttctagtcagtatgtaattcggatgcagccgactaatagatgcctttctacactggagtgtgcagctgttgctctttccatcttggagaaaaataattacatacaagagactttgcttcgccctcttcaagctttatgctcctttcaacttcagcatggtgcccaaattcgcctcagcaaggaacaccttctgaaaaatggattatatcctaaaccaatgccaaagaacaaacgcaaactcaggaaaatggaattgttaatgaatagtgttaaaatttagtacagttattcttttggtgctagcttaactgtcttcatctaacaataccaaattaagttttcatatagttaaggtctgtaggtttttgacttgctaaagaaggagaattgcatactaatcttacccagaagaaggaagtaaaccaaatattcataaatacaaataaacagaaattcactggctcactgaaaagcaggatttcctactgtacttgtttttaaaaatgtgcctctaatacatgttttcaaacccaaatttaaaatatgatttgttgttgtgataggttagaagttcttacttgtaaaatagaagaaaattgttgtagtggattggaacggtgttgtgtccattaatgtttataaataattaggtgtagaccaataatataagattcctacatcagtttgcagtcctgactttacagtttgaaataagtagcaaaagaaaattatgataatcaagtaatttattattttgtaaaatagtataaaggaataaggaaattttaagtattgtttaggggccaaatttgaactcagctaatatgatttaagcgctctattaattgccctgatttttaaagaggtgcatgtaattttgaaatagcacacattttcatttgtaatcactctggataa

SEQ ID NO: 128139 - DNA, 2307 bp, Homo sapiens
  Payload ID: 5088
  Gene Symbol: DTWD2
  Gene Name: DTW domain containing 2
  Uniprot ID: Q8NBA8
  ENST ID: ENST00000510708
  CDS Start-End: 35-931
gcttcaatgccacggcctgaccggagtgtccgccatggagtcgcagaaagaggcacgaacactccaggagcccgttgcgcggccttctggggcctcaagctctcagacgccgaacgacaaggagcggcgggagggcggcgcagtgccggcggcggctgccctgggcgcagaggcggacgacgacagtgcggacgggctgtgggagctgccggtggagccggccgagcggaggcctgagtgcacccgctgcagccggcctcagaaagtgtgtttgtgtccatttctcccagcgcaccctctgcatatctctacccacttgtacataattcagcatccagcagaggaaaacaaagtgttgcgtacagttcctctactagcagcatgcctcccccaggacaagtgtaaagtgaagatcggtcgtcgcttcagtgaagaaagagatcctgaactttcaactgtttgccggaagtctggtacattaatattatatccaggggctgaagctgctaatttggaagaatttatattagattctcctgtttatccttctacaatcatcatcattgatggtacatggagccaggctaaggacattttctataagaactccttgttccgacatcccaaacaggtgcaattaaaaactagcatttctagtcagtatgtaattcggatgcagccgactaatagatgcctttctacactggagtgtgcagctgttgctctttccatcttggagaaaaataattacatacaagagactttgcttcgccctcttcaagctttatgctcctttcaacttcagcatggtgcccaaattcgcctcagcaaggaacaccttctgaaaaatggattatatcctaaaccaatgccaaagaacaaacgcaaactcaggaaaatggaattgttaatgaatagtgttaaaatttagtacagttattcttttggtgctagcttaactgtcttcatctaacaataccaaattaagttttcatatagttaaggtctgtaggtttttgacttgctaaagaaggagaattgcatactaatcttacccagaagaaggaagtaaaccaaatattcataaatacaaataaacagaaattcactggctcactgaaaagcaggatttcctactgtacttgtttttaaaaatgtgcctctaatacatgttttcaaacccaaatttaaaatatgatttgttgttgtgataggttagaagttcttacttgtaaaatagaagaaaattgttgtagtggattggaacggtgttgtgtccattaatgtttataaataattaggtgtagaccaataatataagattcctacatcagtttgcagtcctgactttacagtttgaaataagtagcaaaagaaaattatgataatcaagtaatttattattttgtaaaatagtataaaggaataaggaaattttaagtattgtttaggggccaaatttgaactcagctaatatgatttaagcgctctattaattgccctgatttttaaagaggtgcatgtaattttgaaatagcacacattttcatttgtaatcactctggataaatttgtatttttcagtgttcattgaacaggcttattgactctggtaaacttattttattgatgttttcatatggaaaataataagtggaatatgatacaattgttattttcagaacatatttctttagggctatttaatataacctttttaacgagcaaaaactttccatttgagagaaaaaattcttcctgctctgtgggaaaatatttgctgagattttgtatagaataagagacatgtatgtaacatatatgtatattcagcacaagtctactgcaattatgtacacattttggcaggaagaggggattttgtttagtctttgtttatgagttctagagtttcctgtatctagtgttaagttgtaaggaaaaactaaacatgccatttaaaggtaaacttggtaactatttatagagcatacaccaatgattatttctcacagttttcatgatcatttgtttattatttacttggattagactcattaaaaggtataatgctggtcacaattagaatgctaatatttggggaaactatgcagaaaatattttaaaatattaaaagagtgctggcttctattgttgatttatttttggatttaaaaacaaattagggctgggcccattagctcacacctgtaatcccagcactttgggaggctgagatgtgagaattgcttgagcccaggagtttgagaccagcctgggcaatatggtgagactccatctccatac

SEQ ID NO: 128140 - DNA, 1387 bp, Homo sapiens
  Payload ID: 5089
  Gene Symbol: DTD1
  Gene Name: D-tyrosyl-tRNA deacylase 1
  Uniprot ID: Q8TEA8
  ENST ID: ENST00000377452
  CDS Start-End: 181-810
ctatcgccaggccgagagtgggcgtggccgacgtggggtgggtagcagccgaccgagtcggaccggccagttgggcgcgcttccgggtgtcacctccagagggcgccggctgcggagccgccctcagagtcgcgaggccggacgcagcgcggcgccgccccactcgccccagccgccgccatgaaggccgtggtgcagcgcgtcacccgggccagcgtcacagttggaggagagcagattagtgccattggaaggggcatatgtgtgttgctgggtatttccctggaggatacgcagaaggaactggaacacatggtccgaaagattctaaacctgcgtgtatttgaggatgagagtgggaagcactggtcgaagagtgtgatggacaaacagtacgagattctgtgtgtcagccagtttaccctccagtgtgtcctgaagggaaacaagcctgatttccacctagcaatgcccacggagcaggcagagggcttctacaacagcttcctggagcagctgcgtaaaacatacaggccggagcttatcaaagatggcaagtttggggcctacatgcaggtgcacattcagaatgatgggcctgtgaccatagagctggaatcgccagctcccggcactgctacctctgacccaaagcagctgtcaaagctcgaaaaacagcagcagaggaaagaaaagaccagagctaagggaccttctgaatcaagcaaggaaagaaacactccccgaaaagaagaccgcagtgccagcagcggggctgagggcgacgtgtcctctgaacgggagccgtagctcaggaggcagaattcagtgtgttatcattgggcagaactggatcctgaaaaattcaagatgctaagcacctacactactttaagaatttggaactgaaacatgaagaggaagacagaaataagaatttgggaacctgaatagctctgcaaaaaacaccaaaggaccgttttatcgttttctgttgttgctgtggtggagtgatgcagtgggcactgccggtgggccagggggcgggtgcgcatgtggtagaaggtgtgcgctcgtgcctcccccacagaaaggctttgttggtttctaccacatcttggcttgcttttggaacaggctggcccagcatcatttgtcatcaagtccactgtggtgtattctgcgtgtccatggcgggggttctccaatacactcacactgtccatgttctttttattgccagggcccgtgttgaagtgtcaagagagcaatcatcaatgataatgtattgtgtgagacctttgcatcttgtaaattttctcttttttctaaaaataaataataataaaatcctaaatctcaacaaaccactttattatcaaacaaa

SEQ ID NO: 128141 - DNA, 695 bp, Homo sapiens
  Payload ID: 5089
  Gene Symbol: DTD1
  Gene Name: D-tyrosyl-tRNA deacylase 1
  ENST ID: ENST00000618693
  CDS Start-End: 27-695
gaatcgaggcactcgctggcgtacccatgtatcgaaatgagttcacggcctggtaccggcggatgtcggtggtctacgggatcggcacctggtctgtgttgggctcactgctttactatagccggacaatggcgaagtcgtcagttggaggagagcagattagtgccattggaaggggcatatgtgtgttgctgggtatttccctggaggatacgcagaaggaactggaacacatggtccgaaagattctaaacctgcgtgtatttgaggatgagagtgggaagcactggtcgaagagtgtgatggacaaacagtacgagattctgtgtgtcagccagtttaccctccagtgtgtcctgaagggaaacaagcctgatttccacctagcaatgcccacggagcaggcagagggcttctacaacagcttcctggagcagctgcgtaaaacatacaggccggagcttatcaaagatggcaagtttggggcctacatgcaggtgcacattcagaatgatgggcctgtgaccatagagctggaatcgccagctcccggcactgctacctctgacccaaagcagctgtcaaagctcgaaaaacagcagcagaggaaagaaaagaccagagctaagggaccttctgaatcaagcaaggaaagaaacactccccgaaaagaagaccgcagtgccagcagcggg

SEQ ID NO: 128142 - DNA, 2717 bp, Homo sapiens
  Payload ID: 5090
  Gene Symbol: DTD2
  Gene Name: D-tyrosyl-tRNA deacylase 2 (putative)
  Uniprot ID: Q96FN9
  ENST ID: ENST00000310850
  CDS Start-End: 118-624
gggcaatcggcgcaggcccttcgtcgtgccccgcctcgtctgccccgccagcgcgtcgagggaggggccagcgacacatggcctagtaactgtccggccgcggcgctggcttaagccatggctgagggtagccggattcctcaggcccgggcgctcctacagcagtgcctgcacgcccggctgcaaattcgcccagccgatggggacgtcgcggcccagtgggtggaggtccaaagaggactggtgatctacgtgtgctttttcaagggagctgataaagaacttcttcccaaaatggttaatacactgttaaatgtgaaattaagtgagacagaaaatggcaagcatgtctctatattggatctacctggcaacattcttattatccctcaagctacccttggaggaagactaaaaggaagaaacatgcaatatcactctaactctggaaaagaagaagggtttgaactttactctcaatttgtgactctatgtgaaaaagaagtagctgctaatagcaagtgtgctgaagctagggttgtagtggaacatggcacttatgggaacaggcaggtgttaaagctggacaccaacggaccattcacacacttaattgagttttgaaaatgaaaaactagtttctatagctgttttctggtatgaaatgatctaaagtataattagattttcttccccttaatcttgaatatactaatcttcagcatttttagacaggaaaatcttgggtttcatatataactctgcacctgctaattggatgactttgccaagtcacctaaactctggatctcagtcaccttttgtcctacattcctctacccttctacttgaaaatttgaaatatgctgtctattcacttcatagtcattaaggaaatgttcttaattgtttttttgtttttgttttttttttgagatggagtcttgctctgtcgccagactggagtgcagtggcgcaatctcggctcactgcaacctccacctcctggattcaagcgattctcctgcctcagcctcccaagtagctgggattacaggcgcatgccaccatgcccagctaatttttttgtatttttagtagagatggggtttcaccgtgctggccaggatggtctcgatctcctgacctcgtgatccgcccacctcggcctcccaaagtgctgggactacaggcatgagccaccgtgcccggcctcttagttgttttttaaaaattatgtacattttaagtattttgcaatgaagaaattcatgcaaacaagaaaaacacatttcttataccatcaaatttgtgtagcatgtaataaaaataactatttgtattaaaattaggtaaacttcagcacaacccaattataactttgttaattttgtttactatttcagttttctgtatttccatatgtaagtcaccatttcttttaataatatgcatgaaaatgtaatatagggccaaatgtggtggctcatgcctataatcccagcactttgggaggccgaggtgggaggatcacttgagcccaggagtttgcgaccagcctgggcagaatagcaagacccagtctctaacatatacatatacatatagatatatatgtaatatagaagggttattgtgtgttatattactttccagggacattcaaatgttttacattactttaagaatctttacttgatataagaacaaagtataagggtttaaaagttgtttttattaaacatactatataaatgggttaatggtctatttttcagtttttaccaaaatcatgtgtctcactttttgtcttcgctttttaaagaactggttcatgaaattagtgttagttcataaattgtttaagaagttccttttccattgaattagattgctgtaaaagggagaaaaagggaagcttcccataagaatagtttgaaaacaaattgacttgttcatttccatattatctgcttgatgatatggagccagtgtcaatttttctgttagtgaatgttttggactagatgttcccgtccccaaaatttatatgttgaagcccttattaatgtgatggtatctggagatggggctcctccaaccatcccatcctggaacatataagccagaaagaaagtagtctccagaaacagaccatgctgacaccttgagtttgaacttctaatcaccagaactgtgaggaaataaatttctggtgtttaaaccacccagtcctatggtattttgttagggcagtctgagctacgacagtgatataagatagacagctagtaaggtaaacttttcaaaggcaagagaggaagatatacaagaaattgaaagaataattaagtcagtaagaggtaatattcagttttggcaaactcctctgacttgagttgaaaatactttttttttttaagagtaaaaaccaaataactaattctaattggcaaaaaaaggtaaataaataaacatcctaagtagctgctgaaatttccgttgtgtcttatagtttctttaggtctgtgttcctaagatgcttaaaatttttatcatgaaaaatcctattttctctatacccttcctgtactgttctattttggaaccagagaatcaataactggcttggtaatgagctcattgtccttaacttttgctttattgattcacaatacacttactgaaatgtaataaactattcataaacttgcaaa

SEQ ID NO: 128143 - DNA, 1400 bp, Homo sapiens
  Payload ID: 5090
  Gene Symbol: DTD2
  Gene Name: D-tyrosyl-tRNA deacylase 2 (putative)
  Uniprot ID: Q96FN9
  ENST ID: ENST00000356180
  CDS Start-End: 33-539
gtaactgtccggccgcggcgctggcttaagccatggctgagggtagccggattcctcaggcccgggcgctcctacagcagtgcctgcacgcccggctgcaaattcgcccagccgatggggacgtcgcggcccagtgggtggaggtccaaagaggactggtgatctacgtgtgctttttcaagggagctgataaagaacttcttcccaaaatggttaatacactgttaaatgtgaaattaagtgagacagaaaatggcaagcatgtctctatattggatctacctggcaacattcttattatccctcaagctacccttggaggaagactaaaaggaagaaacatgcaatatcactctaactctggaaaagaagaagggtttgaactttactctcaatttgtgactctatgtgaaaaagaagtagctgctaatagcaagtgtgctgaagctagggttgtagtggaacatggcacttatgggaacaggcaggtgttaaagctggacaccaacggaccattcacacacttaattgagttttgaaaatgaaaaactagtttctatagctgttttctggtatgaaatgatctaaagtataattagattttcttccccttaatcttgaatatactaatcttcagcatttttagacaggaaaatcttgggtttcatatataactctgcacctgctaattggatgactttgccaagtcacctaaactctggatctcagtcaccttttgtcctacattcctctacccttctacttgaaaatttgaaatatgctgtctattcacttcatagtcattaaggaaatgttcttaattgtttttttgtttttgttttttttttgagatggagtcttgctctgtcgccagactggagtgcagtggcgcaatctcggctcactgcaacctccacctcctggattcaagcgattctcctgcctcagcctcccaagtagctgggactacaggcatgagccaccgtgcccggcctcttagttgttttttaaaaattatgtacattttaagtattttgcaatgaagaaattcatgcaaacaagaaaaacacatttcttataccatcaaatttgtgtagcatgtaataaaaataactatttgtattaaaattaggtaaacttcagcactttgggaggccgaggtgggaggatcacttgagcccaggagtttgcgaccagcctgggcagaatagcaagacccagtctctaacatatacatatacatatagatatatatgtaatatagaagggttattgtgtgttatattactttccagggacattcaaatgttttacattactttaagaatctttacttgatataagaacaaagtataagggtttaaaagttgtttttattaaacatactatataaatgggtt

SEQ ID NO: 128144 - DNA, 823 bp, Homo sapiens
  Payload ID: 5090
  Gene Symbol: DTD2
  Gene Name: D-tyrosyl-tRNA deacylase 2 (putative)
  ENST ID: ENST00000549850
  CDS Start-End: 96-302
gtcgtgccccgcctcgtctgccccgccagcgcgtcgagggaggggccagcgacacatggcctagtaactgtccggccgcggcgctggcttaagccatggctgagggtagccggattcctcaggcccgggcgctcctacagcagtgcctgcacgcccggctgcaaattcgcccagccgatggggacgtcgcggcccagtgggtggaggtaacgtcagcccggcagctctcgttatcctccggcgtgcggggcggttttttccgcgttgtctcggtgactcgtccgctctgtgtctccctctgagaccggcggtccggccgcggggataccgggtcagcttgaagctggccgcggtggcctgcctggctgcgcttgtcttttcggtccagcatcaccgttccccagcgccagttgtagcacccgagaggaagagcgtgtctcccttcttggggggaccacaggtccaaagaggactggtgatctacgtgtgctttttcaagggagctgataaagaacttcttcccaaaatggttaatacactgttaaatgtgaaattaagtgagacagaaaatggcaagcatgtctctatattggatctacctggcaacattcttattatccctcaagctacccttggaggaagactaaaaggaagaaacatgcaatatcactctaactctggaaaagaagaagggtttgaactttactctcaatttgtgactctatgtgaaaaagaagtagctgctaatagcaagtgtgctgaagctagggttgtagtggaacatggcacttatgggaacaggcaggtgttaaagctggacacc

SEQ ID NO: 128145 - DNA, 2955 bp, Homo sapiens
  Payload ID: 5091
  Gene Symbol: DAPP1
  Gene Name: dual adaptor of phosphotyrosine and 3-phosphoinositides
  ENST ID: ENST00000296414
  CDS Start-End: 82-873
gcaggctgctgtctcacagagcgagaaggtgtcaggagcagcccagttgtgtctctctctctacctctgtgaagggcgcgaatgggcagagcagaacttctagaagggaagatgagcacccaggatccctcagatctgtggagcagatccgatggagaggctgagctgctccaggacttggggtggtatcacggcaacctcacacgccatgctgctgaagctcttctcctctcaaatggatgtgacggcagctaccttctgagggacagcaatgagaccaccgggctgtactctctctctgtgagggccaaagattctgttaaacactttcatgttgaatatactggatattcatttaaatttggctttaatgaattctcatctttgaaggattttgtcaagcattttgcaaatcagcctttgattggaagcgagacaggcactctgatggttctaaaacatccctacccaagaaaagtggaagaaccctccatttatgaatctgtccgggttcacacagcaatgcagacaggaagaacagaagatgaccttgtgcccacagcaccttctctgggcaccaaagaaggttacctcaccaaacagggaggcctggtcaagacctggaaaacaagatggtttactctgcacaggaatgaactgaaatacttcaaagaccagatgtcaccagaaccaattcggatcctagacctaacagaatgttcagctgtacaattcgattattcacaagaaagggtaaactgtttttgtttggtatttccattcaggacattttatctctgtgcaaagaccggagtagaagctgatgagtggatcaagatattacgctggaaattggtcaaggacaaaagctgatttattttgtctgctctctgtatatctcccgaggagaagactgatcacaaataagaaaacagctcaaccaaggggaaggcacgatccgatctcggtcgttcatctttaaatagatctttcttgccaaggaatgctctggcccaggagcaaggtggaatgtttccctgacgctgtgatctgcagcaggcttcaaatgaaaaccgactaaggattttctttcaaaaacaaatcagaagcagatgctgattgggacccatataccacgttgctgactcacgttgctgcccttccatgatgttgccatctccttgagaacactgaagcaatcaccattctgatagaaagtgcttaaaccaccactcttaggtctgctcactcttagaacacacaatggaagaggaagggtttttgttttcactcattgtggtccccaagcctattgacactagttgcctagagtcccactgtgagtcatggtcagcctgtctgacatccaggttgtgctattaaccaagaaggaaacagatacttggaggcttagatgacttctgcaggatttatattcagatagaaaacatcaaatattttcaggggagaggtttttttttttaatttttccccctttatacaaaaaaaaaagaacatttccaaaactaaaatagaaaatgcttgtggcatttattttctctttttaaaaggttcagaaatttggcaggtcctttgcttctaatgacaaaactgtgagagctagatgtcctatgggcaattaggtagtataataaaggtaaatgaaggtacaatttttaaaccattattttcaccctgttggggtaaatgttttaaagagtgagaaaacataaattgagaaagggtgataaagtaatagataacttttagtttaataataattattgttattatactactaataatagagcacttgtaagcactaagttatctttatccaacatttctccaaatggactgaaagaaacttttcaaggacagtgtattataacaatccctttcccagaattagttgtatagggttggcccaagagatgtaagaaaaatctcgcattgctccctaagcaccctgggccttattaaagagcaacttctatttccagtcgggggagtaacactaaagctacaagaaatatgtaataatgataggtaataatgtgttccaaagctttttcaaactagaataaggaggcaaatagaagaatgagatactgatgtccacagttcattggcagaatctaaccccttctgttatcttttttaatactatttttgtttagatagaagtttcaaagaagataaaaatgcttgaagagcctgagagtaaaaagattatgctgcaaagctatgatataaactgctcttgcagtccaaagggatacctgattaaagaagtttcttatttaaacatctcagacgcaaaaattacattaaatttttgtatatttcaacaacattttaaatgtattttgttatgtttgtattatataggataaagcaaatgtcaagttaaaatgtattgtgttgtttgtaaagtaagaagttactggccaggagcggcggctcatgcctgtaatcccaggactttggtaggccaagacaagcagatcacttgaggtcaggagttcaacatcagcctggccaacatgatgaaaccttgtctttactaaaaatacaaaaattagctgggcatggtggcaggcgcctgtaatcccagctactcaggaggctgaggcaggagaattgcttgaacccgggaggtggaggttgcagtgaaccaagatcgcggcgctgcactctagcctgggtgacagagtcagactccgtcccaaaaaaacaaacaaacaaaacaaaacaaaaaaaaacagaagttacaaatgaatactcacggatatgtatagttttatgtttgttttcttagaaacaaatgtgtttctttgggtgggtaatattgtgttttactatgtttaccttttataaaacataacctgtttatttatattctttggctttgtttattaaaaagcatgattttgctgtgcatgtaccattttg

SEQ ID NO: 128146 - DNA, 1440 bp, Homo sapiens
  Payload ID: 5091
  Gene Symbol: DAPP1
  Gene Name: dual adaptor of phosphotyrosine and 3-phosphoinositides
  Uniprot ID: Q9UN19
  ENST ID: ENST00000512369
  CDS Start-End: 69-911
tcacagagcgagaaggtgtcaggagcagcccagttgtgtctctctctctacctctgtgaagggcgcgaatgggcagagcagaacttctagaagggaagatgagcacccaggatccctcagatctgtggagcagatccgatggagaggctgagctgctccaggacttggggtggtatcacggcaacctcacacgccatgctgctgaagctcttctcctctcaaatggatgtgacggcagctaccttctgagggacagcaatgagaccaccgggctgtactctctctctgtgagggccaaagattctgttaaacactttcatgttgaatatactggatattcatttaaatttggctttaatgaattctcatctttgaaggattttgtcaagcattttgcaaatcagcctttgattggaagcgagacaggcactctgatggttctaaaacatccctacccaagaaaagtggaagaaccctccatttatgaatctgtccgggttcacacagcaatgcagacaggaagaacagaagatgaccttgtgcccacagcaccttctctgggcaccaaagaaggttacctcaccaaacagggaggcctggtcaagacctggaaaacaagatggtttactctgcacaggaatgaactgaaatacttcaaagaccagatgtcaccagaaccaattcggatcctagacctaacagaatgttcagctgtacaattcgattattcacaagaaagggtaaactgtttttgtttggtatttccattcaggacattttatctctgtgcaaagaccggagtagaagctgatgagtggatcaagatattacgctggaaattgtcacaaataagaaaacagctcaaccaaggggaaggcacgatccgatctcggtcgttcatctttaaatagatctttcttgccaaggaatgctctggcccaggagcaaggtggaatgtttccctgacgctgtgatctgcagcaggcttcaaatgaaaaccgactaaggattttctttcaaaaacaaatcagaagcagatgctgattgggacccatataccacgttgctgactcacgttgctgcccttccatgatgttgccatctccttgagaacactgaagcaatcaccattctgatagaaagtgcttaaaccaccactcttaggtctgctcactcttagaacacacaatggaagaggaagggtttttgttttcactcattgtggtccccaagcctattgacactagttgcctagagtcccactgtgagtcatggtcagcctgtctgacatccaggttgtgctattaaccaagaaggaaacagatacttggaggcttagatgacttctgcaggatttatattcagatagaaaacatcaaatattttcaggggagaggtttttttttttaatttttccccctttatacaaaaaaaaaagaa

SEQ ID NO: 128147 - DNA, 5738 bp, Homo sapiens
  Payload ID: 5092
  Gene Symbol: DUOX1
  Gene Name: dual oxidase 1
  Uniprot ID: Q9NRD9
  ENST ID: ENST00000321429
  CDS Start-End: 408-5063
gtggctgagccgagccgggccgtgccttcccctcctcacccccagccccgcccgtcccggcgcagagctgcagaggcaccggacgagagagggctccgcgggcccagctggcagccaggccggagacaagttgcagtcccgggctctggtgacgccgtggccgcagctggaagaggaaaacaaggatcagattggagaagtgatttatctaagatcccacagtggactgggagcagcactgagacctcagcctagtctcctgatccccaagcagggccctgcctaaggaacacactctgcagagtgctgggccaaagcagggttttccaactaatcttagaaggtaaagtccatgaagggtctccattttgggacattctaatccctgagcccctattattttcatcatgggcttctgcctggctctagcatggacacttctggttggggcatggacccctctgggagctcagaaccccatttcgtgggaggtgcagcgatttgatgggtggtacaacaacctcatggagcacagatggggcagcaaaggctcccggctgcagcgcctggtcccagccagctatgcagatggcgtgtaccagcccttgggagaaccccacctgcccaacccccgagaccttagcaacaccatctcaaggggccctgcagggctggcctccctgagaaaccgcacagtgttgggggtcttctttggctatcacgtgctttcagacctggtgagcgtggaaactcccggctgccccgccgagttcctcaacattcgcatcccgcccggagaccccatgttcgaccccgaccagcgcggggacgtggtgctgcccttccagagaagccgctgggaccccgagaccggacggagtcccagcaatccccgggacccggccaaccaggtgacgggctggctggacggcagcgccatctatggttcctcgcattcctggagcgacgcgctgcggagcttctccaggggacagctggcgtcggggcccgaccccgcttttccccgagactcgcagaaccccctgctcatgtgggcggcgcccgaccccgccaccgggcagaacgggccccgggggctgtacgccttcggggcagagagagggaaccgggaacccttcctgcaggcgctgggcctgctctggttccgctaccacaacctgtgggcgcagaggctggcccgccagcacccagactgggaggacgaggagctgttccagcacgcacgcaagagggtcatcgccacctaccagaacatcgctgtgtatgagtggctgcccagcttcctgcagaaaacactcccggagtatacaggataccggccatttctggaccccagcatctcctcagagttcgtggcggcctctgagcagttcctgtccaccatggtgccccctggcgtctacatgagaaatgccagctgccacttccagggggtcatcaatcggaactcaagtgtctccagagctctccgggtctgcaacagctactggagccgtgagcacccaagcctacaaagtgctgaagatgtggatgcactgctgctgggcatggcctcccagatcgcagagcgagaggaccatgtgttggttgaagatgtgcgggatttctggcctgggccactgaagttttcccgcacagaccacctggccagctgcctgcagcggggccgggatctgggcctgccctcttacaccaaggccagggcagcactgggcttgtctcccattacccgctggcaggacatcaaccctgcactctcccggagcaatgacactgtactggaggccacagctgccctgtacaaccaggacttatcctggctagagctgctccctgggggactcctggagagccaccgggaccctggacctctgttcagcaccatcgtccttgaacaatttgtgcggctacgggatggtgaccgctactggtttgagaacaccaggaatgggctgttctccaagaaggagattgaagaaatccgaaataccaccctgcaggacgtgctggtcgctgttatcaacattgaccccagtgctctgcagcccaatgtctttgtctggcataaaggagacccctgtccgcagccgagacagctcagcactgaaggcctgccagcgtgtgctccctctgttgttcgtgactattttgagggcagtggatttggcttcggggtcaccatcgggaccctctgttgcttccctttggtgagcctgctcagtgcctggattgttgcccggctccggatgagaaatttcaagaggctccagggccaggaccgccagagcatcgtgtctgagaagctcgtgggaggcatggaagctttggaatggcaaggccacaaggagccctgccggcccgtgcttgtgtacctgcagcccgggcagatccgtgtggtagatggcaggctcaccgtgctccgcaccatccagctgcagcctccacagaaggtcaacttcgtcctgtccagcaaccgtggacgccgcactctgctgctcaagatccccaaggagtatgacctggtgctgctgtttaacttggaggaagagcggcaggcgctggtggaaaatctccggggagctctgaaggagagcgggttgagcatccaggagtgggagctgcgggagcaggagctgatgagagcagctgtgacacgggagcagcggaggcacctcctggagacctttttcaggcaccttttctcccaggtgctggacatcaaccaggccgacgcagggaccctgcccctggactcctcccagaaggtgcgggaggccctgacctgtgagctgagcagggccgagtttgccgagtccctgggcctcaagccccaggacatgtttgtggagtccatgttctctctggctgacaaggatggcaatggctacctgtccttccgagagttcctggacatcctggtggtcttcatgaaaggctctcctgaggaaaagtctcgccttatgttccgcatgtacgactttgatgggaatggcctcatttccaaggatgagttcatcaggatgctgagatccttcatcgagatctccaacaactgcctgtccaaggcccagctggctgaggtggtggagtccatgttccgggagtcgggattccaggacaaggaggaactgacatgggaagattttcacttcatgctgcgggaccacaatagcgagctccgcttcacgcagctctgtgtcaaaggggtggaggtgcctgaagtcatcaaggacctctgccggcgagcctcctacatcagccaggatatgatctgtccctctcccagagtgagtgcccgctgttcccgcagcgacattgagactgagttgacacctcagagactgcagtgccccatggacacagaccctccccaggagattcggcggaggtttggcaagaaggtaacgtcattccagcccttgctgttcactgaggcgcaccgagagaagttccaacgcagctgtctccaccagacggtgcaacagttcaagcgcttcattgagaactaccggcgccacatcggctgcgtggccgtgttctacgccatcgctggggggcttttcctggagagggcctactactacgcctttgccgcacatcacacgggcatcacagacaccacccgcgtgggaatcatcctgtcgcggggcacagcagccagcatctctttcatgttctcctacatcttgctcaccatgtgccgcaacctcatcaccttcctgcgagaaaccttcctcaaccgctacgtgcccttcgacgccgccgtggacttccatcgcctcattgcctccaccgccatcgtcctcacagtcttacacagtgtgggccatgtggtgaatgtgtacctgttctccatcagccccctcagcgtcctctcttgcctctttcctggcctcttccatgatgatgggtctgagctcccccagaagtattactggtggttcttccagaccgtaccaggcctcacgggggttgtgctgctcctgatcctggccatcatgtatgtctttgcctcccaccacttccgccgccgcagtttccggggcttctggctgacccaccacctctacatcctgctctatgtcctgctcatcatccatggtagctttgccctgatccagctgccccgtttccacatcttcttcctggtcccagcaatcatctatgggggcgacaagctggtgagcctgagccggaagaaggtggagatcagcgtggtgaaggcggagctgctgccctcaggagtgacccacctgcggttccagcggccccagggctttgagtacaagtcagggcagtgggtgcggatcgcttgcctggctctggggaccaccgagtaccaccccttcacactgacctctgcgccccatgaggacacgcttagcctgcacatccgggcagcagggccctggaccactcgcctcagggagatctactcagccccgacgggtgacagatgtgccagatacccaaagctgtaccttgatggaccatttggagagggccaccaggagtggcataagtttgaggtgtcagtgttagtgggagggggcattggggtcaccccttttgcctccatcctcaaagacctggtcttcaagtcatccgtcagctgccaagtgttctgtaagaagatctacttcatctgggtgacgcggacccagcgtcagtttgagtggctggctgacatcatccgagaggtggaggagaatgaccaccaggacctggtgtctgtgcacatctacatcacccagctggctgagaagttcgacctcaggaccactatgctgtacatctgtgagcggcacttccagaaggttctgaaccggagtctattcacaggcctgcgctccatcacccactttggccgtcccccctttgagcccttcttcaactccctgcaggaggtccacccccaggtccggaagatcggggtgtttagctgtggcccccctggcatgaccaagaatgtggaaaaggcctgtcagctcatcaacaggcaggaccggactcacttctcccaccattatgagaacttctaggcccctgcccgggggttctgcccactgcccagttgagcagaggtttgagcccacacctcacctctgttcttcctatttctggctgcctcagccttctctgatttcccacctcccaaccttgttccaggtggccatagtcagtcaccatgtgtgggctcagggacccccaggaccaggatgtgtctcagcctggagaaatggtgggggggcagtgtctagggactagagtgagaagtaggggagctactgatttggggcaaagtgaaacctctgcttccagacttcagaaacaaatctcagaagacaagctgacctgacaagtactatgtgtgtgcatgtctgtatgtgtgttggggcggtgagtgtaaggatgcagtgggagcatggatgctggcatcttagaaccctccctactcccatacctcctcctcttctgggctccccactgtcagacgggctggcaaatgccttgcaggaggtagaggctggacccatggcaagccatttacagaaacccactcggcaccccagtctaacaccacaactaatttcacccaaggttttaagcacgttctttcatcagaccctggcccaatacctatgtatgcaatgctcctcagccctcttctccctgctccagtagtctcccttccaaataaatcacttttctgcctt

SEQ ID NO: 128148 - DNA, 5483 bp, Homo sapiens
  Payload ID: 5092
  Gene Symbol: DUOX1
  Gene Name: dual oxidase 1
  Uniprot ID: Q9NRD9
  ENST ID: ENST00000389037
  CDS Start-End: 155-4810
gcagagctgcagaggcaccggacgagagagggctccgcgggcccagctggcagccaggccggagacaagttgcagtcccgggctctggtgacgccgtggccgcagggtctccattttgggacattctaatccctgagcccctattattttcatcatgggcttctgcctggctctagcatggacacttctggttggggcatggacccctctgggagctcagaaccccatttcgtgggaggtgcagcgatttgatgggtggtacaacaacctcatggagcacagatggggcagcaaaggctcccggctgcagcgcctggtcccagccagctatgcagatggcgtgtaccagcccttgggagaaccccacctgcccaacccccgagaccttagcaacaccatctcaaggggccctgcagggctggcctccctgagaaaccgcacagtgttgggggtcttctttggctatcacgtgctttcagacctggtgagcgtggaaactcccggctgccccgccgagttcctcaacattcgcatcccgcccggagaccccatgttcgaccccgaccagcgcggggacgtggtgctgcccttccagagaagccgctgggaccccgagaccggacggagtcccagcaatccccgggacccggccaaccaggtgacgggctggctggacggcagcgccatctatggttcctcgcattcctggagcgacgcgctgcggagcttctccaggggacagctggcgtcggggcccgaccccgcttttccccgagactcgcagaaccccctgctcatgtgggcggcgcccgaccccgccaccgggcagaacgggccccgggggctgtacgccttcggggcagagagagggaaccgggaacccttcctgcaggcgctgggcctgctctggttccgctaccacaacctgtgggcgcagaggctggcccgccagcacccagactgggaggacgaggagctgttccagcacgcacgcaagagggtcatcgccacctaccagaacatcgctgtgtatgagtggctgcccagcttcctgcagaaaacactcccggagtatacaggataccggccatttctggaccccagcatctcctcagagttcgtggcggcctctgagcagttcctgtccaccatggtgccccctggcgtctacatgagaaatgccagctgccacttccagggggtcatcaatcggaactcaagtgtctccagagctctccgggtctgcaacagctactggagccgtgagcacccaagcctacaaagtgctgaagatgtggatgcactgctgctgggcatggcctcccagatcgcagagcgagaggaccatgtgttggttgaagatgtgcgggatttctggcctgggccactgaagttttcccgcacagaccacctggccagctgcctgcagcggggccgggatctgggcctgccctcttacaccaaggccagggcagcactgggcttgtctcccattacccgctggcaggacatcaaccctgcactctcccggagcaatgacactgtactggaggccacagctgccctgtacaaccaggacttatcctggctagagctgctccctgggggactcctggagagccaccgggaccctggacctctgttcagcaccatcgtccttgaacaatttgtgcggctacgggatggtgaccgctactggtttgagaacaccaggaatgggctgttctccaagaaggagattgaagaaatccgaaataccaccctgcaggacgtgctggtcgctgttatcaacattgaccccagtgctctgcagcccaatgtctttgtctggcataaaggagacccctgtccgcagccgagacagctcagcactgaaggcctgccagcgtgtgctccctctgttgttcgtgactattttgagggcagtggatttggcttcggggtcaccatcgggaccctctgttgcttccctttggtgagcctgctcagtgcctggattgttgcccggctccggatgagaaatttcaagaggctccagggccaggaccgccagagcatcgtgtctgagaagctcgtgggaggcatggaagctttggaatggcaaggccacaaggagccctgccggcccgtgcttgtgtacctgcagcccgggcagatccgtgtggtagatggcaggctcaccgtgctccgcaccatccagctgcagcctccacagaaggtcaacttcgtcctgtccagcaaccgtggacgccgcactctgctgctcaagatccccaaggagtatgacctggtgctgctgtttaacttggaggaagagcggcaggcgctggtggaaaatctccggggagctctgaaggagagcgggttgagcatccaggagtgggagctgcgggagcaggagctgatgagagcagctgtgacacgggagcagcggaggcacctcctggagacctttttcaggcaccttttctcccaggtgctggacatcaaccaggccgacgcagggaccctgcccctggactcctcccagaaggtgcgggaggccctgacctgtgagctgagcagggccgagtttgccgagtccctgggcctcaagccccaggacatgtttgtggagtccatgttctctctggctgacaaggatggcaatggctacctgtccttccgagagttcctggacatcctggtggtcttcatgaaaggctctcctgaggaaaagtctcgccttatgttccgcatgtacgactttgatgggaatggcctcatttccaaggatgagttcatcaggatgctgagatccttcatcgagatctccaacaactgcctgtccaaggcccagctggctgaggtggtggagtccatgttccgggagtcgggattccaggacaaggaggaactgacatgggaagattttcacttcatgctgcgggaccacaatagcgagctccgcttcacgcagctctgtgtcaaaggggtggaggtgcctgaagtcatcaaggacctctgccggcgagcctcctacatcagccaggatatgatctgtccctctcccagagtgagtgcccgctgttcccgcagcgacattgagactgagttgacacctcagagactgcagtgccccatggacacagaccctccccaggagattcggcggaggtttggcaagaaggtaacgtcattccagcccttgctgttcactgaggcgcaccgagagaagttccaacgcagctgtctccaccagacggtgcaacagttcaagcgcttcattgagaactaccggcgccacatcggctgcgtggccgtgttctacgccatcgctggggggcttttcctggagagggcctactactacgcctttgccgcacatcacacgggcatcacagacaccacccgcgtgggaatcatcctgtcgcggggcacagcagccagcatctctttcatgttctcctacatcttgctcaccatgtgccgcaacctcatcaccttcctgcgagaaaccttcctcaaccgctacgtgcccttcgacgccgccgtggacttccatcgcctcattgcctccaccgccatcgtcctcacagtcttacacagtgtgggccatgtggtgaatgtgtacctgttctccatcagccccctcagcgtcctctcttgcctctttcctggcctcttccatgatgatgggtctgagctcccccagaagtattactggtggttcttccagaccgtaccaggcctcacgggggttgtgctgctcctgatcctggccatcatgtatgtctttgcctcccaccacttccgccgccgcagtttccggggcttctggctgacccaccacctctacatcctgctctatgtcctgctcatcatccatggtagctttgccctgatccagctgccccgtttccacatcttcttcctggtcccagcaatcatctatgggggcgacaagctggtgagcctgagccggaagaaggtggagatcagcgtggtgaaggcggagctgctgccctcaggagtgacccacctgcggttccagcggccccagggctttgagtacaagtcagggcagtgggtgcggatcgcttgcctggctctggggaccaccgagtaccaccccttcacactgacctctgcgccccatgaggacacgcttagcctgcacatccgggcagcagggccctggaccactcgcctcagggagatctactcagccccgacgggtgacagatgtgccagatacccaaagctgtaccttgatggaccatttggagagggccaccaggagtggcataagtttgaggtgtcagtgttagtgggagggggcattggggtcaccccttttgcctccatcctcaaagacctggtcttcaagtcatccgtcagctgccaagtgttctgtaagaagatctacttcatctgggtgacgcggacccagcgtcagtttgagtggctggctgacatcatccgagaggtggaggagaatgaccaccaggacctggtgtctgtgcacatctacatcacccagctggctgagaagttcgacctcaggaccactatgctgtacatctgtgagcggcacttccagaaggttctgaaccggagtctattcacaggcctgcgctccatcacccactttggccgtcccccctttgagcccttcttcaactccctgcaggaggtccacccccaggtccggaagatcggggtgtttagctgtggcccccctggcatgaccaagaatgtggaaaaggcctgtcagctcatcaacaggcaggaccggactcacttctcccaccattatgagaacttctaggcccctgcccgggggttctgcccactgcccagttgagcagaggtttgagcccacacctcacctctgttcttcctatttctggctgcctcagccttctctgatttcccacctcccaaccttgttccaggtggccatagtcagtcaccatgtgtgggctcagggacccccaggaccaggatgtgtctcagcctggagaaatggtgggggggcagtgtctagggactagagtgagaagtaggggagctactgatttggggcaaagtgaaacctctgcttccagacttcagaaacaaatctcagaagacaagctgacctgacaagtactatgtgtgtgcatgtctgtatgtgtgttggggcggtgagtgtaaggatgcagtgggagcatggatgctggcatcttagaaccctccctactcccatacctcctcctcttctgggctccccactgtcagacgggctggcaaatgccttgcaggaggtagaggctggacccatggcaagccatttacagaaacccactcggcaccccagtctaacaccacaactaatttcacccaaggttttaagcacgttctttcatcagaccctggcccaatacctatgtatgcaatgctcctcagccctcttctccctgctccagtagtctcccttccaaataaatcacttttctgcc

SEQ ID NO: 128149 - DNA, 4705 bp, Homo sapiens
  Payload ID: 5092
  Gene Symbol: DUOX1
  Gene Name: dual oxidase 1
  ENST ID: ENST00000561220
  CDS Start-End: 111-1445
agctggcagccaggccggagacaagttgcagtcccgggctctggtgacgccgtggccgcagggtctccattttgggacattctaatccctgagcccctattattttcatcatgggcttctgcctggctctagcatggacacttctggttggggcatggacccctctgggagctcagaaccccatttcgtgggaggtgcagcgatttgatgggtggtacaacaacctcatggagcacagatggggcagcaaaggctcccggctgcagcgcctggtcccagccagctatgcagatggcgtgtaccagcccttgggagaaccccacctgcccaacccccgagaccttagcaacaccatctcaaggggccctgcagggctggcctccctgagaaaccgcacagtgttgggggtcttctttggctatcacgtgctttcagacctggtgagcgtggaaactcccggctgccccgccgagttcctcaacattcgcatcccgcccggagaccccatgttcgaccccgaccagcgcggggacgtggtgctgcccttccagagaagccgctgggaccccgagaccggacggagtcccagcaatccccgggacccggccaaccaggtgacgggctggctggacggcagcgccatctatggttcctcgcattcctggagcgacgcgctgcggagcttctccaggggacagctggcgtcggggcccgaccccgcttttccccgagactcgcagaaccccctgctcatgtgggcggcgcccgaccccgccaccgggcagaacgggccccgggggctgtacgccttcggggcagagagagggaaccgggaacccttcctgcaggcgctgggcctgctctggttccgctaccacaacctgtgggcgcagaggctggcccgccagcacccagactgggaggacgaggagctgttccagcacgcacgcaagagggtcatcgccacctaccagaacatcgctgtgtatgagtggctgcccagcttcctgcagaaaacactcccggagtatacaggataccggccatttctggaccccagcatctcctcagagttcgtggcggcctctgagcagttcctgtccaccatggtgccccctggcgtctacatgagaaatgccagctgccacttccagggggtcatcaatcggaactcaagtgtctccagagctctccgggtctgcaacagctactggagccgtgagcacccaagcctacaaagtgctgaagatgtggatgcactgctgctgggcatggcctcccagatcgcagagcgagaggaccatgtgttggttgaagatgtgcggggtactggaggccacagctgccctgtacaaccaggacttatcctggctagagctgctccctgggggactcctggagagccaccgggaccctggacctctgttcagcaccatcgtccttgaacaatttgtgcggctacgggatggtgaccgctactggtttgagaacaccaggaatgggctgttctccaagaaggagattgaagaaatccgaaataccaccctgcaggacgtgctggtcgctgttatcaacattgaccccagtgctctgcagcccaatgtctttgtctggcataaagcacctgtggcccagcacccaggacgctggcttcctctgccttcccaggagacccctgtccgcagccgagacagctcagcactgaaggcctgccagcgtgtgctccctctgttgttcgtgactattttgagggcagtggatttggcttcggggtcaccatcgggaccctctgttgcttccctttggtgagcctgctcagtgcctggattgttgcccggctccggatgagaaatttcaagaggctccagggccaggaccgccagagcatcgtgtctgagaagctcgtgggaggcatggaagctttggaatggcaaggccacaaggagccctgccggcccgtgcttgtgtacctgcagcccgggcagatccgtgtggtagatggcaggctcaccgtgctccgcaccatccagctgcagcctccacagaaggtcaacttcgtcctgtccagcaaccgtggacgccgcactctgctgctcaagatccccaaggagtatgacctggtgctgctgtttaacttggaggaagagcggcaggcgctggtggaaaatctccggggagctctgaaggagagcgggttgagcatccaggagtgggagctgcgggagcaggagctgatgagagcagctgtgacacgggagcagcggaggcacctcctggagacctttttcaggcaccttttctcccaggtgctggacatcaaccaggccgacgcagggaccctgcccctggactcctcccagaaggtgcgggaggccctgacctgtgagctgagcagggccgagtttgccgagtccctgggcctcaagccccaggacatgtttgtggagtccatgttctctctggctgacaaggatggcaatggctacctgtccttccgagagttcctggacatcctggtggtcttcatgaaaggctctcctgaggaaaagtctcgccttatgttccgcatgtacgactttgatgggaatggcctcatttccaaggatgagttcatcaggatgctgagatccttcatcgagatctccaacaactgcctgtccaaggcccagctggctgaggtggtggagtccatgttccgggagtcgggattccaggacaaggaggaactgacatgggaagattttcacttcatgctgcgggaccacaatagcgagctccgcttcacgcagctctgtgtcaaaggggtggaggtgcctgaagtcatcaaggacctctgccggcgagcctcctacatcagccaggatatgatctgtccctctcccagagtgagtgcccgctgttcccgcagcgacattgagactgagttgacacctcagagactgcagtgccccatggacacagaccctccccaggagattcggcggaggtttggcaagaaggtaacgtcattccagcccttgctgttcactgaggcgcaccgagagaagttccaacgcagctgtctccaccagacggtgcaacagttcaagcgcttcattgagaactaccggcgccacatcggctgcgtggccgtgttctacgccatcgctggggggcttttcctggagagggcctactactacgcctttgccgcacatcacacgggcatcacagacaccacccgcgtgggaatcatcctgtcgcggggcacagcagccagcatctctttcatgttctcctacatcttgctcaccatgtgccgcaacctcatcaccttcctgcgagaaaccttcctcaaccgctacgtgcccttcgacgccgccgtggacttccatcgcctcattgcctccaccgccatcgtcctcacagtcttacacagtgtgggccatgtggtgaatgtgtacctgttctccatcagccccctcagcgtcctctcttgcctctttcctggcctcttccatgatgatgggtctgagctcccccagaagtattactggtggttcttccagaccgtaccaggcctcacgggggttgtgctgctcctgatcctggccatcatgtatgtctttgcctcccaccacttccgccgccgcagtttccggggcttctggctgacccaccacctctacatcctgctctatgtcctgctcatcatccatggtagctttgccctgatccagctgccccgtttccacatcttcttcctggtcccagcaatcatctatgggggcgacaagctggtgagcctgagccggaagaaggtggagatcagcgtggtgaaggcggagctgctgccctcaggagtgacccacctgcggttccagcggccccagggctttgagtacaagtcagggcagtgggtgcggatcgcttgcctggctctggggaccaccgagtaccaccccttcacactgacctctgcgccccatgaggacacgcttagcctgcacatccgggcagcagggccctggaccactcgcctcagggagatctactcagccccgacgggtgacagatgtgccagatacccaaagctgtaccttgatggaccatttggagagggccaccaggagtggcataagtttgaggtgtcagtgttagtgggagggggcattggggtcaccccttttgcctccatcctcaaagacctggtcttcaagtcatccgtcagctgccaagtgttctgtaagaagatctacttcatctgggtgacgcggacccagcgtcagtttgagtggctggctgacatcatccgagaggtggaggagaatgaccaccaggacctggtgtctgtgcacatctacatcacccagctggctgagaagttcgacctcaggaccactatgctgtacatctgtgagcggcacttccagaaggttctgaaccggagtctattcacaggcctgcgctccatcacccactttggccgtcccccctttgagcccttcttcaactccctgcaggaggtccacccccaggtccggaagatcggggtgtttagctgtggcccccctggcatgaccaagaatgtggaaaaggcctgtcagctcatcaacaggcaggaccggactcacttctcccaccattatgagaacttctaggcccctgcccgggggttctgcccactgcccagttgagcagaggtttgagcccacacctcacctct

SEQ ID NO: 128150 - DNA, 4539 bp, Homo sapiens
  Payload ID: 5092
  Gene Symbol: DUOX1
  Gene Name: dual oxidase 1
  Uniprot ID: Q9NRD9
  ENST ID: ENST00000561166
  CDS Start-End: 274-3867
aaggtcaaagtaaaattttaagatcccttgtgcttgtatagacctctgtcaggcagcactgacagaggggacacccctcaccctgagtggggaatcaacctgcagaagaggaatgtcccaccggtttgggagcaaacagcaggactgggtgggctcagggataaggatgatggtgtggagggagccggctgtctaacctctgaccccattaaccacacccctttcctccccacccccaacctataaagcacccaagcctacaaagtgctgaagatgtggatgcactgctgctgggcatggcctcccagatcgcagagcgagaggaccatgtgttggttgaagatgtgcggggtgagtctgaggctgtccctgcaggttgtgaactcctggcctctgggaagaggctcagctggacttccagaaccagatttctggcctgggccactgaagttttcccgcacagaccacctggccagctgcctgcagcggggccgggatctgggcctgccctcttacaccaaggccagggcagcactgggcttgtctcccattacccgctggcaggacatcaaccctgcactctcccggagcaatgacactgtactggaggccacagctgccctgtacaaccaggacttatcctggctagagctgctccctgggggactcctggagagccaccgggaccctggacctctgttcagcaccatcgtccttgaacaatttgtgcggctacgggatggtgaccgctactggtttgagaacaccaggaatgggctgttctccaagaaggagattgaagaaatccgaaataccaccctgcaggacgtgctggtcgctgttatcaacattgaccccagtgctctgcagcccaatgtctttgtctggcataaaggagacccctgtccgcagccgagacagctcagcactgaaggcctgccagcgtgtgctccctctgttgttcgtgactattttgagggcagtggatttggcttcggggtcaccatcgggaccctctgttgcttccctttggtgagcctgctcagtgcctggattgttgcccggctccggatgagaaatttcaagaggctccagggccaggaccgccagagcatcgtgtctgagaagctcgtgggaggcatggaagctttggaatggcaaggccacaaggagccctgccggcccgtgcttgtgtacctgcagcccgggcagatccgtgtggtagatggcaggctcaccgtgctccgcaccatccagctgcagcctccacagaaggtcaacttcgtcctgtccagcaaccgtggacgccgcactctgctgctcaagatccccaaggagtatgacctggtgctgctgtttaacttggaggaagagcggcaggcgctggtggaaaatctccggggagctctgaaggagagcgggttgagcatccaggagtgggagctgcgggagcaggagctgatgagagcagctgtgacacgggagcagcggaggcacctcctggagacctttttcaggcaccttttctcccaggtgctggacatcaaccaggccgacgcagggaccctgcccctggactcctcccagaaggtgcgggaggccctgacctgtgagctgagcagggccgagtttgccgagtccctgggcctcaagccccaggacatgtttgtggagtccatgttctctctggctgacaaggatggcaatggctacctgtccttccgagagttcctggacatcctggtggtcttcatgaaaggctctcctgaggaaaagtctcgccttatgttccgcatgtacgactttgatgggaatggcctcatttccaaggatgagttcatcaggatgctgagatccttcatcgagatctccaacaactgcctgtccaaggcccagctggctgaggtggtggagtccatgttccgggagtcgggattccaggacaaggaggaactgacatgggaagattttcacttcatgctgcgggaccacaatagcgagctccgcttcacgcagctctgtgtcaaaggggtggaggtgcctgaagtcatcaaggacctctgccggcgagcctcctacatcagccaggatatgatctgtccctctcccagagtgagtgcccgctgttcccgcagcgacattgagactgagttgacacctcagagactgcagtgccccatggacacagaccctccccaggagattcggcggaggtttggcaagaaggtaacgtcattccagcccttgctgttcactgaggcgcaccgagagaagttccaacgcagctgtctccaccagacggtgcaacagttcaagcgcttcattgagaactaccggcgccacatcggctgcgtggccgtgttctacgccatcgctggggggcttttcctggagagggcctactactacgcctttgccgcacatcacacgggcatcacagacaccacccgcgtgggaatcatcctgtcgcggggcacagcagccagcatctctttcatgttctcctacatcttgctcaccatgtgccgcaacctcatcaccttcctgcgagaaaccttcctcaaccgctacgtgcccttcgacgccgccgtggacttccatcgcctcattgcctccaccgccatcgtcctcacagtcttacacagtgtgggccatgtggtgaatgtgtacctgttctccatcagccccctcagcgtcctctcttgcctctttcctggcctcttccatgatgatgggtctgagctcccccagaagtattactggtggttcttccagaccgtaccaggcctcacgggggttgtgctgctcctgatcctggccatcatgtatgtctttgcctcccaccacttccgccgccgcagtttccggggcttctggctgacccaccacctctacatcctgctctatgtcctgctcatcatccatggtagctttgccctgatccagctgccccgtttccacatcttcttcctggtcccagcaatcatctatgggggcgacaagctggtgagcctgagccggaagaaggtggagatcagcgtggtgaaggcggagctgctgccctcaggagtgacccacctgcggttccagcggccccagggctttgagtacaagtcagggcagtgggtgcggatcgcttgcctggctctggggaccaccgagtaccaccccttcacactgacctctgcgccccatgaggacacgcttagcctgcacatccgggcagcagggccctggaccactcgcctcagggagatctactcagccccgacgggtgacagatgtgccagatacccaaagctgtaccttgatggaccatttggagagggccaccaggagtggcataagtttgaggtgtcagtgttagtgggagggggcattggggtcaccccttttgcctccatcctcaaagacctggtcttcaagtcatccgtcagctgccaagtgttctgtaagaagatctacttcatctgggtgacgcggacccagcgtcagtttgagtggctggctgacatcatccgagaggtggaggagaatgaccaccaggacctggtgtctgtgcacatctacatcacccagctggctgagaagttcgacctcaggaccactatgctgtacatctgtgagcggcacttccagaaggttctgaaccggagtctattcacaggcctgcgctccatcacccactttggccgtcccccctttgagcccttcttcaactccctgcaggaggtccacccccaggtccggaagatcggggtgtttagctgtggcccccctggcatgaccaagaatgtggaaaaggcctgtcagctcatcaacaggcaggaccggactcacttctcccaccattatgagaacttctaggcccctgcccgggggttctgcccactgcccagttgagcagaggtttgagcccacacctcacctctgttcttcctatttctggctgcctcagccttctctgatttcccacctcccaaccttgttccaggtggccatagtcagtcaccatgtgtgggctcagggacccccaggaccaggatgtgtctcagcctggagaaatggtgggggggcagtgtctagggactagagtgagaagtaggggagctactgatttggggcaaagtgaaacctctgcttccagacttcagaaacaaatctcagaagacaagctgacctgacaagtactatgtgtgtgcatgtctgtatgtgtgttggggcggtgagtgtaaggatgcagtgggagcatggatgctggcatcttagaaccctccctactcccatacctcctcctcttctgggctccccactgtcagacgggctggcaaatgccttgcaggaggtagaggctggacccatggcaagccatttacagaaacccactcggcaccccagtctaacaccacaactaatttcacccaaggttttaagcacgttctttcatcagaccctggcccaatacctatgtatgcaatgctcctcagccctcttctccctgctccagtagtctcccttccaaataaatcacttttctgc

SEQ ID NO: 128151 - DNA, 436 bp, Homo sapiens
  Payload ID: 5092
  Gene Symbol: DUOX1
  Gene Name: dual oxidase 1
  ENST ID: ENST00000558322
  CDS Start-End: 308-436
agagagggctccgcgggcccagctggcagccaggccggagacaagttgcagtcccgggctctggtgacgccgtggccgcagctggaagaggaaaacaaggatcagattggagaagtgatttatctaagatcccacagtggactgggagcagcactgagacctcagcctagtctcctgatccccaagcagggccctgcctaaggaacacactctgcagagtgctgggccaaagcagggttttccaactaatcttagaagggtctccattttgggacattctaatccctgagcccctattattttcatcatgggcttctgcctggctctagcatggacacttctggttggggcatggacccctctgggagctcagaaccccatttcgtgggaggtgcagcgatttgatgggtggtacaacaacctcatggagcacaga

SEQ ID NO: 128152 - DNA, 6533 bp, Homo sapiens
  Payload ID: 5093
  Gene Symbol: DUOX2
  Gene Name: dual oxidase 2
  ENST ID: ENST00000389039
  CDS Start-End: 387-5033
ggttctgcgggttggcgctgagtttggaagtcgcgcgggaccccttttatagcagcgtgggcgacgtgccacacgggtgtcccagcccaggggctggtctgagctggaagaggttgtgcaaataagggccccacctccacggcaggagggtgagccctaggtccagatgctcacactggcgcaggtctgtcctgagccgacacctgcacagtggcgagaccaaggacccagagagaaaggtgagagtgcagccggggaggctgaggatcggcggagctggaagagtgagggtgaaggcaagaagtagagcacagaagcaaagattttaagaggaaagaagacatctgaacccaacaccaccctaaaccacaggctgcagggttggcatgctccgtgcaagaccagaggcactgatgctcctgggagctcttctgactggatccctgggtccatcgggcagtcaggacgcactctcactgccctgggaagtgcagcgctatgacggctggtttaacaacctgaggcaccacgagcgtggtgctgttggctgccggttgcagcgccgcgtaccagccaattacgccgacggtgtgtatcaggctctggaggagccgcagctgcccaacccgcgccggctcagcaacgcagccacgcggggcatagccggcctgccgtcgctccacaaccgcaccgtactgggggtcttctttggctaccatgttctttccgacgtggtgagcgtggaaacgcccggttgccccgccgagttcctcaacatccgcatcccacctggagaccccgtgttcgaccccgaccagcgcggggacgtggtgctgcccttccagaggagccgctgggaccccgagaccggacggagtcccagcaacccccgggacctggccaaccaggtgacgggctggctggacggcagcgccatctatggctcctcgcactcctggagcgacgcgctgcggagcttctcggggggacagctggcgtcggggcccgaccccgctttcccccgagactcgcagaaccccctgctcatgtgggcggcgcccgaccccgccaccgggcagaacgggccccgggggctgtacgccttcggggcagagagagggaaccgggaacccttcctgcaggcgctgggcctgctctggttccgctaccacaacctgtgggcgcagaggctggcccgccagcacccagactgggaggacgaggagctgttccagcacgcacgcaagagggtcatcgccacctaccagaacatcgctgtgtatgagtggctgcccagcttcctgcagaaaacactcccggagtatacaggataccgtcctttcctagaccccagcatctccccggaatttgtggtggcctctgagcagttcttctctaccatggtgccccctggtgtctacatgagaaatgccagctgtcatttccggaaggtcctgaacaagggttttcaaagctcccaagctctcagggtctgcaacaactactggattcgggagaaccccaatctgaacagtacccaggaggtgaatgagctgctgctgggaatggcctcccagatttcggagttggaggacaacatagtggttgaagatctgagggattactggcctggccctggcaaattctcccgtacagactatgtggccagcagcatccaacgtggccgagatatggggctgcccagctatagccaggccctgctggcctttgggctggacatcccaaggaactggagtgatctcaaccctaatgtggacccccaggtgctggaggccacagctgccctgtacaaccaggacctatcccagctagagctgctccttggggggctcctggagagccatggggaccctggacccctgttcagtgccattgtcctcgaccagtttgtacggctgcgggatggtgaccgctactggtttgagaacaccaggaatgggctgttctccaagaaggagattgaagacatccgaaataccaccctgcgggacgtgctggtcgctgttatcaacattgaccccagtgccctgcagcccaatgtctttgtctggcataaaggtgcaccctgccctcaacctaagcagctcacaactgacggcctgccccagtgtgcacccctgactgtgcttgacttctttgaaggcagcagccctggttttgccatcaccatcattgctctctgctgccttcccttagtgagtctgcttctctctggagtggtggcctatttccggggccgagaacacaagaagctacaaaagaaactcaaagagagcgtgaagaaggaagcagccaaagatggagtgccagcgatggagtggccaggccccaaggagaggagcagtcccatcatcatccagctgctgtcagacaggtgtctgcaggtcctgaacaggcatctcactgtgctccgtgtggtccagctgcagcctctgcagcaggtcaacctcatcctgtccaacaaccgaggatgccgcaccctgctgctcaagatccctaaggagtatgacctggtgctgctgtttagttctgaagaggaacggggcgcctttgtgcagcagctatgggacttctgcgtgcgctgggctctgggcctccatgtggctgagatgagcgagaaggagctatttaggaaggctgtgacaaagcagcagcgggaacgcatcctggagatcttcttcagacacctttttgctcaggtgctggacatcaaccaggccgacgcagggaccctgcccctggactcctcccagaaggtgcgggaggccctgacctgcgagctgagcagggccgagtttgccgagtccctgggcctcaagccccaggacatgtttgtggagtccatgttctctctggctgacaaggatggcaatggctacctgtccttccgagagttcctggacatcctggtggtcttcatgaaaggctccccagaggataagtcccgtctaatgtttaccatgtatgacctggatgagaatggcttcctctccaaggacgaattcttcaccatgatgcgatccttcatcgagatctccaacaactgcctgtccaaggcccagctggccgaggtggtggagtctatgttccgggagtcgggattccaggacaaggaggagctgacatgggaggattttcacttcatgctgcgggaccatgacagcgagctccgcttcacgcagctctgtgtcaaaggtggaggtggaggtggaaatggtattagagatatctttaaacaaaacatcagctgtcgagtctcgttcatcactcggacacctggggagcgctcccacccccagggactggggccccctgccccagaagccccagagctgggaggccctggactgaagaagaggtttggcaaaaaggcagcagtgcccactccccggctgtacacagaggcgctgcaagagaagatgcagcgaggcttcctagcccaaaagctgcagcagtacaagcgcttcgtggagaactaccggaggcacatcgtgtgtgtggcaatcttctcggccatctgtgttggcgtgtttgcagatcgtgcttactactatggctttgcctcgccaccctcggacattgcacagaccaccctcgtgggcatcatcctgtcacgaggcacggcggccagcgtctccttcatgttctcttatatcttgctcaccatgtgccgcaacctcataaccttcctgcgagagactttcctcaaccgctatgtgccttttgatgccgcagtggacttccaccgctggatcgccatggctgctgttgtcctggccattttgcacagtgctggccacgcagtcaatgtctacatcttctcagtcagcccactcagcctgctggcctgcatattccccaacgtctttgtgaatgatgggtccaagcttccccagaagttctattggtggttcttccagaccgtcccaggtatgacaggtgtgcttctgctcctggtcctggccatcatgtatgtcttcgcctcccaccacttccgccgccgcagcttccggggcttctggctgacccaccacctctacatcctgctctatgccctgctcatcatccatggcagctatgctctgatccagctgcccactttccacatctacttcctggtcccggcaatcatctatggaggtgacaagctggtgagcctgagccggaagaaggtggagatcagcgtggtgaaggcggagctgctgccctcaggagtgacctacctgcaattccagaggccccaaggctttgagtacaagtcaggacagtgggtgcggatcgcctgcctggctctggggaccaccgagtaccaccccttcacactgacctccgcgccccatgaggacacactcagcctgcacatccgggcagtggggccctggaccactcgcctcagggagatctactcatccccaaagggcaatggctgtgctggatacccaaagctgtaccttgatggaccgtttggagagggccatcaggagtggcataaatttgaggtgtcagtgttggtgggagggggcattggggtcaccccctttgcctccatcctcaaagacctggtcttcaagtcatccttgggcagccaaatgctgtgtaagaagatctacttcatctgggtgacacggacccagcgtcagtttgagtggctggctgacatcatccaagaggtggaggagaacgaccaccaggacctggtgtctgtgcacatttatgtcacccagctggctgagaagttcgacctcaggaccaccatgctatacatctgcgagcggcacttccagaaagtgctgaaccggagtctgttcacgggcctgcgctccatcacccactttggccgtccccccttcgagcccttcttcaactccctgcaggaggtccacccacaggtgcgcaagatcggggtgttcagctgcggccctccaggaatgaccaagaatgtagagaaggcctgtcagctcgtcaacaggcaggaccgagcccacttcatgcaccactatgagaacttctgagcctgtcctccctggctgctgcttccagtatcctgccttctcttctgtgcacctaagttgcccagccctgctggcaatctctccatcagaatccaccttaggcctcagctggagggctgcagagcccctcccaatattgggagaatattgacccagacaattatacaaatgagaaaaggcaggagactatgttctacaattgcagtgcatgatgattataagtccacctgtttatcaacggcaccattcctgcagccctccagacttcctgcccttagcaagtgcgcaaccagtcaggatctcccaaagaagataaagaccactcctcaccccagctcaagccatggcaggcgtggcaagcaaagtggggaggagacagtccctgcttgtgacaagtgtggaggtgaaaaggtacaatagtgcttgtctccgatagctccccacatctctaattgacttccacaaaatcgatgcgttgctttggtatttgcttggactgacatttgagggaggaggaggctgggatcctctggctgagaatctcctcagagcccagtgcagaagctgtgatgcttagaacctggacagcccgactgcctcaactctgtctccaggtctattccctccagctccaaaaggagcagccctacttctaccccttcccgtccccaaagtgtcagcaactttgaggagggcaccaggaaacaaagatgcctccccagccctgatattcttgatgtcaccagtgatacccactgccctgacccctgggcaggcccctctctgcatctactggagtggtccctgggctctggggctgaaggattccagcctctctgccagatattcagtactcgatctcaattcccctcttccacaagagttgggtgaccagctgtcctagtttgcccaggactctccctgttttagcactgaaagtctcttgccccaggaaaccccatcagtcccaggcagattgggacagctggtcaccttacgcaagagccaggctgaaacatcccctccatactcagctctttaacttttcttttcctttttcatcgggctctttcctaaaaagctgagctgtaaaatattttacatcgaggtataataaataatcatgtacatgttttaccaccacccaggtcaagacatagaatgtttcaacatttccatcaccccagaaactccccttgtacccccttccacttcgtctcccctagctcctagaagcaaccactgatgtgatttctaccaaatccagttttggtcctactaaatatactcttttgagactggcctcttttactcaccataatgcctttgtaattcatccatgctgttgtgtgtatcagcagtttgttccttttcattgctgagtagtattctattgtagagatgtaccacagtttgtttattcttctgttgatggacgtttgggttgtttctaattttgaatgattataaataaaaattctgtgagtgttcttgtaccta

SEQ ID NO: 128153 - DNA, 6345 bp, Homo sapiens
  Payload ID: 5093
  Gene Symbol: DUOX2
  Gene Name: dual oxidase 2
  Uniprot ID: Q9NRD8
  ENST ID: ENST00000603300
  CDS Start-End: 204-4850
ggtctgtcctgagccgacacctgcacagtggcgagaccaaggacccagagagaaaggtgagagtgcagccggggaggctgaggatcggcggagctggaagagtgagggtgaaggcaagaagtagagcacagaagcaaagattttaagaggaaagaagacatctgaacccaacaccaccctaaaccacaggctgcagggttggcatgctccgtgcaagaccagaggcactgatgctcctgggagctcttctgactggatccctgggtccatcgggcaatcaggacgcactctcactgccctgggaagtgcagcgctatgacggctggtttaacaacctgaggcaccacgagcgtggtgctgttggctgccggttgcagcgccgcgtaccagccaattacgccgacggtgtgtatcaggctctggaggagccgcagctgcccaacccgcgccggctcagcaacgcagccacgcggggcatagccggcctgccgtcgctccacaaccgcaccgtactgggggtcttctttggctaccatgttctttccgacgtggtgagcgtggaaacgcccggttgccccgccgagttcctcaacatccgcatcccacctggagaccccgtgttcgaccccgaccagcgcggggacgtggtgctgcccttccagaggagccgctgggaccccgagaccggacggagtcccagcaacccccgggacctggccaaccaggtgacgggctggctggacggcagcgccatctatggctcctcgcactcctggagcgacgcgctgcggagcttctcggggggacagctggcgtcggggcccgaccccgctttcccccgagactcgcagaaccccctgctcatgtgggcggcgcccgaccccgccaccgggcagaacgggccccgggggctgtacgccttcggggcagagagagggaaccgggaacccttcctgcaggcgctgggcctgctctggttccgctaccacaacctgtgggcgcagaggctggcccgccagcacccagactgggaggacgaggagctgttccagcacgcacgcaagagggtcatcgccacctaccagaacatcgctgtgtatgagtggctgcccagcttcctgcagaaaacactcccggagtatacaggataccgtcctttcctagaccccagcatctccccggaatttgtggtggcctctgagcagttcttctctaccatggtgccccctggtgtctacatgagaaatgccagctgtcatttccggaaggtcctgaacaagggttttcaaagctcccaagctctcagggtctgcaacaactactggattcgggagaaccccaatctgaacagtacccaggaggtgaatgagctgctgctgggaatggcctcccagatttcggagttggaggacaacatagtggttgaagatctgagggattactggcctggccctggcaaattctcccgtacagactatgtggccagcagcatccaacgtggccgagatatggggctgcccagctatagccaggccctgctggcctttgggctggacatcccaaggaactggagtgatctcaaccctaatgtggacccccaggtgctggaggccacagctgccctgtacaaccaggacctatcccagctagagctgctccttggggggctcctggagagccatggggaccctggacccctgttcagtgccattgtcctcgaccagtttgtacggctgcgggatggtgaccgctactggtttgagaacaccaggaatgggctgttctccaagaaggagattgaagacatccgaaataccaccctgcgggacgtgctggtcgctgttatcaacattgaccccagtgccctgcagcccaatgtctttgtctggcataaaggtgcaccctgccctcaacctaagcagctcacaactgacggcctgccccagtgtgcacccctgactgtgcttgacttctttgaaggcagcagccctggttttgccatcaccatcattgctctctgctgccttcccttagtgagtctgcttctctctggagtggtggcctatttccggggccgagaacacaagaagctacaaaagaaactcaaagagagcgtgaagaaggaagcagccaaagatggagtgccagcgatggagtggccaggccccaaggagaggagcagtcccatcatcatccagctgctgtcagacaggtgtctgcaggtcctgaacaggcatctcactgtgctccgtgtggtccagctgcagcctctgcagcaggtcaacctcatcctgtccaacaaccgaggatgccgcaccctgctgctcaagatccctaaggagtatgacctggtgctgctgtttagttctgaagaggaacggggcgcctttgtgcagcagctatgggacttctgcgtgcgctgggctctgggcctccatgtggctgagatgagcgagaaggagctatttaggaaggctgtgacaaagcagcagcgggaacgcatcctggagatcttcttcagacacctttttgctcaggtgctggacatcaaccaggccgacgcagggaccctgcccctggactcctcccagaaggtgcgggaggccctgacctgcgagctgagcagggccgagtttgccgagtccctgggcctcaagccccaggacatgtttgtggagtccatgttctctctggctgacaaggatggcaatggctacctgtccttccgagagttcctggacatcctggtggtcttcatgaaaggctccccagaggataagtcccgtctaatgtttaccatgtatgacctggatgagaatggcttcctctccaaggacgaattcttcaccatgatgcgatccttcatcgagatctccaacaactgcctgtccaaggcccagctggccgaggtggtggagtctatgttccgggagtcgggattccaggacaaggaggagctgacatgggaggattttcacttcatgctgcgggaccatgacagcgagctccgcttcacgcagctctgtgtcaaaggtggaggtggaggtggaaatggtattagagatatctttaaacaaaacatcagctgtcgagtctcgttcatcactcggacacctggggagcgctcccacccccagggactggggccccctgccccagaagccccagagctgggaggccctggactgaagaagaggtttggcaaaaaggcagcagtgcccactccccggctgtacacagaggcgctgcaagagaagatgcagcgaggcttcctagcccaaaagctgcagcagtacaagcgcttcgtggagaactaccggaggcacatcgtgtgtgtggcaatcttctcggccatctgtgttggcgtgtttgcagatcgtgcttactactatggctttgcctcgccaccctcggacattgcacagaccaccctcgtgggcatcatcctgtcacgaggcacggcggccagcgtctccttcatgttctcttatatcttgctcaccatgtgccgcaacctcataaccttcctgcgagagactttcctcaaccgctatgtgccttttgatgccgcagtggacttccaccgctggatcgccatggctgctgttgtcctggccattttgcacagtgctggccacgcagtcaatgtctacatcttctcagtcagcccactcagcctgctggcctgcatattccccaacgtctttgtgaatgatgggtccaagcttccccagaagttctattggtggttcttccagaccgtcccaggtatgacaggtgtgcttctgctcctggtcctggccatcatgtatgtcttcgcctcccaccacttccgccgccgcagcttccggggcttctggctgacccaccacctctacatcctgctctatgccctgctcatcatccatggcagctatgctctgatccagctgcccactttccacatctacttcctggtcccggcaatcatctatggaggtgacaagctggtgagcctgagccggaagaaggtggagatcagcgtggtgaaggcggagctgctgccctcaggagtgacctacctgcaattccagaggccccaaggctttgagtacaagtcaggacagtgggtgcggatcgcctgcctggctctggggaccaccgagtaccaccccttcacactgacctccgcgccccatgaggacacactcagcctgcacatccgggcagtggggccctggaccactcgcctcagggagatctactcatccccaaagggcaatggctgtgctggatacccaaagctgtaccttgatggaccgtttggagagggccatcaggagtggcataaatttgaggtgtcagtgttggtgggagggggcattggggtcaccccctttgcctccatcctcaaagacctggtcttcaagtcatccttgggcagccaaatgctgtgtaagaagatctacttcatctgggtgacacggacccagcgtcagtttgagtggctggctgacatcatccaagaggtggaggagaacgaccaccaggacctggtgtctgtgcacatttatgtcacccagctggctgagaagttcgacctcaggaccaccatgctatacatctgcgagcggcacttccagaaagtgctgaaccggagtctgttcacgggcctgcgctccatcacccactttggccgtccccccttcgagcccttcttcaactccctgcaggaggtccacccacaggtgcgcaagatcggggtgttcagctgcggccctccaggaatgaccaagaatgtagagaaggcctgtcagctcgtcaacaggcaggaccgagcccacttcatgcaccactatgagaacttctgagcctgtcctccctggctgctgcttccagtatcctgccttctcttctgtgcacctaagttgcccagccctgctggcaatctctccatcagaatccaccttaggcctcagctggagggctgcagagcccctcccaatattgggagaatattgacccagacaattatacaaatgagaaaaggcaggagactatgttctacaattgcagtgcatgatgattataagtccacctgtttatcaacggcaccattcctgcagccctccagacttcctgcccttagcaagtgcgcaaccagtcaggatctcccaaagaagataaagaccactcctcaccccagctcaagccatggcaggcgtggcaagcaaagtggggaggagacagtccctgcttgtgacaagtgtggaggtgaaaaggtacaatagtgcttgtctccgatagctccccacatctctaattgacttccacaaaatcgatgcgttgctttggtatttgcttggactgacatttgagggaggaggaggctgggatcctctggctgagaatctcctcagagcccagtgcagaagctgtgatgcttagaacctggacagcccgactgcctcaactctgtctccaggtctattccctccagctccaaaaggagcagccctacttctaccccttcccgtccccaaagtgtcagcaactttgaggagggcaccaggaaacaaagatgcctccccagccctgatattcttgatgtcaccagtgatacccactgccctgacccctgggcaggcccctctctgcatctactggagtggtccctgggctctggggctgaaggattccagcctctctgccagatattcagtactcgatctcaattcccctcttccacaagagttgggtgaccagctgtcctagtttgcccaggactctccctgttttagcactgaaagtctcttgccccaggaaaccccatcagtcccaggcagattgggacagctggtcaccttacgcaagagccaggctgaaacatcccctccatactcagctctttaacttttcttttcctttttcatcgggctctttcctaaaaagctgagctgtaaaatattttacatcgaggtataataaataatcatgtacatgttttaccaccacccaggtcaagacatagaatgtttcaacatttccatcaccccagaaactccccttgtacccccttccacttcgtctcccctagctcctagaagcaaccactgatgtgatttctaccaaatccagttttggtcctactaaatatactcttttgagactggcctcttttactcaccataatgcctttgtaattcatccatgctgttgtgtgtatcagcagtttgttccttttcattgctgagtagtattctattgtagagatgtaccacagtttgtttattcttctgttgatggacgtttgggttgtttctaattttgaatgattataaataaaaattctgtgagtgttcttgt

SEQ ID NO: 128154 - DNA, 1996 bp, Homo sapiens
  Payload ID: 5094
  Gene Symbol: DUOXA1
  Gene Name: dual oxidase maturation factor 1
  Uniprot ID: Q1HG43
  ENST ID: ENST00000267803
  CDS Start-End: 401-1852
cgcgcgaggtgagacggcgagggctcccggggcgcaggtagagatgttccgtcggtgccgaaggcccggctagtgcggttgtgtggacggcgaaaaaaaccaggccaggcgtcaaagcaagtcacccatccgacctaaacccctctaagaccccggagtcacgtctccctccggggatcctcgtgaggtcttgggggtcccaccgccctgcgagccgcgcccgcgccccgccagacccggaactgcgtcgctagaacgtcgggacctggttccctctttaatcacacccccgggggcgcttcgtgtgaggttccacgggggaaggcgagaggcgcaggctgccacacacgcactgtttggaagaggggaagcattgccccccctgcaccacctcaccaagatggctactttgggacacacattccccttctatgctggccccaagccaaccttcccgatggacaccactttggccagcatcatcatgatctttctgactgcactggccacgttcatcgtcatcctgcctggcattcggggaaagacgaggctgttctggctgcttcgggtggtgaccagcttattcatcggggctgcaatcctggctgtgaatttcagttctgagtggtctgtgggccaggtcagcaccaacacatcatacaaggccttcagttctgagtggatcagcgctgatattgggctgcaggtcgggctgggtggagtcaacatcacactcacagggacccccgtgcagcagctgaatgagaccatcaattacaacgaggagttcacctggcgcctgggtgagaactatgctgaggagtatgcaaaggctctggagaaggggctgccagaccctgtgttgtacctagctgagaagttcactccaagaagcccatgtggcctataccgccagtaccgcctggcgggacactacacctcagccatgctatgggtggcattcctctgctggctgctggccaatgtgatgctctccatgcctgtgctggtatatggtggctacatgctattggccacgggcatcttccagctgttggctctgctcttcttctccatggccacatcactcacctcaccctgtcccctgcacctgggcgcttctgtgctgcatactcaccatgggcctgccttctggatcacattgaccacaggactgctgtgtgtgctgctgggcctggctatggcggtggcccacaggatgcagcctcacaggctgaaggctttcttcaaccagagtgtggatgaagaccccatgctggagtggagtcctgaggaaggtggactcctgagcccccgctaccggtccatggctgacagtcccaagtcccaggacattcccctgtcagaggcttcctccaccaaggcatactatcgccccaggagactttccctggtgcctgcggatgtccgaggcctcgcgccagcagcgctcagtgcccttcctggagctctcctggcccaggcctggcgggcactgcttcccggcctgcgatgtcccaaggcggggaaggagtccagattgggtccccctcacagtccttggcgctttggtccagaagggtgcgaagagcgctgggccgaacatactggagactcaccacggcccctccgaggaagaggcacaggacgcctgtggcggtggggatcgaaagaaaggagggcatgtggagtcagggctatgttgcccaggctggtctcgaactctggcctcaaacgaccttcctgcctcgacctcccaaagtgctgggattacaggcgtgatgcccgggccttcttccatcttttggagcctaccccttgtgttacctcccgccacacacctctaatctgaattacatgaaacacggcaagacaccaaacccttctgagccccccacttttcatctgtaaaatggtcataacagtgcctgtttctgcgaactattgagaggggcaaatagggtaatagatgtgaattcattctgtaaactggaaa

SEQ ID NO: 128155 - DNA, 1317 bp, Homo sapiens
  Payload ID: 5094
  Gene Symbol: DUOXA1
  Gene Name: dual oxidase maturation factor 1
  ENST ID: ENST00000430224
  CDS Start-End: 1-1317
atggctactttgggacacacattccccttctatgctggccccaagccaaccttcccgatggacaccactttggccagcatcatcatgatctttctgactgcactggccacgttcatcgtcatcctgcctggcattcggggaaagacgaggctgttctggctgcttcgggtggtgaccagcttattcatcggggctgcaatcctggggacccccgtgcagcagctgaatgagaccatcaattacaacgaggagttcacctggcgcctgggtgagaactatgctgaggagtatgcaaaggctctggagaaggggctgccagaccctgtgttgtacctagctgagaagttcactccaagaagcccatgtggcctataccgccagtaccgcctggcgggacactacacctcagccatgctatgggtggcattcctctgctggctgctggccaatgtgatgctctccatgcctgtgctggtatatggtggctacatgctattggccacgggcatcttccagctgttggctctgctcttcttctccatggccacatcactcacctcaccctgtcccctgcacctgggcgcttctgtgctgcatactcaccatgggcctgccttctggatcacattgaccacaggactgctgtgtgtgctgctgggcctggctatggcggtggcccacaggatgcagcctcacaggctgaaggctttcttcaaccagagtgtggatgaagaccccatgctggagtggagtcctgaggaaggtggactcctgagcccccgctaccggtccatggctgacagtcccaagtcccaggacattcccctgtcagaggcttcctccaccaaggcatactatcgccccaggagactttccctggtgcctgcggatgtccgaggcctcgcgccagcagcgctcagtgcccttcctggagctctcctggcccaggcctggcgggcactgcttcccggcctgcgatgtcccaaggcggggaaggagtccagattgggtccccctcacagtccttggcgctttggtccagaagggtgcgaagagcgctgggccgaacatactggagactcaccacggcccctccgaggaagaggcacaggacgcctgtggcggtggggatcgaaagaaaggagggcatgtggagtcagggctatgttgcccaggctggtctcgaactctggcctcaaacgaccttcctgcctcgacctcccaaagtgctgggattacaggcgtgatgcccgggccttcttccatcttttggagcctaccccttgtgttacctcccgccacacacctctaatctga

SEQ ID NO: 128156 - DNA, 572 bp, Homo sapiens
  Payload ID: 5094
  Gene Symbol: DUOXA1
  Gene Name: dual oxidase maturation factor 1
  ENST ID: ENST00000559226
  CDS Start-End: 358-572
gcttccagcggacggcagcgcgcgaggtgagacggcgagggctcccggggcgcagaccaggccaggcgtcaaagcaagtcacccatccgacctaaacccctctaagaccccggagtcacgtctccctccggggatcctcgtgaggtcttgggggtcccaccgccctgcgagccgcgcccgcgccccgccagacccggaactgcgtcgctagaacgtcgggacctggttccctctttaatcacacccccgggggcgcttcgtgtgaggttccacgggggaaggcgagaggcgcaggctgccacacacgcactgtttggaagaggggaagcattgccccccctgcaccacctcaccaagatggctactttgggacacacattccccttctatgctggccccaagccaaccttcccgatggacaccactttggccagcatcatcatgatctttctgactgcactggccacgttcatcgtcatcctgcctggcattcggggaaagacgaggctgttctggctgcttcgggtggtgaccagcttattcatcggggctgcaatcctggggacccccgt

SEQ ID NO: 128157 - DNA, 641 bp, Homo sapiens
  Payload ID: 5094
  Gene Symbol: DUOXA1
  Gene Name: dual oxidase maturation factor 1
  ENST ID: ENST00000559644
  CDS Start-End: 595-641
agccacggggcggggcgcagtggggcgggatggagtctggcgcctggggaggcgcggaggtgcttccagcggacggcagcgcgcgagaccaggccaggcgtcaaagcaagtcacccatccgacctaaacccctctaagaccccggagtcacgtctccctccggggatcctcgtgaggtcttgggggtcccaccgccctgcgagccgcgcccgcgccccgccagacccggaactgcgtcgctagcccttctctgtaccaggccgggagagggaggcggcgccgcagagcctcgggtgcagtctgagaagtttgggagtgacttgaagagtgactggaagcaccccagacccggtttgtccggtcacagccgggtccttacgtgagttaggagaggagtgggggtcggacgggagccccactgagagtaagggcgcgcgtttgttcacagaacgtcgggacctggttccctctttaatcacacccccgggggcgcttcgtgtgaggttccacgggggaaggcgagaggcgcaggctgccacacacgcactgtttggaagaggggaagcattgccccccctgcaccacctcaccaagatggctactttgggacacacattccccttctatgctggccccaagcc

SEQ ID NO: 128158 - DNA, 532 bp, Homo sapiens
  Payload ID: 5094
  Gene Symbol: DUOXA1
  Gene Name: dual oxidase maturation factor 1
  ENST ID: ENST00000558851
  CDS Start-End: 495-532
agcgcgcgaggtgagacggcgagggctcccggggcgcaggtagagatgttccgtcggtgccgaaggcccggctagtgcggttgtgtggacggcgaaaaaaaccaggccaggcgtcaaagcaagtcacccatccgacctaaacccctctaagaccccggagtcacgtctccctccggggatcctcgtgaggtcttgggggtcccaccgccctgcgagccgcgcccgcgccccgccagacccggaactgcgtcgctaggccgggagagggaggcggcgccgcagagcctcgggtgcagtctgagaagtttgggagtgacttgaagagtgactggaagcaccccagacccgaacgtcgggacctggttccctctttaatcacacccccgggggcgcttcgtgtgaggttccacgggggaaggcgagaggcgcaggctgccacacacgcactgtttggaagaggggaagcattgccccccctgcaccacctcaccaagatggctactttgggacacacattccccttctatgctgg

SEQ ID NO: 128159 - DNA, 578 bp, Homo sapiens
  Payload ID: 5094
  Gene Symbol: DUOXA1
  Gene Name: dual oxidase maturation factor 1
  ENST ID: ENST00000558377
  CDS Start-End: 361-578
atggagtctggcgcctggggaggcgcggaggtgcttccagcggacggcagcgcgcgagaccaggccaggcgtcaaagcaagtcacccatccgacctaaacccctctaagaccccggagtcacgtctccctccggggatcctcgtgaggtcttgggggtcccaccgccctgcgagccgcgcccgcgccccgccagacccggaactgcgtcgctagaacgtcgggacctggttccctctttaatcacacccccgggggcgcttcgtgtgaggttccacgggggaaggcgagaggcgcaggctgccacacacgcactgtttggaagaggggaagcattgccccccctgcaccacctcaccaagatggctactttgggacacacattccccttctatgctggccccaagccaaccttcccgatggacaccactttggccagcatcatcatgatctttctgactgcactggccacgttcatcgtcatcctgcctggcattcggggaaagacgaggctgttctggctgcttcgggtggtgaccagcttattcatcggggctgcaatcctggctgtgaatttcag

SEQ ID NO: 128160 - DNA, 1965 bp, Homo sapiens
  Payload ID: 5094
  Gene Symbol: DUOXA1
  Gene Name: dual oxidase maturation factor 1
  Uniprot ID: Q1HG43
  ENST ID: ENST00000559014
  CDS Start-End: 373-1824
agcgcgcgaggtgagacggcgagggctcccggggcgcagtccaaggccatcgatcacctgccacccacagaccaggccaggcgtcaaagcaagtcacccatccgacctaaacccctctaagaccccggagtcacgtctccctccggggatcctcgtgaggtcttgggggtcccaccgccctgcgagccgcgcccgcgccccgccagacccggaactgcgtcgctagaacgtcgggacctggttccctctttaatcacacccccgggggcgcttcgtgtgaggttccacgggggaaggcgagaggcgcaggctgccacacacgcactgtttggaagaggggaagcattgccccccctgcaccacctcaccaagatggctactttgggacacacattccccttctatgctggccccaagccaaccttcccgatggacaccactttggccagcatcatcatgatctttctgactgcactggccacgttcatcgtcatcctgcctggcattcggggaaagacgaggctgttctggctgcttcgggtggtgaccagcttattcatcggggctgcaatcctggctgtgaatttcagttctgagtggtctgtgggccaggtcagcaccaacacatcatacaaggccttcagttctgagtggatcagcgctgatattgggctgcaggtcgggctgggtggagtcaacatcacactcacagggacccccgtgcagcagctgaatgagaccatcaattacaacgaggagttcacctggcgcctgggtgagaactatgctgaggagtatgcaaaggctctggagaaggggctgccagaccctgtgttgtacctagctgagaagttcactccaagaagcccatgtggcctataccgccagtaccgcctggcgggacactacacctcagccatgctatgggtggcattcctctgctggctgctggccaatgtgatgctctccatgcctgtgctggtatatggtggctacatgctattggccacgggcatcttccagctgttggctctgctcttcttctccatggccacatcactcacctcaccctgtcccctgcacctgggcgcttctgtgctgcatactcaccatgggcctgccttctggatcacattgaccacaggactgctgtgtgtgctgctgggcctggctatggcggtggcccacaggatgcagcctcacaggctgaaggctttcttcaaccagagtgtggatgaagaccccatgctggagtggagtcctgaggaaggtggactcctgagcccccgctaccggtccatggctgacagtcccaagtcccaggacattcccctgtcagaggcttcctccaccaaggcatactatcgccccaggagactttccctggtgcctgcggatgtccgaggcctcgcgccagcagcgctcagtgcccttcctggagctctcctggcccaggcctggcgggcactgcttcccggcctgcgatgtcccaaggcggggaaggagtccagattgggtccccctcacagtccttggcgctttggtccagaagggtgcgaagagcgctgggccgaacatactggagactcaccacggcccctccgaggaagaggcacaggacgcctgtggcggtggggatcgaaagaaaggagggcatgtggagtcagggctatgttgcccaggctggtctcgaactctggcctcaaacgaccttcctgcctcgacctcccaaagtgctgggattacaggcgtgatgcccgggccttcttccatcttttggagcctaccccttgtgttacctcccgccacacacctctaatctgaattacatgaaacacggcaagacaccaaacccttctgagccccccacttttcatctgtaaaatggtcataacagtgcctgtttctgcgaactattgagaggggcaaatagggtaatagatgtgaattcattctgtaaactgg

SEQ ID NO: 128161 - DNA, 1568 bp, Homo sapiens
  Payload ID: 5094
  Gene Symbol: DUOXA1
  Gene Name: dual oxidase maturation factor 1
  ENST ID: ENST00000559013
  CDS Start-End: 1-500
acaccactttggccagcatcatcatgatctttctgactgcactggccacgttcatcgtcatcctgcctggcattcggggaaagacgaggctgttctggctgcttcgggtggtgaccagcttattcatcggggctgcaatcctggctgtgaatttcagttctgagtggtctgtgggccaggtcagcaccaacacatcatacaaggccttcagttctgagtggatcagcgctgatattgggctgcaggtcgggctgggtggagtcaacatcacactcacagggacccccgtgcagcagctgaatgagaccatcaattacaacgaggagttcacctggcgcctgggtgagaactatgctgaggagtatgcaaaggctctggagaaggggctgccagaccctgtgttgtacctagctgagaagttcactccaagaagcccatgtggcctataccgccagtaccgcctggcgggacactacacctcagccatgctatgcaggtagaagtacctgggccagtcctcactgggtcctggctctccagggtggcattcctctgctggctgctggccaatgtgatgctctccatgcctgtgctggtatatggtggctacatgctattggccacgggcatcttccagctgttggctctgctcttcttctccatggccacatcactcacctcaccctgtcccctgcacctgggcgcttctgtgctgcatactcaccatgggcctgccttctggatcacattgaccacaggactgctgtgtgtgctgctgggcctggctatggcggtggcccacaggatgcagcctcacaggctgaaggctttcttcaaccagagtgtggatgaagaccccatgctggagtggagtcctgaggaaggtggactcctgagcccccgctaccggtccatggctgacagtcccaagtcccaggacattcccctgtcagaggcttcctccaccaaggcatactgtaaggaggcacaccccaaagatcctgattgtgctttataacattcctccccgtggaggccacctggacttccagtctggctccaaacctcattggcgccccataaaaccagcagaactgccctcagggtggctgttaccagacacccagcaccaatctacagacggagtagaaaaaggaggctctatatactgatgttaaaaaacaaaacaaaacaaaaagccctaagggactgaagagatgctgggcctgtccataaagcctgttgccatgataaggccaagcaggggctagcttatctgcacagcaacccagcctttccgtgctgccttgcctcttcaagatgctattcactgaaacctaacttcacccccataacaccagcagggtgggggttacatatgattctcctatggtttcctctcatccctcggcacctcttgttttcctttttcctgggttccttttgttcttcctttacttctccagcttgtgtggccttttggtacaatgaaagacagcactggaaaggaggggaaaccaaacttctcatcctaggtctaacattaaccaactatgccacattctctt

SEQ ID NO: 128162 - DNA, 441 bp, Homo sapiens
  Payload ID: 5094
  Gene Symbol: DUOXA1
  Gene Name: dual oxidase maturation factor 1
  ENST ID: ENST00000559988
  CDS Start-End: 78-441
gcggacggcagcgcgcgaggtgagacggcgagggctcccggggcgcagcattgccccccctgcaccacctcaccaagatggctactttgggacacacattccccttctatgctggccccaagccaaccttcccgatggacaccactttggccagcatcatcatgatctttctgactgcactggccacgttcatcgtcatcctgcctggcattcggggaaagacgaggctgttctggctgcttcgggtggtgaccagcttattcatcggggctgcaatcctggctgtgaatttcagttctgagtggtctgtgggccaggtcagcaccaacacatcatacaaggccttcagttctgagtggatcagcgctgatattgggctgcaggtcgggctgggtggagtcaacatcacactcacagggacccccgtgcagcagctgaatg

SEQ ID NO: 128163 - DNA, 1678 bp, Homo sapiens
  Payload ID: 5094
  Gene Symbol: DUOXA1
  Gene Name: dual oxidase maturation factor 1
  Uniprot ID: Q1HG43
  ENST ID: ENST00000558422
  CDS Start-End: 397-1293
gcttccagcggacggcagcgcgcgagaccaggccaggcgtcaaagcaagtcacccatccgacctaaacccctctaagaccccggagtcacgtctccctccggggatcctcgtgaggtcttgggggtcccaccgccctgcgagccgcgcccgcgccccgccagacccggaactgcgtcgctagaacgtcgggacctggttccctctttaatcacacccccgggggcgcttcgtgtgaggttccacgggggaaggcgagaggcgcaggctgccacacacgcactgtttggaagaggggaagggctgcacttcctgctttcatccagaccaagttcggatcaagtgggagttcttcaaagagagagtttgcattgccccccctgcaccacctcaccaagatggctactttgggacacacattccccttctatgctggccccaagccaaccttcccgatggacaccactttggccagcatcatcatgatctttctgactgcactggccacgttcatcgtcatcctgcctggcattcggggaaagacgaggctgttctggctgcttcgggtggtgaccagcttattcatcggggctgcaatcctggggacccccgtgcagcagctgaatgagaccatcaattacaacgaggagttcacctggcgcctgggtgagaactatgctgaggagtatgcaaaggctctggagaaggggctgccagaccctgtgttgtacctagctgagaagttcactccaagaagcccatgtggcctataccgccagtaccgcctggcgggacactacacctcagccatgctatgggtggcattcctctgctggctgctggccaatgtgatgctctccatgcctgtgctggtatatggtggctacatgctattggccacgggcatcttccagctgttggctctgctcttcttctccatggccacatcactcacctcaccctgtcccctgcacctgggcgcttctgtgctgcatactcaccatgggcctgccttctggatcacattgaccacaggactgctgtgtgtgctgctgggcctggctatggcggtggcccacaggatgcagcctcacaggctgaaggctttcttcaaccagagtgtggatgaagaccccatgctggagtggagtcctgaggaaggtggactcctgagcccccgctaccggtccatggctgacagtcccaagtcccaggacattcccctgtcagaggcttcctccaccaaggcatactgtaaggaggcacaccccaaagatcctgattgtgctttataacattcctccccgtggaggccacctggacttccagtctggctccaaacctcattggcgccccataaaaccagcagaactgccctcagggtggctgttaccagacacccagcaccaatctacagacggagtagaaaaaggaggctctatatactgatgttaaaaaacaaaacaaaacaaaaagccctaagggactgaagagatgctgggcctgtccataaagcctgttgccatgataaggccaagcaggggctagcttatctgcacagcaacccagcctttccgtgctgccttgcctcttcaagatgctattcactgaaacctaacttcacccccataacaccagcagggtgggggttacatatgattctcctatggtttcctctca

SEQ ID NO: 128164 - DNA, 2684 bp, Homo sapiens
  Payload ID: 5094
  Gene Symbol: DUOXA1
  Gene Name: dual oxidase maturation factor 1
  Uniprot ID: Q1HG43
  ENST ID: ENST00000558996
  CDS Start-End: 56-952
gcttccagcggacggcagcgcgcgagcattgccccccctgcaccacctcaccaagatggctactttgggacacacattccccttctatgctggccccaagccaaccttcccgatggacaccactttggccagcatcatcatgatctttctgactgcactggccacgttcatcgtcatcctgcctggcattcggggaaagacgaggctgttctggctgcttcgggtggtgaccagcttattcatcggggctgcaatcctggggacccccgtgcagcagctgaatgagaccatcaattacaacgaggagttcacctggcgcctgggtgagaactatgctgaggagtatgcaaaggctctggagaaggggctgccagaccctgtgttgtacctagctgagaagttcactccaagaagcccatgtggcctataccgccagtaccgcctggcgggacactacacctcagccatgctatgggtggcattcctctgctggctgctggccaatgtgatgctctccatgcctgtgctggtatatggtggctacatgctattggccacgggcatcttccagctgttggctctgctcttcttctccatggccacatcactcacctcaccctgtcccctgcacctgggcgcttctgtgctgcatactcaccatgggcctgccttctggatcacattgaccacaggactgctgtgtgtgctgctgggcctggctatggcggtggcccacaggatgcagcctcacaggctgaaggctttcttcaaccagagtgtggatgaagaccccatgctggagtggagtcctgaggaaggtggactcctgagcccccgctaccggtccatggctgacagtcccaagtcccaggacattcccctgtcagaggcttcctccaccaaggcatactgtaaggaggcacaccccaaagatcctgattgtgctttataacattcctccccgtggaggccacctggacttccagtctggctccaaacctcattggcgccccataaaaccagcagaactgccctcagggtggctgttaccagacacccagcaccaatctacagacggagtagaaaaaggaggctctatatactgatgttaaaaaacaaaacaaaacaaaaagccctaagggactgaagagatgctgggcctgtccataaagcctgttgccatgataaggccaagcaggggctagcttatctgcacagcaacccagcctttccgtgctgccttgcctcttcaagatgctattcactgaaacctaacttcacccccataacaccagcagggtgggggttacatatgattctcctatggtttcctctcatccctcggcacctcttgttttcctttttcctgggttccttttgttcttcctttacttctccagcttgtgtggccttttggtacaatgaaagacagcactggaaaggaggggaaaccaaacttctcatcctaggtctaacattaaccaactatgccacattctctttgagcttcagttcccaaatttgctacataagattgcaagacttgccaagaatcttgggatttatctttctatgccttgctgacacctaccttggccctcaaacaccacctcacaagaagccaggtgggaagttagggaatcaactccaaaacgctattccttcccaccccactcagctgggctagctgagtggcatccaggacgggggagtgggtgacctgcctcatcactgccacctaacgtccccctggggtggttcagaaagatgctagctctggtagggtccctccggcctcactagagggcgcccctattactctggagtcgacgcagagaatcaggtttcacagcactgcggagagtgtactaggctgtctccagcccagcgaagctcatgaggacgtgcgaccccggcgcggagaagccatgaaaattaatgggaaaaacagtttttaaaaaacaaaagaaaaaaaggtttatttacagatcgccccaggagactttccctggtgcctgcggatgtccgaggcctcgcgccagcagcgctcagtgcccttcctggagctctcctggcccaggcctggcgggcactgcttcccggcctgcgatgtcccaaggcggggaaggagtccagattgggtccccctcacaggttagtggtgatacattttaagtctgggagagcggcctgcttgtgcagtgggtcgccgaggataagaggtgagccccctctctcctggctgcagtccttggcgctttggtccagaagggtgcgaagagcgctgggccgaacatactggagactcaccacggcccctccgaggaagaggcacaggacgcctgtggcggtggggatcgaaagaaaggagggcatgtggagtcagggctatgttgcccaggctggtctcgaactctggcctcaaacgaccttcctgcctcgacctcccaaagtgctgggattacaggcgtgatgcccgggccttcttccatcttttggagcctaccccttgtgttacctcccgccacacacctctaatctgaattacatgaaacacggcaagacaccaaacccttctgagccccccacttttcatctgtaaaatggtcataacagtgcctgtttctgcgaactattgagaggggcaaatagggtaatagatgtgaattcattctgtaaactgg

SEQ ID NO: 128165 - DNA, 1044 bp, Homo sapiens
  Payload ID: 5094
  Gene Symbol: DUOXA1
  Gene Name: dual oxidase maturation factor 1
  Uniprot ID: Q1HG43
  ENST ID: ENST00000560572
  CDS Start-End: 7-1038
accaagatggctactttgggacacacattccccttctatgctggccccaagccaaccttcccgatggacaccactttggccagcatcatcatgatctttctgactgcactggccacgttcatcgtcatcctgcctggcattcggggaaagacgaggctgttctggctgcttcgggtggtgaccagcttattcatcggggctgcaatcctggctgtgaatttcagttctgagtggtctgtgggccaggtcagcaccaacacatcatacaaggccttcagttctgagtggatcagcgctgatattgggctgcaggtcgggctgggtggagtcaacatcacactcacagggacccccgtgcagcagctgaatgagaccatcaattacaacgaggagttcacctggcgcctgggtgagaactatgctgaggagtatgcaaaggctctggagaaggggctgccagaccctgtgttgtacctagctgagaagttcactccaagaagcccatgtggcctataccgccagtaccgcctggcgggacactacacctcagccatgctatgggtggcattcctctgctggctgctggccaatgtgatgctctccatgcctgtgctggtatatggtggctacatgctattggccacgggcatcttccagctgttggctctgctcttcttctccatggccacatcactcacctcaccctgtcccctgcacctgggcgcttctgtgctgcatactcaccatgggcctgccttctggatcacattgaccacaggactgctgtgtgtgctgctgggcctggctatggcggtggcccacaggatgcagcctcacaggctgaaggctttcttcaaccagagtgtggatgaagaccccatgctggagtggagtcctgaggaaggtggactcctgagcccccgctaccggtccatggctgacagtcccaagtcccaggacattcccctgtcagaggcttcctccaccaaggcatactgtaaggaggcacaccccaaagatcctgattgtgctttataacattcc

SEQ ID NO: 128166 - DNA, 562 bp, Homo sapiens
  Payload ID: 5094
  Gene Symbol: DUOXA1
  Gene Name: dual oxidase maturation factor 1
  ENST ID: ENST00000558326
  CDS Start-End: 331-562
gtgcttccagcggacggcagcgcgcgagaccaggccaggcgtcaaagcaagtcacccatccgacctaaacccctctaagaccccggagtcacgtctccctccggggatcctcgtgaggtcttgggggtcccaccgccctgcgagccgcgcccgcgccccgccagacccggaactgcgtcgctagaacgtcgggacctggttccctctttaatcacacccccgggggcgcttcgtgtgaggttccacgggggaaggcgagaggcgcaggctgccacacacgcactgtttggaagaggggaagcattgccccccctgcaccacctcaccaagatggctactttgggacacacattccccttctatgctggccccaagccaaccttcccgatggacaccactttggccagcatcatcatgatctttctgactgcactggccacgttcatcgtcatcctgcctggcattcggggaaagacgaggctgttctggctgcttcgggtggtgaccagcttattcatcggggctgcaatcctggggacccccgtgcagcagctgaatgaga

SEQ ID NO: 128167 - DNA, 1867 bp, Homo sapiens
  Payload ID: 5094
  Gene Symbol: DUOXA1
  Gene Name: dual oxidase maturation factor 1
  ENST ID: ENST00000613425
  CDS Start-End: 403-1719
agcgcgcgaggtgagacggcgagggctcccggggcgcaggtagagatgttccgtcggtgccgaaggcccggctagtgcggttgtgtggacggcgaaaaaaaccaggccaggcgtcaaagcaagtcacccatccgacctaaacccctctaagaccccggagtcacgtctccctccggggatcctcgtgaggtcttgggggtcccaccgccctgcgagccgcgcccgcgccccgccagacccggaactgcgtcgctagaacgtcgggacctggttccctctttaatcacacccccgggggcgcttcgtgtgaggttccacgggggaaggcgagaggcgcaggctgccacacacgcactgtttggaagaggggaagcattgccccccctgcaccacctcaccaagatggctactttgggacacacattccccttctatgctggccccaagccaaccttcccgatggacaccactttggccagcatcatcatgatctttctgactgcactggccacgttcatcgtcatcctgcctggcattcggggaaagacgaggctgttctggctgcttcgggtggtgaccagcttattcatcggggctgcaatcctggggacccccgtgcagcagctgaatgagaccatcaattacaacgaggagttcacctggcgcctgggtgagaactatgctgaggagtatgcaaaggctctggagaaggggctgccagaccctgtgttgtacctagctgagaagttcactccaagaagcccatgtggcctataccgccagtaccgcctggcgggacactacacctcagccatgctatgggtggcattcctctgctggctgctggccaatgtgatgctctccatgcctgtgctggtatatggtggctacatgctattggccacgggcatcttccagctgttggctctgctcttcttctccatggccacatcactcacctcaccctgtcccctgcacctgggcgcttctgtgctgcatactcaccatgggcctgccttctggatcacattgaccacaggactgctgtgtgtgctgctgggcctggctatggcggtggcccacaggatgcagcctcacaggctgaaggctttcttcaaccagagtgtggatgaagaccccatgctggagtggagtcctgaggaaggtggactcctgagcccccgctaccggtccatggctgacagtcccaagtcccaggacattcccctgtcagaggcttcctccaccaaggcatactatcgccccaggagactttccctggtgcctgcggatgtccgaggcctcgcgccagcagcgctcagtgcccttcctggagctctcctggcccaggcctggcgggcactgcttcccggcctgcgatgtcccaaggcggggaaggagtccagattgggtccccctcacagtccttggcgctttggtccagaagggtgcgaagagcgctgggccgaacatactggagactcaccacggcccctccgaggaagaggcacaggacgcctgtggcggtggggatcgaaagaaaggagggcatgtggagtcagggctatgttgcccaggctggtctcgaactctggcctcaaacgaccttcctgcctcgacctcccaaagtgctgggattacaggcgtgatgcccgggccttcttccatcttttggagcctaccccttgtgttacctcccgccacacacctctaatctgaattacatgaaacacggcaagacaccaaacccttctgagccccccacttttcatctgtaaaatggtcataacagtgcctgtttctgcgaactattgagaggggcaaatagggtaatagatgtgaattcattctgtaaactggaaagtgc

SEQ ID NO: 128168 - DNA, 1760 bp, Homo sapiens
  Payload ID: 5095
  Gene Symbol: DUOXA2
  Gene Name: dual oxidase maturation factor 2
  Uniprot ID: Q1HG44
  ENST ID: ENST00000323030
  CDS Start-End: 286-1248
aactcagcgccaacccgcagaaccaggaaagtaacggctacagacagtgagaaatagtttcgctcgccggctagaaaaactctgtcggtaccaaccccagagcgttgagagcagcccacctccacgcttccttaacggagaggtgcaggactcagacttcaccagcccactcggtcccagccttgtacgcaaagagacgccaaggacgcgctctcccgcgtccaggcagccccagcttgctggcttgcctgcccgcctgcgtgcagcactcggccggcgtgcagcatgaccctgtggaacggcgtactgcctttttacccccagccccggcatgccgcaggcttcagcgttccactgctcatcgttattctagtgtttttggctctagcagcaagcttcctgctcatcttgccggggatccgtggccactcgcgctggttttggttggtgagagttcttctcagtctgttcataggcgcagaaattgtggctgtgcacttcagtgcagaatggttcgtgggtacagtgaacaccaacacatcctacaaagccttcagcgcagcgcgcgttacagcccgtgtccgtctgctcgtgggcctggagggcattaatattacactcacagggaccccagtgcatcagctgaacgagaccattgactacaacgagcagttcacctggcgtctgaaagagaattacgccgcggagtacgcgaacgcactggagaaggggctgccggacccagtgctctacctggcggagaagttcacaccgagtagcccttgcggcctgtaccaccagtaccacctggcgggacactacgcctcggccacgctatgggtggcgttctgcttctggctcctctccaacgtgctgctctccacgccggccccgctctacggaggcctggcactgctgaccaccggagccttcgcgctcttcggggtcttcgccttggcctccatctctagcgtgccgctctgcccgctccgcctaggctcctccgcgctcaccactcagtacggcgccgccttctgggtcacgctggcaaccggcgtcctgtgcctcttcctcggaggggccgtggtgagtctccagtatgttcggcccagcgctcttcgcacccttctggaccaaagcgccaaggactgcagccaggagagagggggctcacctcttatcctcggcgacccactgcacaagcaggccgctctcccagacttaaaatgtatcaccactaacctgtgagggggacccaatctggactccttccccgccttgggacatcgcaggccgggaagcagtgcccgccaggcctgggccaggagagctccaggaagggcactgagcgctgctggcgcgaggcctcggacatccgcaggcaccagggaaagtctcctggggcgatctgtaaataaacctttttttcttttgttttttaaaaactgtttttcccattaattttcatggcttctccgcgccggggtcgcacgtcctcatgagcttcgctgggctggagacagcctagtacactctccgcagtgctgtgaaacctgattctctgcgtcgactccagagtaataggggcgccctctagtgaggccggagggaccctaccagagctagcatctttctgaaccaccccagggggacgttaggtggcagtgatgaggcaggtcacccactcccccgtcctggatgccactcagctagcccagctgagtggggtgggaaggaatagcgttttggagttgattccc

SEQ ID NO: 128169 - DNA, 1724 bp, Homo sapiens
  Payload ID: 5095
  Gene Symbol: DUOXA2
  Gene Name: dual oxidase maturation factor 2
  Uniprot ID: Q1HG44
  ENST ID: ENST00000491993
  CDS Start-End: 133-498
agacttcaccagcccactcggtcccagccttgtacgcaaagagacgccaaggacgcgctctcccgcgtccaggcagccccagcttgctggcttgcctgcccgcctgcgtgcagcactcggccggcgtgcagcatgaccctgtggaacggcgtactgcctttttacccccagccccggcatgccgcaggcttcagcgttccactgctcatcgttattctagtgtttttggctctagcagcaagcttcctgctcatcttgccggggatccgtggccactcggagtatctgcattcccacctcctcccctcggagatcaggctggggcctccctcttctgagggaggtgacccctgcgtgcctagcacttctggactcactgagcctcaccaagcagtgactggaccaggaggcagaaccaggaccaggcgccagacagctaggggagtgaaggtggtggaagagtgccaggaagtgggggtggaggggaggtgctgttagggtagatgggaaatggggctagggaggtgaaagtgcgtggtcacaaaatatcagaaatgccagtagcccagagggacttgcaggaaaagcgtgcctaacattagtctcaaaagtctggatataactaaagatccaggtgaagtggggtcaagggtggtcttggggactctggtttggcagggctcaggcctgacccgggtgcctattcctgcagcgctggttttggttggtgagagttcttctcagtctgttcataggcgcagaaattgtggctgtgcacttcagtgcagaatggttcgtgggtacagtgaacaccaacacatcctacaaagccttcagcgcagcgcgcgttacagcccgtgtccgtctgctcgtgggcctggagggcattaatattacactcacagggaccccagtgcatcagctgaacgagaccattgactacaacgagcagttcacctggcgtctgaaagagaattacgccgcggagtacgcgaacgcactggagaaggggctgccggacccagtgctctacctggcggagaagttcacaccgagtagcccttgcggcctgtaccaccagtaccacctggcgggacactacgcctcggccacgctatgggtggcgttctgcttctggctcctctccaacgtgctgctctccacgccggccccgctctacggaggcctggcactgctgaccaccggagccttcgcgctcttcggggtcttcgccttggcctccatctctagcgtgccgctctgcccgctccgcctaggctcctccgcgctcaccactcagtacggcgccgccttctgggtcacgctggcaaccggcgtcctgtgcctcttcctcggaggggccgtggtgagtctccagtatgttcggcccagcgctcttcgcacccttctggaccaaagcgccaaggactgcagccaggagagagggggctcacctcttatcctcggcgacccactgcacaagcaggccgctctcccagacttaaaatgtatcaccactaacctgtgagggggacccaatctggactccttccccgccttgggacatcgcaggccgggaagcagtgcccgccaggcctgggccaggagagctccaggaagggcactgagcgctgctggcgcgaggcctcggacatccgcaggcaccagggaaagtctcctggggcgatctgtaaataaacctttttttcttttgttttttaaaa

SEQ ID NO: 128170 - DNA, 7739 bp, Homo sapiens
  Payload ID: 5096
  Gene Symbol: DSTYK
  Gene Name: dual serine/threonine and tyrosine protein kinase
  Uniprot ID: Q6XUX3
  ENST ID: ENST00000367161
  CDS Start-End: 32-2686
ccgagccgcaaagacagagcgggcagaggcgatggagggcgacggggtgccatggggcagcgagcccgtctcgggtcccggccccggcggcggcggaatgatccgcgagctgtgccggggcttcggccgctaccgccgctacctgggacggctgcgacagaacctgcgcgagacccagaagttcttccgcgacatcaagtgctcccacaaccacacttgtctctcctccctcacgggcggcggcggggccgagcgcggccctgcaggcgatgtcgccgaaaccgggctgcaggcgggccaactgagctgcatttccttcccacctaaggaagagaagtacctccagcagattgtggactgcctcccttgcatactgatcctcggccaggattgtaacgtcaagtgccagctgttgaatctgctgttgggggtgcaggtgcttcccaccaccaagctgggcagtgaggagagctgtaagcttcggcgcctccgcttcacctatgggactcagactcgggtcagcctggcgctccctggacagtatgaactagtgcacacgctggttgctcatcagggcaactgggagaccatccctgaggaggatctggaggtccaagagaacaatgaggatgctgctcatgttttagcggaactggaggtaacgatgcaccatgctctcttacaggaagtggacgttgtggtagcaccatgccaaggcctccggcccacagtggatgttctgggtgacttggtgaatgatttcttgcctgtgataacctatgcactccacaaagatgaactctctgagagggatgagcaagagcttcaggaaatccgaaagtatttctcctttcctgtattctttttcaaagtgccgaaactgggctcggagataatagactcctcaaccaggagaatggagagcgaaagatcaccgctttatcgccagctaattgacctgggctatctgagcagcagtcactggaactgtggggctcctggccaggatactaaagctcagagcatgttggtggaacagagtgaaaagctgagacacttgagcacattttctcaccaggtgttacagactcgcctggtggatgcagccaaggccctgaacctggtgcactgccactgccttgacatctttattaaccaggcatttgacatgcagcgggacctgcagatcactcccaaacgtctggaatatactcgaaaaaaggagaatgagttgtatgaatcattgatgaatattgccaaccgaaagcaggaggaaatgaaggatatgattgttgagacacttaataccatgaaggaggaacttctggatgatgctactaacatggagtttaaagacgtcattgtccctgagaatggagaaccagtaggcaccagagagatcaaatgctgcatccgacagatccaggaactcatcatctcccgacttaatcaggcagtggctaataagctgatcagctcagtggattacctgagggaaagcttcgtcggaaccctggaacgatgtctgcagagcctggagaagtctcaggatgtctcagttcacatcaccagtaattatctcaaacagatcttaaatgctgcctatcatgttgaagtcacgtttcactcagggtcgtcagttacaaggatgctatgggagcaaatcaaacagatcatccagcgcatcacatgggtgagcccacctgccatcactctggaatggaagaggaaggtggcccaggaagccattgagagcctcagcgcctccaaattggctaagagcatttgcagccaattccggactcggctcaatagttcccacgaggcttttgcagcctccttgcggcagctggaagctggccactcaggccggttagagaaaacggaagatctatggctgagggttcggaaagatcatgctccccgcctggcccgcctttctctggaaagctgttctttacaggatgtcttgcttcatcgtaaacctaaactgggacaggaactgggccggggccagtatggtgtggtatacctgtgtgacaactggggaggacacttcccttgtgccctcaaatcagttgtccctccagatgagaagcactggaatgatctggctttggaatttcactatatgaggtctctgccgaagcatgagcgattggtggatctccatggttcagtcattgactacaactatggtggtggctccagcattgctgtgctcctcattatggagcggctacaccgggatctctacacagggctgaaggctgggctgaccctggagacacgtttgcagatagcactagatgtggtggagggaatccgcttcctgcacagccagggacttgtccatcgtgatatcaaactgaaaaatgtgctgctggataagcagaaccgtgccaagatcactgacttaggattctgcaagccagaggccatgatgtcaggcagcattgtggggacaccaatccatatggcccctgaacttttcacaggggctcgcccagaacgtcttcctgtgtttgatgaggagtgctggcagttgatggaagcctgttgggatggcgaccccttgaagaggcctctcttgggcattgtccagcccatgctccagggcatcatgaatcggctctgcaagtccaattctgagcagccaaacagaggactagatgattctacttgaaagcaaagacctttctctttcactctctagttatttccttccccctcaccttttggccatggggagaatttgacatttattcactataggacacactcccaagggaactggtgcttgctgggaaacttggaaccttcccaggcagggatgactcctggacagtgaagagttgaatgactgagcatattcagcagctcactgaagcgccaagctatccctttagcaaaaaagtgtctcagatgtgtaaaagctgaggaatgtggtgttctggcttcacaaatgaaaaggaggcagatgttaccattgtcttttcactgtatatacttctaagacagcaagcgggacactgcagtggcaatagtgttaaaaaatctcattctcatgatttttggctctagctaggaatagtttagtcaggactcagaaaatttgagcttagttctgggattatgaaaacatggggacaaaaacaataacttgtggatgtctggttcctgctgtctgcagccaggtatctcaggttgcaatggtcagaagtcccagtgagggagctagaaacagagctatctgttcctcatagtgccagtgtgtttacatttataggaccacatatccctggtttctgggggagggtttcactgttacatcaccaagaggccctgaaaagaggaaaaaaaaaaaaaaagaggccaggcatggtggctcacgcctgtaatctcagcactttgggaggctgaggcgggcggatcacaaggtccagagttcaagagcagcctggccaacatggtgaaaccccgtctctactaaagatacaaaaaattagccgggcgtggtggtgcatgcctgtaatccaagatactcaggaggctgaggcaggagaatcgcttgaacctgggaggcggaggttgcagtgagccgagatcatgccattgcactccagcctgggcgacagagtgagactctgtctcaaaaaaaaaaaaaaaatagaatgtgtatgcatatatttgtgtgtatatgtatatatgtgtgtgtgtctatatctctatctatatagacatacacacaggagttattggatttagagttactgctaaccccagaacagaatctgttcttttacctttgagtcttttcttttgtttacctcttttcatctcaaagtgggaaagctccagataacatggtacttaggagtgagtgtctaagcaaaaccaacccaatgcgaagtatttgggtgagaactgagaggtgggagatgattggaggccatggcctatgtacaaacatactggaagaaaaccagcttgtttttaaaacttaacacaatcagaaatttttctttttgtgtttgaatctaacacactgacgtttggaaaacttgatcaatgagcttttaaccacgatttctcccgcaatttgttccttctttttacctttttaaaaatctgttagaagaaaaaaagcagcagacgaaagagaaaaaccctcctctggtagttctgtgtgtgcccctcacccctgtgtgctagtgtctgggaagtttccctgaaaggtgggaggcgggtgggtggtcttttggagggttcctcatgaagtgtgcttgaggaaagaaattctgattctaggcagaggaaggggaacaatttaaatattggtgcatctcagatgcacttgacttcaagccttcctcaaccaaactggtccattagattccgaaaaacaggtagacgaggaagtagacagtggaagtgagtagtctccctccatctgcctaatccccaataactgtggtctggcccctgtgttcagcccgagagtttgtaaaacaggtccccaggtaggtgtataagatgagttgcaaattagccgggcatgctggcacgcaccagtaatcccagctacttgggaggctgaggcaggagaatcacttgaacccgggaggcagaggtcatggtgagccgagatcacgccactgcactccagcctgggcaacagagcgagactctatctcaaaaaaaaacaaaaaaaaaaacaaaaaacaaagatgagtcgcacatctgctgctgggattttctagggttgtctatgacagaatgaccatcttttaaatattaatggagtataaatggagtctataatgggtctttcatataacttttaactctttggctatcctgggctctgatcatgatatgtttgagcatagtagctccctaaactcttggagcctttcagaaattccatgtagtgctaataacctttttacttgcaaatgataaagtaactgactcagtgtctttgggctctgcaggctttagccttgttttggtaggatgttcagtatattctcagaatttttaccacctatttagctatacttcaagtactctattctctgcactaacttactgtccttctgggaactatgatggggcttcaagggagtcaggtgtcaagaaaggaggggtaagtactctctacttgctggaaaatcattgtaagtctgttgtgtatgaaattttaggaaaagtcttatatagttccctttccagactgttttcttttgactctaactataatcataagtctgtgcttccattatgaaggtcacattcctagcattcttgggaagtattagctcatactctcattcacatatgggaggttagatttttttcctctacccagagtccctttttagtttaccccacggcttagtttgctgtcagataccagttctctagcagattccccaacagttttttccccagtggggagggtggaagggagggactgatataagtaaggagatgagtagttgtgttacagttcattttctttaaaaaaaagtattttgagaaaaggtgcaaaatattcttgaaagtctctaggccagccaaagtccacatatggatatttggggatgttatttaaatactcagcaggctgagtgcaggtatacgtgtgtatagagtgtgtatactttgcttttgttttataacattgtcagctaattttggctttgttctttggcatccattcttattataagtgatggaatgccatgaaatgtactgtattgtatattacttgggaggacactaggttttcaaagaagtctggcagcacttgggttatagagggctcagcatgaccaaagtcctaaagattttacctcccagctttggttgtatgtgttcccaagtggtgaggtgagattgtggctggaggaagaaaaaggatggcatgaaagaatgacccttattgtggtctgtccttctaatcaacataattagggcagcttaccccaacatgaaaatgatgacctggccatttttaatggccagagcttgaagtctggtctctcattttgtttcagaaatgagtgagaggccttcctgcagagcagtcaggagaaatggtggagcctggggccctggaatggctgaccctgtgcctagagagctgatggcaagggctgtctggcatggctcatttgggtggggtttccccaggcataccttagttccctgatcctctgcaaagagtagctcattgactgagcaagcgcttcaggaggactgtgctggttgttcccagaccaaagagagtcacttttgactccatcaacttcaaggggacagagcctaggcagcagattctcctaatttttaacactaaaattcaaggaagcagtggaggaaagaatgcattactaccacagatagaaataggggactcatagaactctcgactagtacctgtcagctctcaaatgcattcttgtgtctttgcttgagctgccaaagaagggtcacaaagtgttcttcctcatggaagaagtgcctcggggttgcagggctgcaaagtgacaactgcactgaatgacactttattttttggctttggcttattatttagcactgggaggcccaggggaattggtgattacagtagcactttgggaagttaaagccccctttgggcttgctttggagagatgatggcatgcttggtattccatttggataatcaggaagcctccctagtccatccatattgtgtcagagtgggattaacaaccctggaagagtccactgccaaaagagtagttgctttcctggaatttccaaagcttttggattttctggatcaagtaacccactttttaaaacctgaggtcaggagttcgagaccagcctggtaacatggtgaaaccccgtctctattaaaaatagaaaaaattagccaggcatggtggcgggcacctatagtcccagctactcaggaggctgaggtaggagaattgcttgaacccaggagacagaggctgcattgagccaagatcacaccactgcactccagcctgggcagcagagcaagactccatctcaaaaaaaaaaaaaagaaaaagaaaaagaaggttaatccttcagttatggaggtgggatgaatagagcttgtttgatgttaaagtgggtaaggagggagtggccttgagacacttgtattccaaactctcctggaggtttccagtagcactactgttcctaaaagggtttcatttttaacttcatctgttttgttaacatccagtccaattgaggtgatctcagaggtgcatcaggacatctagcactggggaggccaccttgcccagatagttgaaaagaaaattggtctgggcagcctgttgtcttttgtcttcatgtaatgttttttctttgttttaaaggactaatgtttattacagtgttaaataaaagtgtaagatactaagtgtgtagaataaaagtgcaataacaaaagacaatgactttggcacacacttcagtctttatcctctctcctttcttgtgctacctggctctttccataatattgttacagcaggaccgtcttaattgtgtgcattttgaagagatgcgactctgggttaatcttcattagtgtaatattgaagggttgggtttggttttatagagtattctgtatacttgttgggatacacaaataccagatgtgctgtataataaagatcacattaacgttt

SEQ ID NO: 128171 - DNA, 7874 bp, Homo sapiens
  Payload ID: 5096
  Gene Symbol: DSTYK
  Gene Name: dual serine/threonine and tyrosine protein kinase
  Uniprot ID: Q6XUX3
  ENST ID: ENST00000367162
  CDS Start-End: 32-2821
ccgagccgcaaagacagagcgggcagaggcgatggagggcgacggggtgccatggggcagcgagcccgtctcgggtcccggccccggcggcggcggaatgatccgcgagctgtgccggggcttcggccgctaccgccgctacctgggacggctgcgacagaacctgcgcgagacccagaagttcttccgcgacatcaagtgctcccacaaccacacttgtctctcctccctcacgggcggcggcggggccgagcgcggccctgcaggcgatgtcgccgaaaccgggctgcaggcgggccaactgagctgcatttccttcccacctaaggaagagaagtacctccagcagattgtggactgcctcccttgcatactgatcctcggccaggattgtaacgtcaagtgccagctgttgaatctgctgttgggggtgcaggtgcttcccaccaccaagctgggcagtgaggagagctgtaagcttcggcgcctccgcttcacctatgggactcagactcgggtcagcctggcgctccctggacagtatgaactagtgcacacgctggttgctcatcagggcaactgggagaccatccctgaggaggatctggaggtccaagagaacaatgaggatgctgctcatgttttagcggaactggaggtaacgatgcaccatgctctcttacaggaagtggacgttgtggtagcaccatgccaaggcctccggcccacagtggatgttctgggtgacttggtgaatgatttcttgcctgtgataacctatgcactccacaaagatgaactctctgagagggatgagcaagagcttcaggaaatccgaaagtatttctcctttcctgtattctttttcaaagtgccgaaactgggctcggagataatagactcctcaaccaggagaatggagagcgaaagatcaccgctttatcgccagctaattgacctgggctatctgagcagcagtcactggaactgtggggctcctggccaggatactaaagctcagagcatgttggtggaacagagtgaaaagctgagacacttgagcacattttctcaccaggtgttacagactcgcctggtggatgcagccaaggccctgaacctggtgcactgccactgccttgacatctttattaaccaggcatttgacatgcagcgggacctgcagatcactcccaaacgtctggaatatactcgaaaaaaggagaatgagttgtatgaatcattgatgaatattgccaaccgaaagcaggaggaaatgaaggatatgattgttgagacacttaataccatgaaggaggaacttctggatgatgctactaacatggagtttaaagacgtcattgtccctgagaatggagaaccagtaggcaccagagagatcaaatgctgcatccgacagatccaggaactcatcatctcccgacttaatcaggcagtggctaataagctgatcagctcagtggattacctgagggaaagcttcgtcggaaccctggaacgatgtctgcagagcctggagaagtctcaggatgtctcagttcacatcaccagtaattatctcaaacagatcttaaatgctgcctatcatgttgaagtcacgtttcactcagggtcgtcagttacaaggatgctatgggagcaaatcaaacagatcatccagcgcatcacatgggtgagcccacctgccatcactctggaatggaagaggaaggtggcccaggaagccattgagagcctcagcgcctccaaattggctaagagcatttgcagccaattccggactcggctcaatagttcccacgaggcttttgcagcctccttgcggcagctggaagctggccactcaggccggttagagaaaacggaagatctatggctgagggttcggaaagatcatgctccccgcctggcccgcctttctctggaaagctgttctttacaggatgtcttgcttcatcgtaaacctaaactgggacaggaactgggccggggccagtatggtgtggtatacctgtgtgacaactggggaggacacttcccttgtgccctcaaatcagttgtccctccagatgagaagcactggaatgatctggctttggaatttcactatatgaggtctctgccgaagcatgagcgattggtggatctccatggttcagtcattgactacaactatggtggtggctccagcattgctgtgctcctcattatggagcggctacaccgggatctctacacagggctgaaggctgggctgaccctggagacacgtttgcagatagcactagatgtggtggagggaatccgcttcctgcacagccagggacttgtccatcgtgatatcaaactgaaaaatgtgctgctggataagcagaaccgtgccaagatcactgacttaggattctgcaagccagaggccatgatgtcaggcagcattgtggggacaccaatccatatggcccctgaacttttcacagggaagtacgataattccgtggatgtctacgcttttggaattcttttctggtatatctgctcaggctctgtcaagctccctgaggcatttgagaggtgtgctagcaaagaccatctctggaacaatgtgcggaggggggctcgcccagaacgtcttcctgtgtttgatgaggagtgctggcagttgatggaagcctgttgggatggcgaccccttgaagaggcctctcttgggcattgtccagcccatgctccagggcatcatgaatcggctctgcaagtccaattctgagcagccaaacagaggactagatgattctacttgaaagcaaagacctttctctttcactctctagttatttccttccccctcaccttttggccatggggagaatttgacatttattcactataggacacactcccaagggaactggtgcttgctgggaaacttggaaccttcccaggcagggatgactcctggacagtgaagagttgaatgactgagcatattcagcagctcactgaagcgccaagctatccctttagcaaaaaagtgtctcagatgtgtaaaagctgaggaatgtggtgttctggcttcacaaatgaaaaggaggcagatgttaccattgtcttttcactgtatatacttctaagacagcaagcgggacactgcagtggcaatagtgttaaaaaatctcattctcatgatttttggctctagctaggaatagtttagtcaggactcagaaaatttgagcttagttctgggattatgaaaacatggggacaaaaacaataacttgtggatgtctggttcctgctgtctgcagccaggtatctcaggttgcaatggtcagaagtcccagtgagggagctagaaacagagctatctgttcctcatagtgccagtgtgtttacatttataggaccacatatccctggtttctgggggagggtttcactgttacatcaccaagaggccctgaaaagaggaaaaaaaaaaaaaaagaggccaggcatggtggctcacgcctgtaatctcagcactttgggaggctgaggcgggcggatcacaaggtccagagttcaagagcagcctggccaacatggtgaaaccccgtctctactaaagatacaaaaaattagccgggcgtggtggtgcatgcctgtaatccaagatactcaggaggctgaggcaggagaatcgcttgaacctgggaggcggaggttgcagtgagccgagatcatgccattgcactccagcctgggcgacagagtgagactctgtctcaaaaaaaaaaaaaaaatagaatgtgtatgcatatatttgtgtgtatatgtatatatgtgtgtgtgtctatatctctatctatatagacatacacacaggagttattggatttagagttactgctaaccccagaacagaatctgttcttttacctttgagtcttttcttttgtttacctcttttcatctcaaagtgggaaagctccagataacatggtacttaggagtgagtgtctaagcaaaaccaacccaatgcgaagtatttgggtgagaactgagaggtgggagatgattggaggccatggcctatgtacaaacatactggaagaaaaccagcttgtttttaaaacttaacacaatcagaaatttttctttttgtgtttgaatctaacacactgacgtttggaaaacttgatcaatgagcttttaaccacgatttctcccgcaatttgttccttctttttacctttttaaaaatctgttagaagaaaaaaagcagcagacgaaagagaaaaaccctcctctggtagttctgtgtgtgcccctcacccctgtgtgctagtgtctgggaagtttccctgaaaggtgggaggcgggtgggtggtcttttggagggttcctcatgaagtgtgcttgaggaaagaaattctgattctaggcagaggaaggggaacaatttaaatattggtgcatctcagatgcacttgacttcaagccttcctcaaccaaactggtccattagattccgaaaaacaggtagacgaggaagtagacagtggaagtgagtagtctccctccatctgcctaatccccaataactgtggtctggcccctgtgttcagcccgagagtttgtaaaacaggtccccaggtaggtgtataagatgagttgcaaattagccgggcatgctggcacgcaccagtaatcccagctacttgggaggctgaggcaggagaatcacttgaacccgggaggcagaggtcatggtgagccgagatcacgccactgcactccagcctgggcaacagagcgagactctatctcaaaaaaaaacaaaaaaaaaaacaaaaaacaaagatgagtcgcacatctgctgctgggattttctagggttgtctatgacagaatgaccatcttttaaatattaatggagtataaatggagtctataatgggtctttcatataacttttaactctttggctatcctgggctctgatcatgatatgtttgagcatagtagctccctaaactcttggagcctttcagaaattccatgtagtgctaataacctttttacttgcaaatgataaagtaactgactcagtgtctttgggctctgcaggctttagccttgttttggtaggatgttcagtatattctcagaatttttaccacctatttagctatacttcaagtactctattctctgcactaacttactgtccttctgggaactatgatggggcttcaagggagtcaggtgtcaagaaaggaggggtaagtactctctacttgctggaaaatcattgtaagtctgttgtgtatgaaattttaggaaaagtcttatatagttccctttccagactgttttcttttgactctaactataatcataagtctgtgcttccattatgaaggtcacattcctagcattcttgggaagtattagctcatactctcattcacatatgggaggttagatttttttcctctacccagagtccctttttagtttaccccacggcttagtttgctgtcagataccagttctctagcagattccccaacagttttttccccagtggggagggtggaagggagggactgatataagtaaggagatgagtagttgtgttacagttcattttctttaaaaaaaagtattttgagaaaaggtgcaaaatattcttgaaagtctctaggccagccaaagtccacatatggatatttggggatgttatttaaatactcagcaggctgagtgcaggtatacgtgtgtatagagtgtgtatactttgcttttgttttataacattgtcagctaattttggctttgttctttggcatccattcttattataagtgatggaatgccatgaaatgtactgtattgtatattacttgggaggacactaggttttcaaagaagtctggcagcacttgggttatagagggctcagcatgaccaaagtcctaaagattttacctcccagctttggttgtatgtgttcccaagtggtgaggtgagattgtggctggaggaagaaaaaggatggcatgaaagaatgacccttattgtggtctgtccttctaatcaacataattagggcagcttaccccaacatgaaaatgatgacctggccatttttaatggccagagcttgaagtctggtctctcattttgtttcagaaatgagtgagaggccttcctgcagagcagtcaggagaaatggtggagcctggggccctggaatggctgaccctgtgcctagagagctgatggcaagggctgtctggcatggctcatttgggtggggtttccccaggcataccttagttccctgatcctctgcaaagagtagctcattgactgagcaagcgcttcaggaggactgtgctggttgttcccagaccaaagagagtcacttttgactccatcaacttcaaggggacagagcctaggcagcagattctcctaatttttaacactaaaattcaaggaagcagtggaggaaagaatgcattactaccacagatagaaataggggactcatagaactctcgactagtacctgtcagctctcaaatgcattcttgtgtctttgcttgagctgccaaagaagggtcacaaagtgttcttcctcatggaagaagtgcctcggggttgcagggctgcaaagtgacaactgcactgaatgacactttattttttggctttggcttattatttagcactgggaggcccaggggaattggtgattacagtagcactttgggaagttaaagccccctttgggcttgctttggagagatgatggcatgcttggtattccatttggataatcaggaagcctccctagtccatccatattgtgtcagagtgggattaacaaccctggaagagtccactgccaaaagagtagttgctttcctggaatttccaaagcttttggattttctggatcaagtaacccactttttaaaacctgaggtcaggagttcgagaccagcctggtaacatggtgaaaccccgtctctattaaaaatagaaaaaattagccaggcatggtggcgggcacctatagtcccagctactcaggaggctgaggtaggagaattgcttgaacccaggagacagaggctgcattgagccaagatcacaccactgcactccagcctgggcagcagagcaagactccatctcaaaaaaaaaaaaaagaaaaagaaaaagaaggttaatccttcagttatggaggtgggatgaatagagcttgtttgatgttaaagtgggtaaggagggagtggccttgagacacttgtattccaaactctcctggaggtttccagtagcactactgttcctaaaagggtttcatttttaacttcatctgttttgttaacatccagtccaattgaggtgatctcagaggtgcatcaggacatctagcactggggaggccaccttgcccagatagttgaaaagaaaattggtctgggcagcctgttgtcttttgtcttcatgtaatgttttttctttgttttaaaggactaatgtttattacagtgttaaataaaagtgtaagatactaagtgtgtagaataaaagtgcaataacaaaagacaatgactttggcacacacttcagtctttatcctctctcctttcttgtgctacctggctctttccataatattgttacagcaggaccgtcttaattgtgtgcattttgaagagatgcgactctgggttaatcttcattagtgtaatattgaagggttgggtttggttttatagagtattctgtatacttgttgggatacacaaataccagatgtgctgtataataaagatcacattaacgttt

SEQ ID NO: 128172 - DNA, 1042 bp, Homo sapiens
  Payload ID: 5096
  Gene Symbol: DSTYK
  Gene Name: dual serine/threonine and tyrosine protein kinase
  Uniprot ID: Q6XUX3
  ENST ID: ENST00000615388
  CDS Start-End: 447-986
tttgagacagtctcattctgtcacccaggttggagtgcatggtgtgatctcagttcactgcagcctccgtctcctcggttcaagcaattctcctgcctcagcttcctgagtagctggaattataggtgtgcaccagcatgtctggctaatttttgtattttcagtagagacggggtctccccatattggccaggctggtcttgaactcctgacctcaaacgatctgcccaccccagcctcccaaagtgctgggattacaagtgtgagccaccacacccagcctaatgtaactgttttcctttccttttagtctttatctcattgttatatgtgattataatgttgtcatttatgcagttcacatcaccagtaattatctcaaacagatcttaaatgctgcctatcatgttgaagtcacgtttcactcagggtcgtcagttacaaggatgctatgggagcaaatcaaacagatcatccagcgcatcacatgggtgagcccacctgccatcactctggaatggaagaggaaggtggcccaggaagccattgagagcctcagcgcctccaaattggctaagagcatttgcagccaattccggactcggctcaatagttcccacgaggcttttgcagcctccttgcggcagctggaagctggccactcaggccggttagagaaaacggaagatctatggctgagggttcggaaagatcatgctccccgcctggcccgcctttctctggaaagctgttctttacaggatgtcttgcttcatcgtaaacctaaactgggacaggaactgggccggggccagtatggtgtggtatacctgtgtgacaactggggaggacacttcccttgtgccctcaaatcagttgtccctccagatgagaagcactggaatgatctggctttggaatttcactatatgaggtgggtcctggcctcattcatctctatgagaaagatccagagaagaatctagaaccctggtttagattttgtaccaagagctacagcatggcctctctatatttagtt

SEQ ID NO: 128173 - DNA, 2019 bp, Homo sapiens
  Payload ID: 5097
  Gene Symbol: DUSP1
  Gene Name: dual specificity phosphatase 1
  Uniprot ID: P28562
  ENST ID: ENST00000239223
  CDS Start-End: 244-1347
gcgaaggacatttgggctgtgtgtgcgacgcgggtcggaggggcagtcgggggaaccgcgaagaagccgaggagcccggagccccgcgtgacgctcctctctcagtccaaaagcggcttttggttcggcgcagagagacccgggggtctagcttttcctcgaaaagcgccgccctgcccttggccccgagaacagacaaagagcaccgcagggccgatcacgctgggggcgctgaggccggccatggtcatggaagtgggcaccctggacgctggaggcctgcgggcgctgctgggggagcgagcggcgcaatgcctgctgctggactgccgctccttcttcgctttcaacgccggccacatcgccggctctgtcaacgtgcgcttcagcaccatcgtgcggcgccgggccaagggcgccatgggcctggagcacatcgtgcccaacgccgagctccgcggccgcctgctggccggcgcctaccacgccgtggtgttgctggacgagcgcagcgccgccctggacggcgccaagcgcgacggcaccctggccctggcggccggcgcgctctgccgcgaggcgcgcgccgcgcaagtcttcttcctcaaaggaggatacgaagcgttttcggcttcctgcccggagctgtgcagcaaacagtcgacccccatggggctcagccttcccctgagtactagcgtccctgacagcgcggaatctgggtgcagttcctgcagtaccccactctacgatcagggtggcccggtggaaatcctgccctttctgtacctgggcagtgcgtatcacgcttcccgcaaggacatgctggatgccttgggcatcactgccttgatcaacgtctcagccaattgtcccaaccattttgagggtcactaccagtacaagagcatccctgtggaggacaaccacaaggcagacatcagctcctggttcaacgaggccattgacttcatagactccatcaagaatgctggaggaagggtgtttgtccactgccaggcaggcatttcccggtcagccaccatctgccttgcttaccttatgaggactaatcgagtcaagctggacgaggcctttgagtttgtgaagcagaggcgaagcatcatctctcccaacttcagcttcatgggccagctgctgcagtttgagtcccaggtgctggctccgcactgttcggcagaggctgggagccccgccatggctgtgctcgaccgaggcacctccaccaccaccgtgttcaacttccccgtctccatccctgtccactccacgaacagtgcgctgagctaccttcagagccccattacgacctctcccagctgctgaaaggccacgggaggtgaggctcttcacatcccattgggactccatgctccttgagaggagaaatgcaataactctgggaggggctcgagagggctggtccttatttatttaacttcacccgagttcctctgggtttctaagcagttatggtgatgacttagcgtcaagacatttgctgaactcagcacattcgggaccaatatatagtgggtacatcaagtccatctgacaaaatggggcagaagagaaaggactcagtgtgtgatccggtttctttttgctcgcccctgttttttgtagaatctcttcatgcttgacatacctaccagtattattcccgacgacacatatacatatgagaatataccttatttatttttgtgtaggtgtctgccttcacaaatgtcattgtctactcctagaagaaccaaatacctcaatttttgtttttgagtactgtactatcctgtaaatatatcttaagcaggtttgttttcagcactgatggaaaataccagtgttgggtttttttttagttgccaacagttgtatgtttgctgattatttatgacctgaaataatatatttcttcttctaagaagacattttgttacataaggatgacttttttatacaatggaataaattatggcatttctattgaaatttcaa

SEQ ID NO: 128174 - DNA, 2676 bp, Homo sapiens
  Payload ID: 5098
  Gene Symbol: DUSP10
  Gene Name: dual specificity phosphatase 10
  Uniprot ID: Q9Y6W6
  ENST ID: ENST00000366899
  CDS Start-End: 240-1688
ggattcttattggcccaacccgccgtcggtcggcggcgagtccgccccctcagaaccttacatttacagtgtagcaaaagagaaagtaactatgttgctgctggagatcaatgaagccgagtgaatgggggctgaatgtgcgagtccatagctgaagaggagcgccagatggtggaggaatacacttatttatgaaactgtcttgagttcttcttgaattgccagttttcagcctcctcatgcctccgtctcctttagacgacagggtagtagtggcactatctaggcccgtccgacctcaggatctcaacctttgtttagactctagttaccttggctctgccaacccaggcagtaacagccaccctcctgtcatcgccaccaccgttgtgtccctcaaggctgcgaatctgacgtatatgccctcatccagcggctctgcccgctcgctgaattgtggatgcagcagtgccagctgctgcactgtggcaacctacgacaaggacaatcaggcccaaacccaagccattgccgctggcaccaccaccactgccatcggaacctctaccacctgccctgctaaccagatggtcaacaataatgagaatacaggctctctaagtccatcaagtggggtgggcagccctgtgtcagggacccccaagcagctagccagcatcaaaataatctaccccaatgacttggcaaagaagatgaccaaatgcagcaagagtcacctgccgagtcagggccctgtcatcattgactgcaggcccttcatggagtacaacaagagtcacatccaaggagctgtccacattaactgtgccgataagatcagccggcggagactgcagcagggcaagatcactgtcctagacttgatttcctgtagggaaggcaaggactctttcaagaggatcttttccaaagaaattatagtttatgatgagaataccaatgaaccaagccgagtgatgccctcccagccacttcacatagtcctcgagtccctgaagagagaaggcaaagaacctctggtgttgaaaggtggacttagtagttttaagcagaaccatgaaaacctctgtgacaactccctccagctccaagagtgccgggaggtggggggcggcgcatccgcggcctcgagcttgctacctcagcccatccccaccacccctgacatcgagaacgctgagctcacccccatcttgcccttcctgttccttggcaatgagcaggatgctcaggacctggacaccatgcagcggctgaacatcggctacgtcatcaacgtcaccactcatcttcccctctaccactatgagaaaggcctgttcaactacaagcggctgccagccactgacagcaacaagcagaacctgcggcagtactttgaagaggcttttgagttcattgaggaagctcaccagtgtgggaaggggcttctcatccactgccaggctggggtgtcccgctccgccaccatcgtcatcgcttacttgatgaagcacactcggatgaccatgactgatgcttataaatttgtcaaaggcaaacgaccaattatctccccaaaccttaacttcatggggcagttgctagagttcgaggaagacctaaacaacggtgtgacaccgagaatccttacaccaaagctgatgggcgtggagacggttgtgtgacaatggtctggatggaaaggattgctgctctccattaggagacaatgaggaaggaggatggattctggttttttttctttctttttttttttgtagttgggagtaagtttgtgaatggaaacaaacttgtttaaacactttatttttaacaagtgtaagaagactataacttttgatgccattgagattcacctcccacaaactgacaaattaaggaggttaaagaagtaatttttttaagccaacaataaaaatataatacaacttgtttctcccccttttccttttaagctatttgtagagtttatgactaaatagtctgtgcaggttcatagaccgaagatactacacactttaaaccaattaaaaagaaccaaaagtaaatagaaaagacattgaatcaccaaggcctgggatcaacctgggctgtccacacagaaaacaaaaacccaaccaaaccaagccctgttgtgctcactggtgcaaagagaagatcagggcagcttaagtggtctaagaatccttcaggcattctttaaggagaaaaaggatacctttgattttgtgtgtttcatgctctggattttttttttttttccttctctgggtttaagagattttttttgaaatagtgaggaactgaccattatatgccttcactggcttcttgtgcaataatatgatgttttaagtgtgcaaacaagttagagctggcagctgaatgatagacaaatagtgcaaatttgccagcttggagatagaaaggaattcaacaatatatcaaatactttccttcccacctttttccttttttttttttttttctgatttgattctggttacagtgccataaaccttgttacatatgtatatcagaatgtaagaaaaaaaaatttatttaaaaatatttttcgcaaaaaaaaaaaaaatcttggtgtgtttctgttgattgtgtaaaaatttattttcattatataaatgaaactgg

SEQ ID NO: 128175 - DNA, 803 bp, Homo sapiens
  Payload ID: 5098
  Gene Symbol: DUSP10
  Gene Name: dual specificity phosphatase 10
  ENST ID: ENST00000494642
  CDS Start-End: 208-408
gtataaacaaaatagtatgcaacttacagcaatgtctctcccacttataataaaacacctaactctcatgtagcattttatccatattgagagctctgtgagatagaaattattatattacaagtcacagatatgtaaactgagatgcagagacatcaataacttgctcaaggttacaaggtggacttagtagttttaagcagaaccatgaaaacctctgtgacaactccctccagctccaagagtgccgggaggtggggggcggcgcatccgcggcctcgagcttgctacctcagcccatccccaccacccctgacatcgagaacgctgagctcacccccatcttgcccttcctgttccttggcaatgagcaggatgctcaggacctggacaccatgcagcggctgaacatcggctacgtcatcaacgtcaccactcatcttcccctctaccactatgagaaaggcctgttcaactacaagcggctgccagccactgacagcaacaagcagaacctgcggcagtactttgaagaggcttttgagttcattgaggaagctcaccagtgtgggaaggggcttctcatccactgccaggctggggtgtcccgctccgccaccatcgtcatcgcttacttgatgaagcacactcggatgaccatgactgatgcttataaatttgtcaaaggcaaacgaccaattatctccccaaaccttaacttcatggggcagttgctagagttcgaggaagacctaaacaacggtgtgacaccgagaatccttacaccaaagctgatgggcgtg

SEQ ID NO: 128176 - DNA, 1009 bp, Homo sapiens
  Payload ID: 5098
  Gene Symbol: DUSP10
  Gene Name: dual specificity phosphatase 10
  ENST ID: ENST00000477026
  CDS Start-End: 137-337
aactatgttgctgctggagatcaatgaagccgagtgaatgggggctgaatgtgcgagtccatagctgaagaggagcgccagatggtggaggaatacacttatttatgaagtggacttagtagttttaagcagaaccatgaaaacctctgtgacaactccctccagctccaagagtgccgggaggtggggggcggcgcatccgcggcctcgagcttgctacctcagcccatccccaccacccctgacatcgagaacgctgagctcacccccatcttgcccttcctgttccttggcaatgagcaggatgctcaggacctggacaccatgcagcggctgaacatcggctacgtcatcaacgtcaccactcatcttcccctctaccactatgagaaaggcctgttcaactacaagcggctgccagccactgacagcaacaagcagaacctgcggcagtactttgaagaggcttttgagttcattgaggaagctcaccagtgtgggaaggggcttctcatccactgccaggctggggtgtcccgctccgccaccatcgtcatcgcttacttgatgaagcacactcggatgaccatgactgatgcttataaatttgtcaaaggcaaacgaccaattatctccccaaaccttaacttcatggggcagttgctagagttcgaggaagacctaaacaacggtgtgacaccgagaatccttacaccaaagctgatgggcgtggagacggttgtgtgacaatggtctggatggaaaggattgctgctctccattaggagacaatgaggaaggaggatggattctggttttttttctttctttttttttttgtagttgggagtaagtttgtgaatggaaacaaacttgtttaaacactttatttttaacaagtgtaagaagactataacttttgatgccattgagattcacctcccacaaactgacaaattaaggaggttaaagaagtaatttttttaagccaacaataaaaatataatac

SEQ ID NO: 128177 - DNA, 1625 bp, Homo sapiens
  Payload ID: 5098
  Gene Symbol: DUSP10
  Gene Name: dual specificity phosphatase 10
  ENST ID: ENST00000468085
  CDS Start-End: 86-286
attttcgagttggtgagacaccgcggcagtcgacttggaagatgctctggtggtagaggtggacttagtagttttaagcagaaccatgaaaacctctgtgacaactccctccagctccaagagtgccgggaggtggggggcggcgcatccgcggcctcgagcttgctacctcagcccatccccaccacccctgacatcgagaacgctgagctcacccccatcttgcccttcctgttccttggcaatgagcaggatgctcaggacctggacaccatgcagcggctgaacatcggctacgtcatcaacgtcaccactcatcttcccctctaccactatgagaaaggcctgttcaactacaagcggctgccagccactgacagcaacaagcagaacctgcggcagtactttgaagaggcttttgagttcattgaggaagctcaccagtgtgggaaggggcttctcatccactgccaggctggggtgtcccgctccgccaccatcgtcatcgcttacttgatgaagcacactcggatgaccatgactgatgcttataaatttgtcaaaggcaaacgaccaattatctccccaaaccttaacttcatggggcagttgctagagttcgaggaagacctaaacaacggtgtgacaccgagaatccttacaccaaagctgatgggcgtggagacggttgtgtgacaatggtctggatggaaaggattgctgctctccattaggagacaatgaggaaggaggatggattctggttttttttctttctttttttttttgtagttgggagtaagtttgtgaatggaaacaaacttgtttaaacactttatttttaacaagtgtaagaagactataacttttgatgccattgagattcacctcccacaaactgacaaattaaggaggttaaagaagtaatttttttaagccaacaataaaaatataatacaacttgtttctcccccttttccttttaagctatttgtagagtttatgactaaatagtctgtgcaggttcatagaccgaagatactacacactttaaaccaattaaaaagaaccaaaagtaaatagaaaagacattgaatcaccaaggcctgggatcaacctgggctgtccacacagaaaacaaaaacccaaccaaaccaagccctgttgtgctcactggtgcaaagagaagatcagggcagcttaagtggtctaagaatccttcaggcattctttaaggagaaaaaggatacctttgattttgtgtgtttcatgctctggattttttttttttttccttctctgggtttaagagattttttttgaaatagtgaggaactgaccattatatgccttcactggcttcttgtgcaataatatgatgttttaagtgtgcaaacaagttagagctggcagctgaatgatagacaaatagtgcaaatttgccagcttggagatagaaaggaattcaacaatatatcaaatactttccttcccacctttttccttttttttttttttttctgatttgattctggttacagtgccataaaccttgttacatatgtatatcagaatgtaagaaaaaaaaatttatttaaaaatatttttcgcaaaaaaaaaaaaaa

SEQ ID NO: 128178 - DNA, 1653 bp, Homo sapiens
  Payload ID: 5099
  Gene Symbol: DUSP11
  Gene Name: dual specificity phosphatase 11 (RNA/RNP complex 1-interacting)
  Uniprot ID: O75319
  ENST ID: ENST00000272444
  CDS Start-End: 43-1176
agtaagccagcgtggctacgccatcacgaccggcggtggcacatgcgcaatagcgagacgctggagcgcggcgtaggtggctgccgagtcttttcctgtttagggtcttatcctggcattgagggcgccggactggcgcttttggccgacttggcattgggtgggcggcttcttgggacccacatgagccagtggcatcatccccgcagtggctggggccggagacgcgacttttcaggacgctcctcagccaagaagaagggcggaaaccacatccccgaaaggtggaaagactatctcccagttggacagcggatgcctgggactcgtttcattgctttcaaagttcctttgcaaaagagttttgaaaagaaacttgctccagaagaatgcttttcccctttggatctttttaacaaaatccgagaacaaaatgaagaacttggactgattattgatttaacatatactcaacgctattataaaccagaggatttgccagaaactgttccttacttaaaaatttttacagttggacatcaagtgcctgatgatgagactatttttaaattcaaacacgctgttaatgggtttttgaaagaaaataaagataatgataaacttattggtgtccactgtacccatggtttaaacaggactggctacctcatttgcagatatttgattgatgtagaaggcgtgaggccagatgatgcaattgaattattcaataggtgccggggacattgcttagaaagacaaaactacattgaagaccttcagaatggtcctatcagaaagaattggaattccagtgtacccaggtcaagtgattttgaagactcagcacatctcatgcaaccagtccacaataagcctgttaaacaaggacctaggtataatctacatcagatccagggtcactcagctcctcgacatttccacacccagacccaaagtttgcaacaatcagtcagaaaattttcagagaatccacatgtttaccagagacaccatctccctcctcctggtccccctggagaggactattcacacaggaggtattcttggaatgtgaagcccaatgccagtcgggcagcccaggatagaagaaggtggtatccttataattactccagactctcctatccagcctgttgggaatggacccagtgatacaaacctgtcctggaattctacctggagaccagagctggcctgaaaattactggtgtgacttttaattagttcaggtctaatcaggtttctttattgttcccttatgtattcaagcttaaggaaaaattgcattgctgtttacctctttgctgataaatttgcagtaattacagcattgcaggaaaaacaatctgttattccagtcttaaatttttctaaaagaagacaatattttagaactgaagcattgagaacttcccttgcaaattatttttaaaattctatcttgtttttctatgtatttctttctgactagacttgtgatatgcgtgtgtttatgtacagaaatttttagtgtttttgttatgttctgttattgacccaaaggccatctttattttctataactgttcaaaatttatattaaaatctacttaggagataatttctttagaacctagttactacctgtaa

SEQ ID NO: 128179 - DNA, 672 bp, Homo sapiens
  Payload ID: 5099
  Gene Symbol: DUSP11
  Gene Name: dual specificity phosphatase 11 (RNA/RNP complex 1-interacting)
  ENST ID: ENST00000452812
  CDS Start-End: 1-453
cagtggcatcatccccgcagtggctggggccggagacgcgacttttcaggacgctcctcagccaagaagaagggcggaaaccacatccccgaaaggtggaaagactatctcccagttggacagcggatgcctgggactcgtttcattgctttcaaagttcctttgcaaaagagttttgaaaagaaacttgctccagaagaatgcttttcccctttggatctttttaacaaaatccgagaacaaaatgaagaacttggactgattattgatttaacatatactcaacgctattataaaccagaggatttgccagaaactgttccttacttaaaaatttttacagttggacatcaagtgcctgatgatgagactatttttaaattcaaacacgctgttaatgggtttttgaaagaaaataaagataatgaagtgagaagtagaagaaaagattaaaaaactctgagtcttagagttatgtgaaagagacaagaaagggcaaagattaagaatgggacggacccctagaagcaaaacaagaaagagtgcaccagtggaattgcccctttgtcatatgtatttaagacacatgtatacatatgtaacaaacctgcacgttgtgcacatgtaccctaaaacttaaagtataattaaaaaaaagatatttctgctgtt

SEQ ID NO: 128180 - DNA, 2175 bp, Homo sapiens
  Payload ID: 5099
  Gene Symbol: DUSP11
  Gene Name: dual specificity phosphatase 11 (RNA/RNP complex 1-interacting)
  ENST ID: ENST00000443070
  CDS Start-End: 7-828
tggcacatgcgcaatagcgagacgctggagcgcggcgtaggtggctgccgagtcttttcctgtttagggtcttatcctggcattgagggcgccggactggcgcttttggccgacttggcattgggtgggcggcttcttgggacccacatgagccagtggcatcatccccgcagtggctggggccggagacgcgacttttcaggacgctcctcagccaagaagaagggcggaaaccacatccccgaaaggtggaaagactatctcccagttggacagcggatgcctgggactcgtttcattgctttcaaagttcctttgcaaaagagttttgaaaagaaacttgctccagaagaatgcttttcccctttggatctttttaacaaaatccgagaacaaaatgaagaacttggactgattattgatttaacatatactcaacgctattataaaccagaggatttgccagaaactgttccttacttaaaaatttttacagttggacatcaagtgcctgatgatgagactatttttaaattcaaacacgctgttaatgggtttttgaaagaaaataaagataatgataaacttattggtgtccactgtacccatggtttaaacaggactggctacctcatttgcagacggagtcttgctctgtcacccaggctggagtgcagtggcaccatctcgactcactccaagttctgcttcccaggttcacgccgttctcctgcctcagcctcccaagtagctgggactacaggtgcccgccaccacgcccggctaattttttgtatttttagtagagatgtggtttcaccgtgttagccaggatggtcttgatctcctgaccttgtgatccacccgcctcggcctcccaaagtgctggtattacaggagtgagccaccgcgcctggccagactccttattctttttaaggcctgcgttgttctttgcacaccgatgaacacaaaagtcagaagtttttgatattataaaacattgaagtagtgaacatttctatgtaaatatttttgaatgcatatctcatagccccggaggtaatttcactcaaaatagaatttcttaatcaaatagtatgtgtcgttatgctttttatggatgttgccacactgtactgagttatgtttgttcattcagaaaatatctcctgagcatctattatgtgtaagcagtgtgctgcgtgttagcaaagagactttagctgccctttgtgcgtcctaacagtctagggagggagtagatattaaagaatcacacaaatgcctatacaattacaattccaacaagtgctgagaaggggagtgacatggtacaatgagagcatagaatagggaggatttgacttcaacaagaggactagaggtttctgtggggaggtctgagcaaatatctgaagtataagtaggtgttaaccaggtagggatgttgtggagagaattctgaacgtaaggatcagcagagaccatattaacaggaaaatatatactgtgttggaggaactggctagggagactgggccatgggggtagtatggcgttaaaatggagctggaaatatgaataggagctgaaaccatgcagagctatgtttaaggttttagtcactaccttaagagcaatagaaaaccattgaattttttttgttggggatgagtgtggggaacacattcaaatttgtattttcaacctatcattttgctgctgagtggagaatacactgcagagggaaagaggtagaagcaaggagacaagttgggaggtgtttgtaggaactgaggcataatggtggattggaccagggcatggtggtcattttggtagaaagatacagatatactctatagagatatttaggtaatattgttgtcaggagttggtggtgaattgaatatgagagtttggaagaaatggctgacagtgatggtgactcccaagtttctggcccattctgttggttatacagtattttttagatataatgttaatatttttcccaatttgtcttttgttcattgttggtttctgataaatactctgtcatattaaggaagtctctatttttagtgtataaagcattttgataaaaaatgattctgcattttctttccttttgtttattaaattacattaatgtaaataaatatataaata

SEQ ID NO: 128181 - DNA, 1270 bp, Homo sapiens
  Payload ID: 5100
  Gene Symbol: DUSP12
  Gene Name: dual specificity phosphatase 12
  Uniprot ID: Q9UNI6
  ENST ID: ENST00000367943
  CDS Start-End: 33-1055
ggcaggaagccgccttgtctctgggcgcggccatgttggaggctccgggcccgagtgatggctgcgagctcagcaaccccagcgccagcagagtcagctgtgccgggcagatgctggaagtgcagccaggattgtatttcggtggggccgcggccgtcgcggagccagatcacctgagggaagcgggcatcacggccgtgctaacagtggactcggaggagcccagcttcaaggcggggcctggggtcgaggatctatggcgcctcttcgtgccagcgctggacaaacccgagacggacctactcagccatctggaccggtgcgtggccttcatcggtcaggcccgcgctgagggccgtgcggtgttggtgcactgtcatgcaggagtcagtcgaagtgtggccataataactgcttttctcatgaagactgaccaacttccctttgaaaaagcctatgaaaagctccagattctcaaaccagaggctaagatgaatgaggggtttgagtggcaactgaaattataccaggcaatgggatacgaagtggatacctctagtgcaatttataagcaatatcgtttacaaaaggttacagagaagtatccagaattgcagaatttacctcaagaactctttgctgttgacccaactaccgtttcacaaggattgaaagatgaggttctctacaagtgtagaaagtgcaggcgatcattatttcgaagttctagtattctggatcaccgtgaaggaagtggacctatagcctttgcccacaagagaatgacaccatcttccatgcttaccacagggaggcaagctcaatgtacatcttatttcattgaacctgtacagtggatggaatctgctttgttgggagtgatggatggacagcttctttgcccaaaatgcagtgccaagttgggttccttcaactggtatggtgaacagtgctcttgtggtaggtggataacacctgcttttcaaatacataagaatagagtggatgaaatgaaaatattgcctgttttgggatcacaaacaggaaaaatatgaacatgatattttatagcttgggaagaaacttgcagatgatatgtgctgcctttgcttcttatcattcatggcagattgtttgtgctttcaacatttcatttgaaatgggagaagataaaatcacttgatgtaacctggaaactatgctttacatggcaatcaaagccttttgatcatgtacattttatttgatattaaaatcttttataaccaga

SEQ ID NO: 128182 - DNA, 1252 bp, Homo sapiens
  Payload ID: 5100
  Gene Symbol: DUSP12
  Gene Name: dual specificity phosphatase 12
  ENST ID: ENST00000484291
  CDS Start-End: 45-458
actcgatggtagggcaggaagccgccttgtctctgggcgcggccatgttggaggctccgggcccgagtgatggctgcgagctcagcaaccccagcgccagcagagtcagctgtgccgggcagatgctggaagtgcagccaggattgtatttcggtggggccgcggccgtcgcggagccagatcacctgagggaagcgggcatcacggccgtgctaacagtggactcggaggagcccagcttcaaggcggggcctggggtcgaggatctatggcgcctcttcgtgccagcgctggacaaacccgagacggacctactcagccatctggaccggtgcgtggccttcatcggtcaggcccgcgctgagggccgtgcggtgttggtgcactggtctctttttcagtcatgcaggagtcagtcgaagtgtggccataataactgcttttctcatgaagactgaccaacttccctttgaaaaagcctatgaaaagctccagattctcaaaccagaggctaaaattgcagaatttacctcaagaactctttgctgttgacccaactaccgtttcacaaggattgaaagatgaggttctctacaagtgtagaaagtgcaggcgatcattatttcgaagttctagtattctggatcaccgtgaaggaagtggacctatagcctttgcccacaagagaatgacaccatcttccatgcttaccacagggaggcaagctcaatgtacatcttatttcattgaacctgtacagtggatggaatctgctttgttgggagtgatggatggacagcttctttgcccaaaatgcagtgccaagttgggttccttcaactggtatggtgaacagtgctcttgtggtaggtggataacacctgcttttcaaatacataagaatagagtggatgaaatgaaaatattgcctgttttgggatcacaaacaggaaaaatatgaacatgatattttatagcttgggaagaaacttgcagatgatatgtgctgcctttgcttcttatcattcatggcagattgtttgtgctttcaacatttcatttgaaatgggagaagataaaatcacttgatgtaacctggaaactatgctttacatggcaatcaaagccttttgatcatgtacattttatttgatattaaaatcttttataaccagatactgtctgtgtttcatatatttttaaaagttttgattgttggaatgttatatgatcttaaggtctgtatagacaa

SEQ ID NO: 128183 - DNA, 740 bp, Homo sapiens
  Payload ID: 5100
  Gene Symbol: DUSP12
  Gene Name: dual specificity phosphatase 12
  ENST ID: ENST00000464004
  CDS Start-End: 23-436
cgccttgtctctgggcgcggccatgttggaggctccgggcccgagtgatggctgcgagctcagcaaccccagcgccagcagagtcagctgtgccgggcagatgctggaagtgcagccaggattgtatttcggtggggccgcggccgtcgcggagccagatcacctgagggaagcgggcatcacggccgtgctaacagtggactcggaggagcccagcttcaaggcggggcctggggtcgaggatctatggcgcctcttcgtgccagcgctggacaaacccgagacggacctactcagccatctggaccggtgcgtggccttcatcggtcaggcccgcgctgagggccgtgcggtgttggtgcactggtctctttttcagtcatgcaggagtcagtcgaagtgtggccataataactgcttttctcatgaagactgaccaacttccctttgaaaaagcctatgaaaagctccagattctcaaaccagaggctaagatgaatgaggggtttgagtggcaactgaaattataccaggcaatgggatacgaagtggatacctctagtgcaatttataagcaatatcgtttacaaaaggttacagagaagtatccagaattgcagaatttacctcaagaactctttgctgttgacccaactaccgtttcacaaggattgaaagatgaggttctctacaagtgtagaaagtgcaggcgatcattatttcgaagttctagtattctg

SEQ ID NO: 128184 - DNA, 657 bp, Homo sapiens
  Payload ID: 5100
  Gene Symbol: DUSP12
  Gene Name: dual specificity phosphatase 12
  ENST ID: ENST00000490591
  CDS Start-End: 76-324
ttggaggctccgggcccgagtgatggctgcgagctcagcaaccccagcgccagcagagtcagctgtgccgggcagatgctggaagtgcagccaggattgtatttcggtggggccgcggccgtcgcggagccagatcacctgagggaagcgggcatcacggccgtgctaacagtggactcggaggagcccagcttcaaggcggggcctggggtcgaggatctatggcgcctcttcgtgccagcgctggacaaacccgagacggacctactcagccatctggaccgggtcttgctctgtcacccaggctacagtgtagtagcgtaattacggctcactgcagtctcaacctcccaggctcaagtgaacctcctgcctcggcctccagagtagctgggactacagaccccaccacatccggctaattttttgtagaggtggggtctcactttgttgcccaggctggtctccaactcttggactcaaccaatcctctcacctcgcctcccaaagtgctgggatttcaggcgtaggtctctttttcagtcatgcaggagtcagtcgaagtgtggccataataactgcttttctcatgaagactgaccaacttccctttgaaaaagcctatgaaaagctccagattctcaaaccagaggctaa

SEQ ID NO: 128185 - DNA, 1110 bp, Homo sapiens
  Payload ID: 5101
  Gene Symbol: DUSP13
  Gene Name: dual specificity phosphatase 13
  Uniprot ID: Q6B8I1
  ENST ID: ENST00000308475
  CDS Start-End: 29-211
agaggcagaggggtgggcgggctggcccatggctgagacctctctcccagagctggggggagaggacaaagccacgccttgccccagcatcctggagctggaggagctcctgcgggcagggaagtcttcttgcagccgtgtggacgaagtttggcccaaccttttcataggagatgcaaacagcatcaagtgtgcggagacaggcggctgaaagccagcagcacgaactgcccgtcagagaagtgcacagcctgggccagatactcccacaggatggactcactgcagaagcaggacctccggaggcccaagatccatggggcagtccaggcatctccctaccagccgcccacattggcttcgctgcagcgcttgctgtgggtccgtcaggctgccacactgaaccatatcgatgaggtctggcccagcctcttcctgggagatgcgtacgcagcccgggacaagagcaagctgatccagctgggaatcacccacgttgtgaatgccgctgcaggcaagttccaggtggacacaggtgccaaattctaccgtggaatgtccctggagtactatggcatcgaggcggacgacaaccccttcttcgacctcagtgtctactttctgcctgttgctcgatacatccgagctgccctcagtgttccccaaggccgcgtgctggtacactgtgccatgggggtaagccgctctgccacacttgtcctggccttcctcatgatctgtgagaacatgacgctggtagaggccatccagacggtgcaggcccaccgcaatatctgccctaactcaggcttcctccggcagctccaggttctggacaaccgactggggcgggagacggggcggttctgatctggcaggcagccaggatccctgacccttggcccaaccccaccagcctggccctgggaacagcaggctctgctgtttctagtgaccctgagatgtaaacagcaagtgggggctgaggcagaggcagggatagctgggtggtgacctcttagcgggtggatttccctgacccaattcagagattctttatgcaaaagtgagttcagtccatctctataataaaatattcatcgtcataaa

SEQ ID NO: 128186 - DNA, 781 bp, Homo sapiens
  Payload ID: 5101
  Gene Symbol: DUSP13
  Gene Name: dual specificity phosphatase 13
  Uniprot ID: Q9UII6
  ENST ID: ENST00000372700
  CDS Start-End: 35-781
gaccacagaggcagaggggtgggcgggctggcccatggctgagacctctctcccagagctggggggagaggacaaagccacgccttgccccagcatcctggagctggaggagctcctgcgggcagggaagtcttcttgcagccgtgtggacgaagtttggcccaaccttttcataggagatgcgatggactcactgcagaagcaggacctccggaggcccaagatccatggggcagtccaggcatctccctaccagccgcccacattggcttcgctgcagcgcttgctgtgggtccgtcaggctgccacactgaaccatatcgatgaggtctggcccagcctcttcctgggagatgcgtacgcagcccgggacaagagcaagctgatccagctgggaatcacccacgttgtgaatgccgctgcaggcaagttccaggtggacacaggtgccaaattctaccgtggaatgtccctggagtactatggcatcgaggcggacgacaaccccttcttcgacctcagtgtctactttctgcctgttgctcgatacatccgagctgccctcagtgttccccaaggccgcgtgctggtacactgtgccatgggggtaagccgctctgccacacttgtcctggccttcctcatgatctgtgagaacatgacgctggtagaggccatccagacggtgcaggcccaccgcaatatctgccctaactcaggcttcctccggcagctccaggttctggacaaccgactggggcgggagacggggcggttctga

SEQ ID NO: 128187 - DNA, 1778 bp, Homo sapiens
  Payload ID: 5101
  Gene Symbol: DUSP13
  Gene Name: dual specificity phosphatase 13
  Uniprot ID: Q6B8I1
  ENST ID: ENST00000372702
  CDS Start-End: 65-631
agaaatgacactggagaggcagagaggagtgaccacagaggcagaggggtgggcgggctggcccatggctgagacctctctcccagagctggggggagaggacaaagccacgccttgccccagcatcctggagctggaggagctcctgcgggcagggaagtcttcttgcagccgtgtggacgaagtttggcccaaccttttcataggagatgcggccacggcaaacaaccgctttgagctgtggaagctgggcatcacccacgtgctgaacgccgcccacaagggcctctactgtcagggcggccctgacttctacggcagcagtgtgagctacctgggggtgccagcccacgacctccctgattttgacatcagtgcctacttctcctctgcggctgacttcatccaccgtgccctcaacacgcctggggccaaggtcctggtgcactgtgtggtgggcgtgagccgctctgccacgctggtcctggcctacctcatgctgcaccagcggctgtccctgcgccaggcggtgatcaccgtgaggcagcaccgatgggtcttccccaaccgaggcttcctgcaccagctctgcaggctggaccagcaactgcggggtgccggccagagctgaggggccagagctggtccttactccctgccatggggctctgccactttgccaccctggcactgatcctgctggtgctgctggaggctctggcccaggcggacacacagaagatggtggaagcccagcgtggggtcggccctagagcctgctactccatctggctcctcctggcgcctacaccccctctcagccactgtcttcagtctccacagaaacagcatcaagtgtgcggagacaggcggctgaaagccagcagcacgaactgcccgtcagagaagtgcacagcctgggccagatactcccacaggatggactcactgcagaagcaggacctccggaggcccaagatccatggggcagtccaggcatctccctaccagccgcccacattggcttcgctgcagcgcttgctgtgggtccgtcaggctgccacactgaaccatatcgatgaggtctggcccagcctcttcctgggagatgcgtacgcagcccgggacaagagcaagctgatccagctgggaatcacccacgttgtgaatgccgctgcaggcaagttccaggtggacacaggtgccaaattctaccgtggaatgtccctggagtactatggcatcgaggcggacgacaaccccttcttcgacctcagtgtctactttctgcctgttgctcgatacatccgagctgccctcagtgttccccaaggccgcgtgctggtacactgtgccatgggggtaagccgctctgccacacttgtcctggccttcctcatgatctgtgagaacatgacgctggtagaggccatccagacggtgcaggcccaccgcaatatctgccctaactcaggcttcctccggcagctccaggttctggacaaccgactggggcgggagacggggcggttctgatctggcaggcagccaggatccctgacccttggcccaaccccaccagcctggccctgggaacagcaggctctgctgtttctagtgaccctgagatgtaaacagcaagtgggggctgaggcagaggcagggatagctgggtggtgacctcttagcgggtggatttccctgacccaattcagagattctttatgcaaaagtgagttcagtccatctctataataaaatattcatcgtcataaaga

SEQ ID NO: 128188 - DNA, 684 bp, Homo sapiens
  Payload ID: 5101
  Gene Symbol: DUSP13
  Gene Name: dual specificity phosphatase 13
  ENST ID: ENST00000464872
  CDS Start-End: 1-444
atggactcactgcagaagcaggacctccggaggcccaagatccatggggcagtccaggcatctccctaccagccgcccacattggcttcgctgcagcgcttgctgtgggtccgtcaggctgccacactgaaccatatcgatgaggtctggcccagcctcttcctgggagatgcgtacgcagcccgggacaagagcaagctgatccagctgggaatcacccacgttgtgaatgccgctgcaggccgcgtgctggtacactgtgccatgggggtaagccgctctgccacacttgtcctggccttcctcatgatctgtgagaacatgacgctggtagaggccatccagacggtgcaggcccaccgcaatatctgccctaactcaggcttcctccggcagctccaggttctggacaaccgactggggcgggagacggggcggttctgatctggcaggcagccaggatccctgacccttggcccaaccccaccagcctggccctgggaacagcaggctctgctgtttctagtgaccctgagatgtaaacagcaagtgggggctgaggcagaggcagggatagctgggtggtgacctcttagcgggtggatttccctgacccaattcagagattctttatgcaaaagtgagttcagtccatctctataataaaatattcatcgtcataaa

SEQ ID NO: 128189 - DNA, 1770 bp, Homo sapiens
  Payload ID: 5101
  Gene Symbol: DUSP13
  Gene Name: dual specificity phosphatase 13
  Uniprot ID: Q9UII6
  ENST ID: ENST00000491677
  CDS Start-End: 931-1527
actggagaggcagagaggagtgaccacagaggcagaggggtgggcgggctggcccatggctgagacctctctcccagagctggggggagaggacaaagccacgccttgccccagcatcctggagctggaggagctcctgcgggcagggaagtcttcttgcagccgtgtggacgaagtttggcccaaccttttcataggagatgcggccacggcaaacaaccgctttgagctgtggaagctgggcatcacccacgtgctgaacgccgcccacaagggcctctactgtcagggcggccctgacttctacggcagcagtgtgagctacctgggggtgccagcccacgacctccctgattttgacatcagtgcctacttctcctctgcggctgacttcatccaccgtgccctcaacacgcctggggccaaggtcctggtgcactgtgtggtgggcgtgagccgctctgccacgctggtcctggcctacctcatgctgcaccagcggctgtccctgcgccaggcggtgatcaccgtgaggcagcaccgatgggtcttccccaaccgaggcttcctgcaccagctctgcaggctggaccagcaactgcggggtgccggccagagctgaggggccagagctggtccttactccctgccatggggctctgccactttgccaccctggcactgatcctgctggtgctgctggaggctctggcccaggcggacacacagaagatggtggaagcccagcgtggggtcggccctagagcctgctactccatctggctcctcctggcgcctacaccccctctcagccactgtcttcagtctccacagaaacagcatcaagtgtgcggagacaggcggctgaaagccagcagcacgaactgcccgtcagagaagtgcacagcctgggccagatactcccacaggatggactcactgcagaagcaggacctccggaggcccaagatccatggggcagtccaggcatctccctaccagccgcccacattggcttcgctgcagcgcttgctgtgggtccgtcaggctgccacactgaaccatatcgatgaggtctggcccagcctcttcctgggagatgcgtacgcagcccgggacaagagcaagctgatccagctgggaatcacccacgttgtgaatgccgctgcaggcaagttccaggtggacacaggtgccaaattctaccgtggaatgtccctggagtactatggcatcgaggcggacgacaaccccttcttcgacctcagtgtctactttctgcctgttgctcgatacatccgagctgccctcagtgttccccaaggccgcgtgctggtacactgtgccatgggggtaagccgctctgccacacttgtcctggccttcctcatgatctgtgagaacatgacgctggtagaggccatccagacggtgcaggcccaccgcaatatctgccctaactcaggcttcctccggcagctccaggttctggacaaccgactggggcgggagacggggcggttctgatctggcaggcagccaggatccctgacccttggcccaaccccaccagcctggccctgggaacagcaggctctgctgtttctagtgaccctgagatgtaaacagcaagtgggggctgaggcagaggcagggatagctgggtggtgacctcttagcgggtggatttccctgacccaattcagagattctttatgcaaaagtgagttcagtccatctctataataaaatattcatcgtcataaagac

SEQ ID NO: 128190 - DNA, 920 bp, Homo sapiens
  Payload ID: 5101
  Gene Symbol: DUSP13
  Gene Name: dual specificity phosphatase 13
  Uniprot ID: Q9UII6
  ENST ID: ENST00000472493
  CDS Start-End: 80-676
tgcccagccctgttccgctcaggcagagtcctgcccctgcacccactcccccattcccggccccaggccatgccccaggatggactcactgcagaagcaggacctccggaggcccaagatccatggggcagtccaggcatctccctaccagccgcccacattggcttcgctgcagcgcttgctgtgggtccgtcaggctgccacactgaaccatatcgatgaggtctggcccagcctcttcctgggagatgcgtacgcagcccgggacaagagcaagctgatccagctgggaatcacccacgttgtgaatgccgctgcaggcaagttccaggtggacacaggtgccaaattctaccgtggaatgtccctggagtactatggcatcgaggcggacgacaaccccttcttcgacctcagtgtctactttctgcctgttgctcgatacatccgagctgccctcagtgttccccaaggccgcgtgctggtacactgtgccatgggggtaagccgctctgccacacttgtcctggccttcctcatgatctgtgagaacatgacgctggtagaggccatccagacggtgcaggcccaccgcaatatctgccctaactcaggcttcctccggcagctccaggttctggacaaccgactggggcgggagacggggcggttctgatctggcaggcagccaggatccctgacccttggcccaaccccaccagcctggccctgggaacagcaggctctgctgtttctagtgaccctgagatgtaaacagcaagtgggggctgaggcagaggcagggatagctgggtggtgacctcttagcgggtggatttccctgacccaattcagagattctttatgcaaaagtgagttcagtccatctctataataaaatattcatcgtcataaagaca

SEQ ID NO: 128191 - DNA, 1129 bp, Homo sapiens
  Payload ID: 5101
  Gene Symbol: DUSP13
  Gene Name: dual specificity phosphatase 13
  Uniprot ID: Q6B8I1
  ENST ID: ENST00000394707
  CDS Start-End: 34-237
accacagaggcagaggggtgggcgggctggcccatggctgagacctctctcccagagctggggggagaggacaaagccacgccttgccccagcatcctggagctggaggagctcctgcgggcagggaagtcttcttgcagccgtgtggacgaagtttggcccaaccttttcataggagatgcagctggtccttactccctgccatggggctctgccactttgccaccctggcactgatcctgctggtgctgctggaggctctggcccaggcggacacacagaagatggtggaagcccagcgtggggtcggccctagagcctgctactccatctggctcctcctggcgcctacaccccctctcagccactgtcttcagtctccacagaaacagcatcaagtgtgcggagacaggcggctgaaagccagcagcacgaactgcccgtcagagaagtgcacagcctgggccagatactcccacaggatggactcactgcagaagcaggacctccggaggcccaagatccatggggcagtccaggcatctccctaccagccgcccacattggcttcgctgcagcgcttgctgtgggtccgtcaggctgccacactgaaccatatcgatgaggtctggcccagcctcttcctgggagatgcgtacgcagcccgggacaagagcaagctgatccagctgggaatcacccacgttgtgaatgccgctgcaggcaagttccaggtggacacaggtgccaaattctaccgtggaatgtccctggagtactatggcatcgaggcggacgacaaccccttcttcgacctcagtgtctactttctgcctgttgctcgatacatccgagctgccctcagtgttccccaaggccgcgtgctggtacactgtgccatgggggtaagccgctctgccacacttgtcctggccttcctcatgatctgtgagaacatgacgctggtagaggccatccagacggtgcaggcccaccgcaatatctgccctaactcaggcttcctccggcagctccaggttctggacaaccgactggggcgggagacggggcggttctgatctggcaggcagccaggatccctgacccttggcccaaccccaccagcctg

SEQ ID NO: 128192 - DNA, 1556 bp, Homo sapiens
  Payload ID: 5101
  Gene Symbol: DUSP13
  Gene Name: dual specificity phosphatase 13
  Uniprot ID: Q6B8I1
  ENST ID: ENST00000479884
  CDS Start-End: 56-556
actggagaggcagagaggagtgaccacagaggcagaggggtgggcgggctggcccatggctgagacctctctcccagagctggggggagaggacaaagccacgccttgccccagcatcctggagctggaggagctcctgcgggcagggaagtcttcttgcagccgtgtggacgaagtttggcccaaccttttcataggagatgcggccacggcaaacaaccgctttgagctgtggaagctgggcatcacccacgtgctgaacgccgcccacaagggcctctactgtcagggcggccctgacttctacggcagcagtgtgagctacctgggggtgccagcccacgacctccctgattttgacatcagtgcctacttctcctctgcggctgacttcatccaccgtgccctcaacacgcctggggagctggtccttactccctgccatggggctctgccactttgccaccctggcactgatcctgctggtgctgctggaggctctggcccaggcggacacacagaagatggtggaagcccagcgtggggtcggccctagagcctgctactccatctggctcctcctggcgcctacaccccctctcagccactgtcttcagtctccacagaaacagcatcaagtgtgcggagacaggcggctgaaagccagcagcacgaactgcccgtcagagaagtgcacagcctgggccagatactcccacaggatggactcactgcagaagcaggacctccggaggcccaagatccatggggcagtccaggcatctccctaccagccgcccacattggcttcgctgcagcgcttgctgtgggtccgtcaggctgccacactgaaccatatcgatgaggtctggcccagcctcttcctgggagatgcgtacgcagcccgggacaagagcaagctgatccagctgggaatcacccacgttgtgaatgccgctgcaggcaagttccaggtggacacaggtgccaaattctaccgtggaatgtccctggagtactatggcatcgaggcggacgacaaccccttcttcgacctcagtgtctactttctgcctgttgctcgatacatccgagctgccctcagtgttccccaaggccgcgtgctggtacactgtgccatgggggtaagccgctctgccacacttgtcctggccttcctcatgatctgtgagaacatgacgctggtagaggccatccagacggtgcaggcccaccgcaatatctgccctaactcaggcttcctccggcagctccaggttctggacaaccgactggggcgggagacggggcggttctgatctggcaggcagccaggatccctgacccttggcccaaccccaccagcctggccctgggaacagcaggctctgctgtttctagtgaccctgagatgtaaacagcaagtgggggctgaggcagaggcagggatagctgggtggtgacctcttagcgggtggatttccctgacccaattcagagattctttatgcaaaagtgagttcagtccatctctataataaaatattcatcgtcat

SEQ ID NO: 128193 - DNA, 1411 bp, Homo sapiens
  Payload ID: 5101
  Gene Symbol: DUSP13
  Gene Name: dual specificity phosphatase 13
  Uniprot ID: Q6B8I1
  ENST ID: ENST00000494588
  CDS Start-End: 62-340
aatgacactggagaggcagagaggagtgaccacagaggcagaggggtgggcgggctggcccatggctgagacctctctcccagagctggggggagaggacaaagccacgccttgccccagcatcctggagctggaggagctcctgcgggcagggaagtcttcttgcagccgtgtggacgaagtttggcccaaccttttcataggagatgccagggggccaggcacagcctccctcctggtcccatggcttggccggcatcaagtgcccttcctgccctccccagggccacggcaaacaaccgctttgagctgtggaagctgggcatcacccacgtgctgaacgccgcccacaagggcctctactgtcagggcggccctgacttctacggcagcagtgtgagctacctgggggtgccagcccacgacctccctgattttgacatcagtgcctacttctcctctgcggctgacttcatccaccgtgccctcaacacgcctggggagctggtccttactccctgccatggggctctgccactttgccaccctggcactgatcctgctggtgctgctggaggctctggcccaggcggacacacagaagatggtggaagcccagcgtggggtcggccctagagcctgctactccatctggctcctcctggcgcctacaccccctctcagccactgtcttcagtctccacagaaacagcatcaagtgtgcggagacaggcggctgaaagccagcagcacgaactgcccgtcagagaagtgcacagcctgggccagatactcccacaggatggactcactgcagaagcaggacctccggaggcccaagatccatggggcagtccaggcatctccctaccagccgcccacattggcttcgctgcagcgcttgctgtgggtccgtcaggctgccacactgaaccatatcgatgaggtctggcccagcctcttcctgggagatgcgtacgcagcccgggacaagagcaagctgatccagctgggaatcacccacgttgtgaatgccgctgcaggcaagttccaggtggacacaggtgccaaattctaccgtggaatgtccctggagtactatggcatcgaggcggacgacaaccccttcttcgacctcagtgtctactttctgcctgttgctcgatacatccgagctgccctcagtgttccccaaggccgcgtgctggtacactgtgccatgggggtaagccgctctgccacacttgtcctggccttcctcatgatctgtgagaacatgacgctggtagaggccatccagacggtgcaggcccaccgcaatatctgccctaactcaggcttcctccggcagctccaggttctggacaaccgactggggcgggagacggggcggttctgatctggcaggcag

SEQ ID NO: 128194 - DNA, 1335 bp, Homo sapiens
  Payload ID: 5101
  Gene Symbol: DUSP13
  Gene Name: dual specificity phosphatase 13
  ENST ID: ENST00000478873
  CDS Start-End: 91-1095
gtttgtgttctgggcagaacctgcccagccctgttccgctcaggcagagtcctgcccctgcacccactcccccattcccggccccaggccatgccccaggtaggtggcaggccactcagccacctggagaggtcacagtgggggatgaggaggacagcttggtcttcacttccgccttgcccgacagcctcccactgggtgagcctggccaagccggcagcctcctgggtgcctgtttctttttctggtcctggcactgcctaccaaagggaaaagatgttcttcccagtatgcaccttccctagtcactggtccaggggatcaggggcagttagcaaagacaggaccccctctccaacacggcaccaggcccatattctggtgccgctgaaaatccagctccgcagggtccctgactccttcagccagcagatgcctgaaacaagctacctgacccgggtggggcctgacatccagtgctggcctgagtcgtgggggatggactcactgcagaagcaggacctccggaggcccaagatccatggggcagtccaggcatctccctaccagccgcccacattggcttcgctgcagcgcttgctgtgggtccgtcaggctgccacactgaaccatatcgatgaggtctggcccagcctcttcctgggagatgcgtacgcagcccgggacaagagcaagctgatccagctgggaatcacccacgttgtgaatgccgctgcaggcaagttccaggtggacacaggtgccaaattctaccgtggaatgtccctggagtactatggcatcgaggcggacgacaaccccttcttcgacctcagtgtctactttctgcctgttgctcgatacatccgagctgccctcagtgttccccaaggccgcgtgctggtacactgtgccatgggggtaagccgctctgccacacttgtcctggccttcctcatgatctgtgagaacatgacgctggtagaggccatccagacggtgcaggcccaccgcaatatctgccctaactcaggcttcctccggcagctccaggttctggacaaccgactggggcgggagacggggcggttctgatctggcaggcagccaggatccctgacccttggcccaaccccaccagcctggccctgggaacagcaggctctgctgtttctagtgaccctgagatgtaaacagcaagtgggggctgaggcagaggcagggatagctgggtggtgacctcttagcgggtggatttccctgacccaattcagagattctttatgcaaaagtgagttcagtccatctctataataaaatattcatcgtcataaa

SEQ ID NO: 128195 - DNA, 1015 bp, Homo sapiens
  Payload ID: 5101
  Gene Symbol: DUSP13
  Gene Name: dual specificity phosphatase 13
  ENST ID: ENST00000605915
  CDS Start-End: 113-775
ggcagaacctgcccagccctgttccgctcaggcagagtcctgcccctgcacccactcccccattcccggccccaggccatgccccagggtccctgactccttcagccagcagatgcctgaaacaagctacctgacccgggtggggcctgacatccagtgctggcctgagtcgtgggggatggactcactgcagaagcaggacctccggaggcccaagatccatggggcagtccaggcatctccctaccagccgcccacattggcttcgctgcagcgcttgctgtgggtccgtcaggctgccacactgaaccatatcgatgaggtctggcccagcctcttcctgggagatgcgtacgcagcccgggacaagagcaagctgatccagctgggaatcacccacgttgtgaatgccgctgcaggcaagttccaggtggacacaggtgccaaattctaccgtggaatgtccctggagtactatggcatcgaggcggacgacaaccccttcttcgacctcagtgtctactttctgcctgttgctcgatacatccgagctgccctcagtgttccccaaggccgcgtgctggtacactgtgccatgggggtaagccgctctgccacacttgtcctggccttcctcatgatctgtgagaacatgacgctggtagaggccatccagacggtgcaggcccaccgcaatatctgccctaactcaggcttcctccggcagctccaggttctggacaaccgactggggcgggagacggggcggttctgatctggcaggcagccaggatccctgacccttggcccaaccccaccagcctggccctgggaacagcaggctctgctgtttctagtgaccctgagatgtaaacagcaagtgggggctgaggcagaggcagggatagctgggtggtgacctcttagcgggtggatttccctgacccaattcagagattctttatgcaaaagtgagttcagtccatctctataataaaatattcatcgtcataaa

SEQ ID NO: 128196 - DNA, 628 bp, Homo sapiens
  Payload ID: 5101
  Gene Symbol: DUSP13
  Gene Name: dual specificity phosphatase 13
  ENST ID: ENST00000473072
  CDS Start-End: 50-628
gaggcagagaggagtgaccacagaggcagaggggtgggcgggctggcccatggctgagacctctctcccagagctggggggagaggacaaagccacgccttgccccagcatcctggagctggaggagctcctgcgggcagggaagtcttcttgcagccgtgtggacgaagtttggcccaaccttttcataggagatgcccaaggtcctggtgcactgtgtggtgggcgtgagccgctctgccacgctggtcctggcctacctcatgctgcaccagcggctgtccctgcgccaggcggtgatcaccgtgaggcagcaccgatgggtcttccccaaccgaggcttcctgcaccagctctgcaggctggaccagcaactgcggggtgccggccagagctgaggggccagagctggtccttactccctgccatggggctctgccactttgccaccctggcactgatcctgctggtgctgctggaggctctggcccaggcggacacacagaagatggtggaagcccagcgtggggtcggccctagagcctgctactccatctggctcctcctggcgcctacaccccctctcagccactgtcttcagtctccacagaaacagcatcaagtgtgc

SEQ ID NO: 128197 - DNA, 1019 bp, Homo sapiens
  Payload ID: 5101
  Gene Symbol: DUSP13
  Gene Name: dual specificity phosphatase 13
  Uniprot ID: Q9UII6
  ENST ID: ENST00000607131
  CDS Start-End: 188-784
gcatcctggagctggaggagctcctgcgggcagggaagtcttcttgcagccgtgtggacgaagtttggcccaaccttttcataggagatgcaaacagcatcaagtgtgcggagacaggcggctgaaagccagcagcacgaactgcccgtcagagaagtgcacagcctgggccagatactcccacaggatggactcactgcagaagcaggacctccggaggcccaagatccatggggcagtccaggcatctccctaccagccgcccacattggcttcgctgcagcgcttgctgtgggtccgtcaggctgccacactgaaccatatcgatgaggtctggcccagcctcttcctgggagatgcgtacgcagcccgggacaagagcaagctgatccagctgggaatcacccacgttgtgaatgccgctgcaggcaagttccaggtggacacaggtgccaaattctaccgtggaatgtccctggagtactatggcatcgaggcggacgacaaccccttcttcgacctcagtgtctactttctgcctgttgctcgatacatccgagctgccctcagtgttccccaaggccgcgtgctggtacactgtgccatgggggtaagccgctctgccacacttgtcctggccttcctcatgatctgtgagaacatgacgctggtagaggccatccagacggtgcaggcccaccgcaatatctgccctaactcaggcttcctccggcagctccaggttctggacaaccgactggggcgggagacggggcggttctgatctggcaggcagccaggatccctgacccttggcccaaccccaccagcctggccctgggaacagcaggctctgctgtttctagtgaccctgagatgtaaacagcaagtgggggctgaggcagaggcagggatagctgggtggtgacctcttagcgggtggatttccctgacccaattcagagattctttatgcaaaagtgagttcagtccatctctataataaaatattcatcgtc

SEQ ID NO: 128198 - DNA, 780 bp, Homo sapiens
  Payload ID: 5101
  Gene Symbol: DUSP13
  Gene Name: dual specificity phosphatase 13
  ENST ID: ENST00000607487
  CDS Start-End: 1-780
ctggggggagaggacaaagccacgccttgccccagcatcctggagctggaggagctcctgcgggcagggaagtcttcttgcagccgtgtggacgaagtttggcccaaccttttcataggagatgcccaaggtcctggtgcactgtgtggtgggcgtgagccgctctgccacgctggtcctggcctacctcatgctgcaccagcggctgtccctgcgccaggcggtgatcaccgtgaggcagcaccgatgggtcttccccaaccgaggcttcctgcaccagctctgcaggctggaccagcaactgcggggtgccggccagagctgaggggccagagctggtccttactccctgccatggggctctgccactttgccaccctggcactgatcctgctggtgctgctggaggctctggcccaggcggacacacagaagatgaaacagcatcaagtgtgcggagacaggcggctgaaagccagcagcacgaactgcccgtcagagaagtgcacagcctgggccagatactcccacaggatggactcactgcagaagcaggacctccggaggcccaagatccatggggcagtccaggcatctccctaccagccgcccacattggcttcgctgcagcgcttgctgtgggtccgtcaggctgccacactgaaccatatcgatgaggtctggcccagcctcttcctgggagatgcgtacgcagcccgggacaagagcaagctgatccagctgggaatcacccacgttgtgaatgccgctgcaggcaag

SEQ ID NO: 128199 - DNA, 2207 bp, Homo sapiens
  Payload ID: 5102
  Gene Symbol: DUSP14
  Gene Name: dual specificity phosphatase 14
  Uniprot ID: O95147
  ENST ID: ENST00000614411
  CDS Start-End: 979-1575
atatgtcaagaacacctcaacagagctgtaaaaaaaacacgacaggtctgacagttacctgggaaaggtgggggaacaggtggtagaagaacacattttttatgatgttcatggtacttacataacataaatgaataaaatagggccaacatggaaaagaaaacaaaatgaaggaaaatgtcaaattgccatcctgaacaccagcaccgcctgtaattagcgttcctggctgcagccacatctgcggtcctgctcctcatgaagccgtcctccgtgccatgtcccggccatgcctgtccttagcttcctggtgcacactgtcctccaccttgtgttcaggcacagggctgcttggctcacccttgctgcacctggcctgtccgtcctcccaccgcggtgccgcccaggccttcccactgcagggctggctaacggtgcatggaagagactcgagtccgtgttgtgtcctcatagcccaccgaggaggcagcagtgccggacatttcgcggataggttgtggtctctgagtctcctcctctcaagaggatgagatttgtctgtgttattgtcaaaactcttatttgtcacgccgcgggttatgtgtcagtaacaaaaagctgagatttaggccggtgtttcttactggtgcagcctttaaatgcacacctgcgaatgttcagtgcaccttccgcttcctggctctatttcagtcaaacctgaggtcgtagtgaaagtcggtgaggaattctttggaacttcctgattggctgtgtccttgcctccttgtcttcccgcagatttgatttgtatccactgtcaccagcactgctcacttaggactttctggatccggacccaggcagcgcacactggactcttgaggaagaaggagactctaattttggattccttggtggaggaaaataaaacactctggtcttgccgccaacgatgcaagtgtgactgctggcgtcttcatgagctccagaggtcacagcacgctaccaaggactctcatggcccctcggatgatttccgagggagacataggaggcattgctcaaatcacctcctctctattcctgggcagaggcagtgtggcctccaatcggcacctcctccaggctcgtggcatcacctgcattgttaatgctaccattgagatccctaatttcaactggccccaatttgagtatgttaaagtgcctctggctgacatgccgcatgcccccattggactgtactttgacaccgtggctgacaagatccacagtgtgagcaggaagcacggggccaccttggtgcactgtgctgcaggggtgagccgctcagccacgctgtgtatcgcgtacctgatgaaattccacaacgtgtgcctgctggaggcgtacaactgggtgaaagcccggcgacctgtcatcaggcccaacgtaggcttctggaggcaactgatagactacgagcgccagctctttgggaagtcgacagttaaaatggtacagacaccttatggcatagttcccgacgtctatgagaaggagtcccgacacctgatgccttactgggggatttagtgccactgaagcctgcgtcagcagcccgagcggggccggcatctgctccccgccgtctgctccctctccactctcttctcaaatggctgacttctggttctccctcaagtgttttttacactgggtgttcaaatttattttaagagatagggagggaggggacataaagggaatgcatacattgctagtcacatttttaaaattaacattttggaatagtgtttatggaaatctttagcttttaatcatttttaccaatttgaacagtttaataaactggttctgctctcttctgaatctcatgcctttggcaccttggtaggtgcaggaggagctcagtgcaaaaatcactttggggcctcattaaccctttagagacaagctttgccccaggctgcggaccagacagatgcttagggaaggttgataaccagcttcagtctctactggattagccctactctttcctttcccctccattatttagtgactctgtaagtaagttaaatacacccttattatttagctgttaagtaactataatgaaatctgctgcaaaatctctcttggaatccatgtgcccaggattatattagcattatttttaataaatctatatgcttaacatatta

SEQ ID NO: 128200 - DNA, 1537 bp, Homo sapiens
  Payload ID: 5102
  Gene Symbol: DUSP14
  Gene Name: dual specificity phosphatase 14
  Uniprot ID: O95147
  ENST ID: ENST00000614294
  CDS Start-End: 309-905
cgcggcccgccccgggcgcgggcggagggaggaggaggcggcgcgcgcggcgcccagcccgcagaagccggtggccgcgcaggaggacggagccctaaccgcaacccgcgccgcgccgcgccgcgccgatttgatttgtatccactgtcaccagcactgctcacttaggactttctggatccggacccaggcagcgcacactggactcttgaggaagaaggagactctaattttggattccttggtggaggaaaataaaacactctggtcttgccgccaacgatgcaagtgtgactgctggcgtcttcatgagctccagaggtcacagcacgctaccaaggactctcatggcccctcggatgatttccgagggagacataggaggcattgctcaaatcacctcctctctattcctgggcagaggcagtgtggcctccaatcggcacctcctccaggctcgtggcatcacctgcattgttaatgctaccattgagatccctaatttcaactggccccaatttgagtatgttaaagtgcctctggctgacatgccgcatgcccccattggactgtactttgacaccgtggctgacaagatccacagtgtgagcaggaagcacggggccaccttggtgcactgtgctgcaggggtgagccgctcagccacgctgtgtatcgcgtacctgatgaaattccacaacgtgtgcctgctggaggcgtacaactgggtgaaagcccggcgacctgtcatcaggcccaacgtaggcttctggaggcaactgatagactacgagcgccagctctttgggaagtcgacagttaaaatggtacagacaccttatggcatagttcccgacgtctatgagaaggagtcccgacacctgatgccttactgggggatttagtgccactgaagcctgcgtcagcagcccgagcggggccggcatctgctccccgccgtctgctccctctccactctcttctcaaatggctgacttctggttctccctcaagtgttttttacactgggtgttcaaatttattttaagagatagggagggaggggacataaagggaatgcatacattgctagtcacatttttaaaattaacattttggaatagtgtttatggaaatctttagcttttaatcatttttaccaatttgaacagtttaataaactggttctgctctcttctgaatctcatgcctttggcaccttggtaggtgcaggaggagctcagtgcaaaaatcactttggggcctcattaaccctttagagacaagctttgccccaggctgcggaccagacagatgcttagggaaggttgataaccagcttcagtctctactggattagccctactctttcctttcccctccattatttagtgactctgtaagtaagttaaatacacccttattatttagctgttaagtaactataatgaaatctgctgcaaaatctctcttggaatccatgtgcccaggattatattagcattatttttaataaatctatatgcttaacatatta

SEQ ID NO: 128201 - DNA, 1537 bp, Homo sapiens
  Payload ID: 5102
  Gene Symbol: DUSP14
  Gene Name: dual specificity phosphatase 14
  Uniprot ID: O95147
  ENST ID: ENST00000617516
  CDS Start-End: 309-905
cgcggcccgccccgggcgcgggcggagggaggaggaggcggcgcgcgcggcgcccagcccgcagaagccggtggccgcgcaggaggacggagccctaaccgcaacccgctccgcgccgcgccgcgccgatttgatttgtatccactgtcaccagcactgctcacttaggactttctggatccggacccaggcagcgcacactggactcttgaggaagaaggagactctaattttggattccttggtggaggaaaataaaacactctggtcttgccgccaacgatgcaagtgtgactgctggcgtcttcatgagctccagaggtcacagcacgctaccaaggactctcatggcccctcggatgatttccgagggagacataggaggcattgctcaaatcacctcctctctattcctgggcagaggcagtgtggcctccaatcggcacctcctccaggctcgtggcatcacctgcattgttaatgctaccattgagatccctaatttcaactggccccaatttgagtatgttaaagtgcctctggctgacatgccgcatgcccccattggactgtactttgacaccgtggctgacaagatccacagtgtgagcaggaagcacggggccaccttggtgcactgtgctgcaggggtgagccgctcagccacgctgtgtatcgcgtacctgatgaaattccacaacgtgtgcctgctggaggcgtacaactgggtgaaagcccggcgacctgtcatcaggcccaacgtaggcttctggaggcaactgatagactacgagcgccagctctttgggaagtcgacagttaaaatggtacagacaccttatggcatagttcccgacgtctatgagaaggagtcccgacacctgatgccttactgggggatttagtgccactgaagcctgcgtcagcagcccgagcggggccggcatctgctccccgccgtctgctccctctccactctcttctcaaatggctgacttctggttctccctcaagtgttttttacactgggtgttcaaatttattttaagagatagggagggaggggacataaagggaatgcatacattgctagtcacatttttaaaattaacattttggaatagtgtttatggaaatctttagcttttaatcatttttaccaatttgaacagtttaataaactggttctgctctcttctgaatctcatgcctttggcaccttggtaggtgcaggaggagctcagtgcaaaaatcactttggggcctcattaaccctttagagacaagctttgccccaggctgcggaccagacagatgcttagggaaggttgataaccagcttcagtctctactggattagccctactctttcctttcccctccattatttagtgactctgtaagtaagttaaatacacccttattatttagctgttaagtaactataatgaaatctgctgcaaaatctctcttggaatccatgtgcccaggattatattagcattatttttaataaatctatatgcttaacatatta

SEQ ID NO: 128202 - DNA, 1559 bp, Homo sapiens
  Payload ID: 5102
  Gene Symbol: DUSP14
  Gene Name: dual specificity phosphatase 14
  Uniprot ID: O95147
  ENST ID: ENST00000613659
  CDS Start-End: 345-941
ctcatcttctgacgcttgggggaggagaggtagttgcttggtatttttggctttccaccataaaactggagacagtttccttcattccaagtcgttttaatgtcactgttgaacgtgtgtgtcctgagttctcatctgaaagctttcatatcggttgactgcagatttgatttgtatccactgtcaccagcactgctcacttaggactttctggatccggacccaggcagcgcacactggactcttgaggaagaaggagactctaattttggattccttggtggaggaaaataaaacactctggtcttgccgccaacgatgcaagtgtgactgctggcgtcttcatgagctccagaggtcacagcacgctaccaaggactctcatggcccctcggatgatttccgagggagacataggaggcattgctcaaatcacctcctctctattcctgggcagaggcagtgtggcctccaatcggcacctcctccaggctcgtggcatcacctgcattgttaatgctaccattgagatccctaatttcaactggccccaatttgagtatgttaaagtgcctctggctgacatgccgcatgcccccattggactgtactttgacaccgtggctgacaagatccacagtgtgagcaggaagcacggggccaccttggtgcactgtgctgcaggggtgagccgctcagccacgctgtgtatcgcgtacctgatgaaattccacaacgtgtgcctgctggaggcgtacaactgggtgaaagcccggcgacctgtcatcaggcccaacgtaggcttctggaggcaactgatagactacgagcgccagctctttgggaagtcgacagttaaaatggtacagacaccttatggcatagttcccgacgtctatgagaaggagtcccgacacctgatgccttactgggggatttagtgccactgaagcctgcgtcagcagcccgagcggggccggcatctgctccccgccgtctgctccctctccactctcttctcaaatggctgacttctggttctccctcaagtgttttttacactgggtgttcaaatttattttaagagatagggagggaggggacataaagggaatgcatacattgctagtcacatttttaaaattaacattttggaatagtgtttatggaaatctttagcttttaatcatttttaccaatttgaacagtttaataaactggttctgctctcttctgaatctcatgcctttggcaccttggtaggtgcaggaggagctcagtgcaaaaatcactttggggcctcattaaccctttagagacaagctttgccccaggctgcggaccagacagatgcttagggaaggttgataaccagcttcagtctctactggattagccctactctttcctttcccctccattatttagtgactctgtaagtaagttaaatacacccttattatttagctgttaagtaactataatgaaatctgctgcaaaatctctcttggaatccatgtgcccaggattatattagcattatttttaataaatctata

SEQ ID NO: 128203 - DNA, 1559 bp, Homo sapiens; identical to SEQ ID NO: 128202
  Payload ID: 5102
  Gene Symbol: DUSP14
  Gene Name: dual specificity phosphatase 14
  ENST ID: ENST00000632468
  CDS Start-End: 345-941

SEQ ID NO: 128204 - DNA, 2207 bp, Homo sapiens; identical to SEQ ID NO: 128199
  Payload ID: 5102
  Gene Symbol: DUSP14
  Gene Name: dual specificity phosphatase 14
  ENST ID: ENST00000633870
  CDS Start-End: 979-1575

SEQ ID NO: 128205 - DNA, 1732 bp, Homo sapiens
  Payload ID: 5103
  Gene Symbol: DUSP15
  Gene Name: dual specificity phosphatase 15
  Uniprot ID: Q9H1R2
  ENST ID: ENST00000278979
  CDS Start-End: 78-965
gttgtcccgcgggccgtgggcccggcacactggggctttgtccggccccccgccgcgacccgaggcgggggccccacatgaccgaaggggtacttcctggactctacctcggaaacttcattgatgccaaagacctggatcagctgggccgaaataagatcacacacatcatctctatccatgagtcaccccagcctctgctgcaggatatcacctaccttcgcatcccggtcgctgatacccctgaggtacccatcaaaaagcacttcaaagaatgtatcaacttcatccactgctgccgccttaatggggggaactgccttgtgcactgctttgcaggcatctctcgcagcaccacgattgtgacagcgtatgtgatgactgtgacggggctaggctggcgggacgtgcttgaagccatcaaggccaccaggcccatcgccaaccccaacccaggctttaggcagcagcttgaagagtttggctgggccagttcccagaagggtgccagacataggacctcaaaaacctctggtgcccaatgccctccgatgacttcagcaacctgcctgctggctgcacgtgtggctcttctctccgcagcgctggtgcgcgaagccaccgggcgcacagcccagcgctgtcgtctgagtccgcgggcggccgccgagcgcctgctggggccgccacctcacgttgcagcaggatggtcaccggacccaaagtaccagatctgtctgtgcttcggtgaggaggacccgggccccacacagcaccccaaggagcagctcatcatggcggacgtgcaggtgcagcttcggcctgggagctcgtcctgcactctaagtgcctcaaccgagcgcccagatgggtcctcaacccctggcaaccccgatggcatcactcaccttcaatgcagctgcctccatcctaagcgagccgcttcctcttcttgtacccgctgaaggcagcccccaacaggggggctccctactcccacccaaccctgcccacactaagcccatagacttggggcctcccccggcacatcacccaggtctgccggacggcagaggtggatcgcggccttccactcctctgtcacggggccccggaactcgagagtaggccacaccgccccccagctgggcatggggcttcggcaggaaactgaacttgatcttgaggccccagaaaggcagcaactggagcagaagcaagacttcatctcttgctgacagcccaatttgtcaatagcgctttcctcagagccagccttaacctgctgttgagtccattaaaacgtttgcttaaagtttttaccaataattagatcatcagggttgtttagtgtgggatcaagccataacaaaactgcctagcctctcaggggcctagaatttacagaaccttcctcctccctgcagctagtctctcttctttattctgggggctgggaaggatcccaaaacagggaacttggccgaaccctgggctttggatgctaaccactgaagtaccagcacctgtaggatgctgtctttgaagaaactgaggcggacctccaaatgcagccctaaggcagaggtcaacgtggaagaccagcccttctccaagccccactggtctttgcaagctgtacgttgtaggcaatctgagaactggaaagggggactacaaccagaaagttggttaccctgccatgggaataaagtagctgttttccacccca

SEQ ID NO: 128206 - DNA, 1454 bp, Homo sapiens
  Payload ID: 5103
  Gene Symbol: DUSP15
  Gene Name: dual specificity phosphatase 15
  Uniprot ID: Q9H1R2
  ENST ID: ENST00000339738
  CDS Start-End: 411-1118
cgcgcctgccggtgccagggtggggtaaggcccccgcccccacctccggaggtggcggccccacgcggccccaacaaactgccgttgtcccgcgggccgtgggcccggcacactggggctttgtccggccccccgccgcgacccgaggcgggggccccacatgaccgaaggggtaggaggagcctgcggcggcggcggtggcagcggcggctccaccaccatttccctcccgggccgggggtcggcgggcggtggcggtggctgggcagggctgggcagggccgcggacgccaggccccccgttccccgccaggctgcaggcgtcgggcctgggccgtcagggcagctgtgaccggatcgcttcccgggcggcgagctgggggtgcacccggaccgccgcccccgggatcatgggcaatggcatgaccaaggtacttcctggactctacctcggaaacttcattgatgccaaagacctggatcagctgggccgaaataagatcacacacatcatctctatccatgagtcaccccagcctctgctgcaggatatcacctaccttcgcatcccggtcgctgatacccctgaggtacccatcaaaaagcacttcaaagaatgtatcaacttcatccactgctgccgccttaatggggggaactgccttgtgcactgctttgcaggcatctctcgcagcaccacgattgtgacagcgtatgtgatgactgtgacggggctaggctggcgggacgtgcttgaagccatcaaggccaccaggcccatcgccaaccccaacccaggctttaggcagcagcttgaagagtttggctgggccagttcccagaagcttcgccggcagctggaggagcgcttcggcgagagccccttccgcgacgaggaggagttgcgcgcgctgctgccgctgtgcaagcgctgccggcagggctccgcgacctcggcctcctccgccgggccgcactcagcagcctccgagggaaccgtgcagcgcctggtgccgcgcacgccccgggaagcccaccggccgctgccgctgctggcgcgcgtcaagcagactttctcttgcctcccccggtgtctgtcccgcaagggcggcaagtgaggatgcagtccagccgtggctccccacttccgactggctcccttcgggggctgtctgcgccttccacgccccccaggacgggcccagaggctgggggagccccgcggcggcctgaaccctgcctcccgcgcccgccctgctcgtccgcgtctgcagtcagcgtccccaacctgtgcgtctctgtgtccgggccggcctgctgcagccacctggtgccttagtccttgggctgggggagggggcccacccttaaaggcggcgggaggggagggagggagagtggagggtttgacgggcctggagggtattaaagagacacagaagaagctgcctgtc

SEQ ID NO: 128207 - DNA, 1077 bp, Homo sapiens
  Payload ID: 5103
  Gene Symbol: DUSP15
  Gene Name: dual specificity phosphatase 15
  Uniprot ID: Q9H1R2
  ENST ID: ENST00000375966
  CDS Start-End: 43-741
ctttgtccggccccccgccgcgacccgaggcgggggccccacatgaccgaaggggtacttcctggactctacctcggaaacttcattgatgccaaagacctggatcagctgggccgaaataagatcacacacatcatctctatccatgagtcaccccagcctctgctgcaggatatcacctaccttcgcatcccggtcgctgatacccctgaggtacccatcaaaaagcacttcaaagaatgtatcaacttcatccactgctgccgccttaatggggggaactgccttgtgcactgctttgcaggcatctctcgcagcaccacgattgtgacagcgtatgtgatgactgtgacggggctaggctggcgggacgtgcttgaagccatcaaggccaccaggcccatcgccaaccccaacccaggctttaggcagcagcttgaagagtttggctgggccagttcccagaagcttcgccggcagctggaggagcgcttcggcgagagccccttccgcgacgaggaggagttgcgcgcgctgctgccgctgtgcaagcgctgccggcagggctccgcgacctcggcctcctccgccgggccgcactcagcagcctccgagggaaccgtgcagcgcctggtgccgcgcacgccccgggaagcccaccggccgctgccgctgctggcgcgcgtcaagcagactttctcttgcctcccccggtgtctgtcccgcaagggcggcaagtgaggatgcagtccagccgtggctccccacttccgactggctcccttcgggggctgtctgcgccttccacgccccccaggacgggcccagaggctgggggagccccgcggcggcctgaaccctgcctcccgcgcccgccctgctcgtccgcgtctgcagtcagcgtccccaacctgtgcgtctctgtgtccgggccggcctgctgcagccacctggtgccttagtccttgggctgggggagggggcccacccttaaaggcggcgggaggggagggagggagagtggagggtttgacgggcctggagggtattaaagagacacagaagaagctgcctgtc

SEQ ID NO: 128208 - DNA, 1212 bp, Homo sapiens
  Payload ID: 5103
  Gene Symbol: DUSP15
  Gene Name: dual specificity phosphatase 15
  Uniprot ID: Q9H1R2
  ENST ID: ENST00000398083
  CDS Start-End: 478-876
cctcggctctctccggggctgtttctccatcctgtcccgcctctgcctgtcattgcctttctgcctccccagccccagaatttccatccctgcaccctgcaagtctacctctctcctctcctctcctcctaagacctgccttcctcctctcccctctcatacccaagctggcctcccttggttccctcggtacttcctggactctacctcggaaacttcattgatgccaaagacctggatcagctgggccgaaataagatcacacacatcatctctatccatgagtcaccccagcctctgctgcaggatatcacctaccttcgcatcccggtcgctgatacccctgaggtacccatcaaaaagcacttcaaagaatgtatcaacttcatccactgctgccgccttaatggggggaactgccttgtgcactgctttgcaggcatctctcgcagcaccacgattgtgacagcgtatgtgatgactgtgacggggctaggctggcgggacgtgcttgaagccatcaaggccaccaggcccatcgccaaccccaacccaggctttaggcagcagcttgaagagtttggctgggccagttcccagaagcttcgccggcagctggaggagcgcttcggcgagagccccttccgcgacgaggaggagttgcgcgcgctgctgccgctgtgcaagcgctgccggcagggctccgcgacctcggcctcctccgccgggccgcactcagcagcctccgagggaaccgtgcagcgcctggtgccgcgcacgccccgggaagcccaccggccgctgccgctgctggcgcgcgtcaagcagactttctcttgcctcccccggtgtctgtcccgcaagggcggcaagtgaggatgcagtccagccgtggctccccacttccgactggctcccttcgggggctgtctgcgccttccacgccccccaggacgggcccagaggctgggggagccccgcggcggcctgaaccctgcctcccgcgcccgccctgctcgtccgcgtctgcagtcagcgtccccaacctgtgcgtctctgtgtccgggccggcctgctgcagccacctggtgccttagtccttgggctgggggagggggcccacccttaaaggcggcgggaggggagggagggagagtggagggtttgacgggcctggagggtattaaagagacacagaagaagctgcctgtc

SEQ ID NO: 128209 - DNA, 1256 bp, Homo sapiens
  Payload ID: 5103
  Gene Symbol: DUSP15
  Gene Name: dual specificity phosphatase 15
  Uniprot ID: Q9H1R2
  ENST ID: ENST00000398084
  CDS Start-End: 522-920
gccccggccgccgcggcccggcgctgaccagctcggtccgcccgcctctgaccttctgttctcgccggtctccgtgcggcggcatctccgtgtccctgtgactcgagaccgcggctgtcgggtctccccctctctgaccctgcgtctctgtccccgctgtgtccgccctctctccgtgactctgtgtgtctctcgctgtcttgctgtggctgtcactcccaggctgtctcccagtacttcctggactctacctcggaaacttcattgatgccaaagacctggatcagctgggccgaaataagatcacacacatcatctctatccatgagtcaccccagcctctgctgcaggatatcacctaccttcgcatcccggtcgctgatacccctgaggtacccatcaaaaagcacttcaaagaatgtatcaacttcatccactgctgccgccttaatggggggaactgccttgtgcactgctttgcaggcatctctcgcagcaccacgattgtgacagcgtatgtgatgactgtgacggggctaggctggcgggacgtgcttgaagccatcaaggccaccaggcccatcgccaaccccaacccaggctttaggcagcagcttgaagagtttggctgggccagttcccagaagcttcgccggcagctggaggagcgcttcggcgagagccccttccgcgacgaggaggagttgcgcgcgctgctgccgctgtgcaagcgctgccggcagggctccgcgacctcggcctcctccgccgggccgcactcagcagcctccgagggaaccgtgcagcgcctggtgccgcgcacgccccgggaagcccaccggccgctgccgctgctggcgcgcgtcaagcagactttctcttgcctcccccggtgtctgtcccgcaagggcggcaagtgaggatgcagtccagccgtggctccccacttccgactggctcccttcgggggctgtctgcgccttccacgccccccaggacgggcccagaggctgggggagccccgcggcggcctgaaccctgcctcccgcgcccgccctgctcgtccgcgtctgcagtcagcgtccccaacctgtgcgtctctgtgtccgggccggcctgctgcagccacctggtgccttagtccttgggctgggggagggggcccacccttaaaggcggcgggaggggagggagggagagtggagggtttgacgggcctggagggtattaaagagacacagaagaagctgcctgtc

SEQ ID NO: 128210 - DNA, 464 bp, Homo sapiens
  Payload ID: 5103
  Gene Symbol: DUSP15
  Gene Name: dual specificity phosphatase 15
  ENST ID: ENST00000428829
  CDS Start-End: 236-464
ggaggagcctgcggcggcggcggtggcagcggcggctccaccaccatttccctcccgggccgggggtcggcgggcggtggcggtggctgggcagggctgggcagggccgcggacgccaggccccccgttccccgccaggctgcaggcgtcgggcctgggccgtcagggcagctgtgaccggatcgcttcccgggcggcgagctgggggtgcacccggaccgccgcccccgggatcatgggcaatggcatgaccaagatgccaaagacctggatcagctgggccgaaataagatcacacacatcatctctatccatgagtcaccccagcctctgctgcaggatatcacctaccttcgcatcccggtcgctgatacccctgaggtacccatcaaaaagcacttcaaagaatgtatcaacttcatccactgctgccgccttaatggggggaactgccttgtgcactg

SEQ ID NO: 128211 - DNA, 1048 bp, Homo sapiens
  Payload ID: 5103
  Gene Symbol: DUSP15
  Gene Name: dual specificity phosphatase 15
  ENST ID: ENST00000447647
  CDS Start-End: 1-281
acacgcggcttcctccaggcggatggtcaccggacccaaagtaccagatctgtctgtgcttcggtgaggaggacccgggccccacacagcaccccaaggagcagctcatcatggcggacgtgcaggtgcagcttcggcctgggagctcgtcctgcactctaagtgcctcaaccgagcgcccagatgggtcctcaacccctggcaaccccgatggcatcactcaccttcaatgcagctgcctccatcctaagcgagccgcttcctcttcttgtacccgctgaaggcagcccccaacaggggggctccctactcccacccaaccctgcccacactaagcccatagacttggggcctcccccggcacatcacccaggtctgccggacggcagaggtggatcgcggccttccactcctctgtcacggggccccggaactcgagagtaggccacaccgccccccagctgggcatggggcttcggcaggaaactgaacttgatcttgaggccccagaaaggcagcaactggagcagaagcaagacttcatctcttgctgacagcccaatttgtcaatagcgctttcctcagagccagccttaacctgctgttgagtccattaaaacgtttgcttaaagtttttaccaataattagatcatcagggttgtttagtgtgggatcaagccataacaaaactgcctagcctctcaggggcctagaatttacagaaccttcctcctccctgcagctagtctctcttctttattctgggggctgggaaggatcccaaaacagggaacttggccgaaccctgggctttggatgctaaccactgaagtaccagcacctgtaggatgctgtctttgaagaaactgaggcggacctccaaatgcagccctaaggcagaggtcaacgtggaagaccagcccttctccaagccccactggtctttgcaagctgtacgttgtaggcaatctgagaactggaaagggggactacaaccagaaagttggttaccctgccatgggaataaagtagctgttttccacccca

SEQ ID NO: 128212 - DNA, 1651 bp, Homo sapiens
  Payload ID: 5103
  Gene Symbol: DUSP15
  Gene Name: dual specificity phosphatase 15
  Uniprot ID: Q9H1R2
  ENST ID: ENST00000486996
  CDS Start-End: 917-1315
ctgttctcgccggtctccgtgcggcggcatctccgtgtccctgtgactcgagaccgcggctgtcgggtctccccctctctgaccctgcgtctctgtccccgctgtgtccgccctctctccgtgactctgtgtgtctctcgctgtcttgctgtggctgtcactcccaggctgtctcccagtgagtcctgctctccgtctgcatgtgtccctctcccttgtcgctgactcctcggctctctccggggctgtttctccatcctgtcccgcctctgcctgtcattgcctttctgcctccccagccccagaatttccatccctgcaccctgcaagtctacctctctcctctcctctcctcctaagacctgccttcctcctctcccctctcatacccaagctggcctcccttggttccctcggttggttaactggccccctagcctaccctccccagagccccagacccctctcacagaggactcagggcccacaaaagggaagagagtgctccctgagccctgaggtccatacccttcatgggacagagaggggctgtgggccccccagctgccctgggggtggaagggggtgcagcccctgccccactgacccttgcctgtccttcctctaggtacttcctggactctacctcggaaacttcattgatgccaaagacctggatcagctgggccgaaataagatcacacacatcatctctatccatgagtcaccccagcctctgctgcaggatatcacctaccttcgcatcccggtcgctgatacccctgaggtacccatcaaaaagcacttcaaagaatgtatcaacttcatccactgctgccgccttaatggggggaactgccttgtgcactgctttgcaggcatctctcgcagcaccacgattgtgacagcgtatgtgatgactgtgacggggctaggctggcgggacgtgcttgaagccatcaaggccaccaggcccatcgccaaccccaacccaggctttaggcagcagcttgaagagtttggctgggccagttcccagaagcttcgccggcagctggaggagcgcttcggcgagagccccttccgcgacgaggaggagttgcgcgcgctgctgccgctgtgcaagcgctgccggcagggctccgcgacctcggcctcctccgccgggccgcactcagcagcctccgagggaaccgtgcagcgcctggtgccgcgcacgccccgggaagcccaccggccgctgccgctgctggcgcgcgtcaagcagactttctcttgcctcccccggtgtctgtcccgcaagggcggcaagtgaggatgcagtccagccgtggctccccacttccgactggctcccttcgggggctgtctgcgccttccacgccccccaggacgggcccagaggctgggggagccccgcggcggcctgaaccctgcctcccgcgcccgccctgctcgtccgcgtctgcagtcagcgtccccaacctgtgcgtctctgtgtccgggccggcctgctgcagccacctggtgccttagtccttgggctgggggagggggcccacccttaaaggcggcgggaggggagggagggagagtggagggtttgacgggcctggagggtattaaagagacacagaagaagctgcctgtc

SEQ ID NO: 128213 - DNA, 3402 bp, Homo sapiens
  Payload ID: 5104
  Gene Symbol: DUSP16
  Gene Name: dual specificity phosphatase 16
  Uniprot ID: Q9BY84
  ENST ID: ENST00000228862
  CDS Start-End: 633-1064
ggaagagaaagagtgaagaaaagttgcgagcgtctcctctcttcctaagcctcccgccccaacccacccctcagagaaggagaagataatatactgaaaagaagaggaggaggagagcgacgggacgggacgcgagcgggagcgcagccgccctctcggctccgcggcggcgcctcgcaagtccgggaggcgaggggggcccgaggggagacgccgtgacaactttcgtttccctctgagggaattgggaggtcggcggccccaaaagctttcagtccagtgtaaagctgttggagcgcgggagcaaaggtaaagaatgatgtaatgcgctggctgctccaaagcatcttttgttgtggaatggttattccagtcatctctttatgaatcaaatgtgaggggctgctttgtggacggagtcctttgcaagagcacatcaacgggaaagagaaagagacattcacttggagggctcttgctgaaaatgggtttaactctccttttgccagtcaccaccagcctgacctcatacacttttagtacaatggagtggctgagcctttgagcacaccaccattacatcatcgtggcaaattaaagaaggaggtgggaaaagaggacttattgttgtcatggcccatgagatgattggaactcaaattgttactgagaggttggtggctctgctggaaagtggaacggaaaaagtgctgctaattgatagccggccatttgtggaatacaatacatcccacattttggaagccattaatatcaactgctccaagcttatgaagcgaaggttgcaacaggacaaagtgttaattacagagctcatccagcattcagcgaaacataaggttgacattgattgcagtcagaaggttgtagtttacgatcaaagctcccaagatgttgcctctctctcttcagactgttttctcactgtacttctgggtaaactggagaagagcttcaactctgttcacctgcttgcaggagctgatgcagcagaatgggattggttatgtgttaaatgccagcaatacctgtccaaagcctgactttatccccgagtctcatttcctgcgtgtgcctgtgaatgacagcttttgtgagaaaattttgccgtggttggacaaatcagtagatttcattgagaaagcaaaagcctccaatggatgtgttctagtgcactgtttagctgggatctcccgctccgccaccatcgctatcgcctacatcatgaagaggatggacatgtctttagatgaagcttacagatttgtgaaagaaaaaagacctactatatctccaaacttcaattttctgggccaactcctggactatgagaagaagattaagaaccagactggagcatcagggccaaagagcaaactcaagctgctgcacctggagaagccaaatgaacctgtccctgctgtctcagagggtggacagaaaagcgagacgcccctcagtccaccctgtgccgactctgctacctcagaggcagcaggacaaaggcccgtgcatcccgccagcgtgcccagcgtgcccagcgtgcagccgtcgctgttagaggacagcccgctggtacaggcgctcagtgggctgcacctgtccgcagacaggctggaagacagcaataagctcaagcgttccttctctctggatatcaaatcagtttcatattcagccagcatggcagcatccttacatggcttctcctcatcagaagatgctttggaatactacaaaccttccactactctggatgggaccaacaagctatgccagttctcccctgttcaggaactatcggagcagactcccgaaaccagtcctgataaggaggaagccagcatccccaagaagctgcagaccgccaggccttcagacagccagagcaagcgattgcattcggtcagaaccagcagcagtggcaccgcccagaggtcccttttatctccactgcatcgaagtgggagcgtggaggacaattaccacaccagcttccttttcggcctttccaccagccagcagcacctcacgaagtctgctggcctgggccttaagggctggcactcggatatcttggccccccagacctctaccccttccctgaccagcagctggtattttgccacagagtcctcacacttctactctgcctcagccatctacggaggcagtgccagttactctgcctacagctgcagccagctgcccacttgcggagaccaagtctattctgtgcgcaggcggcagaagccaagtgacagagctgactcgcggcggagctggcatgaagagagcccctttgaaaagcagtttaaacgcagaagctgccaaatggaatttggagagagcatcatgtcagagaacaggtcacgggaagagctggggaaagtgggcagtcagtctagcttttcgggcagcatggaaatcattgaggtctcctgagaagaaagacacttgtgacttctatagacaatttttttttcttgttcacaaaaaaattccctgtaaatctgaaatatatatatgtacatacatatatatttttggaaaatggagctatggtgtaaaagcaacaggtggatcaacccagttgttactctcttaacatctgcatttgagagatcagctaatacttctctcaacaaaaatggaagggcagatgctagaatcccccctagacggaggaaaaccattttattcagtgaattacacatcctcttgttcttaaaaaagcaagtgtctttggtgttggaggacaaaatcccctaccattttcacgttgtgctactaagagatctcaaatattagtctttgtccggacccttccatagtacaccttagcgctgagactgagccagcttgggggtcaggtaggtagaccctgttagggacagagcctagtggtaaatccaagagaaatgatcctatccaaagctgattcacaaacccacgctcacctgacagccgagggacacgagcatcactctgctggacggaccattaggggccttgccaaggtctaccttagagcaaacccagtacctcagacaggaaagtcggggctttgaccactaccatatctggtagcccattttctaggcattgtgaataggtaggtagctagtcacacttttcagaccaattcaaactgtctatgcacaaaattcccgtgggcctagatggagataatttttttttcttctcagctttatgaagagaagggaaactgtctaggattcagctgaaccaccaggaacctggcaacatcacgatttaagctaaggttgggaggctaacgagtctacctccctctttgtaaatcaaagaattgtttaaaatgggattgtcaatcctttaaataaagatgaacttggtttc

SEQ ID NO: 128214 - DNA, 5253 bp, Homo sapiens
  Payload ID: 5104
  Gene Symbol: DUSP16
  Gene Name: dual specificity phosphatase 16
  Uniprot ID: Q9BY84
  ENST ID: ENST00000298573
  CDS Start-End: 633-2630
ggaagagaaagagtgaagaaaagttgcgagcgtctcctctcttcctaagcctcccgccccaacccacccctcagagaaggagaagataatatactgaaaagaagaggaggaggagagcgacgggacgggacgcgagcgggagcgcagccgccctctcggctccgcggcggcgcctcgcaagtccgggaggcgaggggggcccgaggggagacgccgtgacaactttcgtttccctctgagggaattgggaggtcggcggccccaaaagctttcagtccagtgtaaagctgttggagcgcgggagcaaaggtaaagaatgatgtaatgcgctggctgctccaaagcatcttttgttgtggaatggttattccagtcatctctttatgaatcaaatgtgaggggctgctttgtggacggagtcctttgcaagagcacatcaacgggaaagagaaagagacattcacttggagggctcttgctgaaaatgggtttaactctccttttgccagtcaccaccagcctgacctcatacacttttagtacaatggagtggctgagcctttgagcacaccaccattacatcatcgtggcaaattaaagaaggaggtgggaaaagaggacttattgttgtcatggcccatgagatgattggaactcaaattgttactgagaggttggtggctctgctggaaagtggaacggaaaaagtgctgctaattgatagccggccatttgtggaatacaatacatcccacattttggaagccattaatatcaactgctccaagcttatgaagcgaaggttgcaacaggacaaagtgttaattacagagctcatccagcattcagcgaaacataaggttgacattgattgcagtcagaaggttgtagtttacgatcaaagctcccaagatgttgcctctctctcttcagactgttttctcactgtacttctgggtaaactggagaagagcttcaactctgttcacctgcttgcaggtgggtttgctgagttctctcgttgtttccctggcctctgtgaaggaaaatccactctagtccctacctgcatttctcagccttgcttacctgttgccaacattgggccaacccgaattcttcccaatctttatcttggctgccagcgagatgtcctcaacaaggagctgatgcagcagaatgggattggttatgtgttaaatgccagcaatacctgtccaaagcctgactttatccccgagtctcatttcctgcgtgtgcctgtgaatgacagcttttgtgagaaaattttgccgtggttggacaaatcagtagatttcattgagaaagcaaaagcctccaatggatgtgttctagtgcactgtttagctgggatctcccgctccgccaccatcgctatcgcctacatcatgaagaggatggacatgtctttagatgaagcttacagatttgtgaaagaaaaaagacctactatatctccaaacttcaattttctgggccaactcctggactatgagaagaagattaagaaccagactggagcatcagggccaaagagcaaactcaagctgctgcacctggagaagccaaatgaacctgtccctgctgtctcagagggtggacagaaaagcgagacgcccctcagtccaccctgtgccgactctgctacctcagaggcagcaggacaaaggcccgtgcatcccgccagcgtgcccagcgtgcccagcgtgcagccgtcgctgttagaggacagcccgctggtacaggcgctcagtgggctgcacctgtccgcagacaggctggaagacagcaataagctcaagcgttccttctctctggatatcaaatcagtttcatattcagccagcatggcagcatccttacatggcttctcctcatcagaagatgctttggaatactacaaaccttccactactctggatgggaccaacaagctatgccagttctcccctgttcaggaactatcggagcagactcccgaaaccagtcctgataaggaggaagccagcatccccaagaagctgcagaccgccaggccttcagacagccagagcaagcgattgcattcggtcagaaccagcagcagtggcaccgcccagaggtcccttttatctccactgcatcgaagtgggagcgtggaggacaattaccacaccagcttccttttcggcctttccaccagccagcagcacctcacgaagtctgctggcctgggccttaagggctggcactcggatatcttggccccccagacctctaccccttccctgaccagcagctggtattttgccacagagtcctcacacttctactctgcctcagccatctacggaggcagtgccagttactctgcctacagctgcagccagctgcccacttgcggagaccaagtctattctgtgcgcaggcggcagaagccaagtgacagagctgactcgcggcggagctggcatgaagagagcccctttgaaaagcagtttaaacgcagaagctgccaaatggaatttggagagagcatcatgtcagagaacaggtcacgggaagagctggggaaagtgggcagtcagtctagcttttcgggcagcatggaaatcattgaggtctcctgagaagaaagacacttgtgacttctatagacaatttttttttcttgttcacaaaaaaattccctgtaaatctgaaatatatatatgtacatacatatatatttttggaaaatggagctatggtgtaaaagcaacaggtggatcaacccagttgttactctcttaacatctgcatttgagagatcagctaatacttctctcaacaaaaatggaagggcagatgctagaatcccccctagacggaggaaaaccattttattcagtgaattacacatcctcttgttcttaaaaaagcaagtgtctttggtgttggaggacaaaatcccctaccattttcacgttgtgctactaagagatctcaaatattagtctttgtccggacccttccatagtacaccttagcgctgagactgagccagcttgggggtcaggtaggtagaccctgttagggacagagcctagtggtaaatccaagagaaatgatcctatccaaagctgattcacaaacccacgctcacctgacagccgagggacacgagcatcactctgctggacggaccattaggggccttgccaaggtctaccttagagcaaacccagtacctcagacaggaaagtcggggctttgaccactaccatatctggtagcccattttctaggcattgtgaataggtaggtagctagtcacacttttcagaccaattcaaactgtctatgcacaaaattcccgtgggcctagatggagataatttttttttcttctcagctttatgaagagaagggaaactgtctaggattcagctgaaccaccaggaacctggcaacatcacgatttaagctaaggttgggaggctaacgagtctacctccctctttgtaaatcaaagaattgtttaaaatgggattgtcaatcctttaaataaagatgaacttggtttcaagccaaatgtgaatttatttgggttggtagcagagcagcagcaccttcaaattctcagccaaagcagatgtttttgccctttctgcttcactgcatggatacagttggtaaaatgtaataatatggcagaattttataggaaacttcctagggaggtaaattatgggaagattaagaaaggtacaaattgctgaggagaagcaggaaacctgtttccttagtggcttttatcccctcggcatgcgatggggctgatgtttctatgattgcctcagactttcacatttactagtagggctgagagaggctttagtgaggaaggaatattcagaataaaacggttgagaaagctgagaagaccattgagttttgatcagttgtgaatagagtgcaaagccatggccaagctgtttttggaaacgctggccggcgtgtcttcagtggaaaaagcaaatcaaaatggagcgagagcaaaggggcgtcctcagtcctcaacctacaatcactgtatggaatcggtcctggcagctgaacataggaggtcactggaacaagtgatagtgcagattggctttcaaacatcctcctggcttgagttttatcagctacaatgtgggtcctcttttgaagccttaattcacaacagcagctttttgggggtggggctgggcgggtgttgtcattgttctttcccttcctgtaagtgtcgctagttgctgcctcgtatctcaggtttttctctgtttttgagaaatggacagttttttgaccaggatgtgacttcatgtttcctatggtgacttctaaaaccagcacagaatgatatgactcaacacagaccgacttggttatggggatgatgagccgcacagacctcactagttgtgcacaaataatgtgctatgatggggtgtaaagtgaaggcagaagagggtcagccgcattgttatgatactgggaaagtgctggtcaacgatttgagttagtttttagatatacattgaaatctttaatcagacattctcaagtttcacacagtagtttttgatgttatgtacacacacaccaaatgtgtaacagttcaccacttccagagtgtggtcatgcccaaaacatgtttaagaaaggaaagcagtagctccttgctaacgatgtttcaggaggtttgggggacttggttttaatgagcttctgtcatttagggcttctcttggccatggtcccccttccttctggaactgtgatgtagtcacatcctacagcctttagtgctggttcactagtgtcagataatcagttcttggaatcgagactgccgtggcgaaggggtggcctcggaggcaggctctggagctgcttggatgtctttaggtggggtggtggctggctctcttcagcatgtaattggggaaaccctcgcgtctactaggggtgatacagatggtgattttaaagagcaaaactagacttctatgtgagaagtgctggaaaatgatttaggacatgtgtaaagttagatggaaagactgtaaatgtttaatatgaatatagtgttcttttgaagtaaggccagctgttgaacggttaaactgtgcatttctcattttgatgtgtcatgtatgttaatgtatgaaatgattaaataaaatcaaaactggtacctgtttatacataaatacgagaaaa

SEQ ID NO: 128215 - DNA, 585 bp, Homo sapiens
  Payload ID: 5104
  Gene Symbol: DUSP16
  Gene Name: dual specificity phosphatase 16
  ENST ID: ENST00000541207
  CDS Start-End: 568-585
gttttaaaagattataagtaaatactctgctctttcaagtgaaccaaacctatcaaacctgtttagaaaataaaccaggcagaataaaatgatgcgaaatgttcattttaaaaaacttcaggatgggcacaaacacacagaagtgggaaatgaataaaagagtattgataaatttttgaaaattgttgaagctgagtaatgggctttcagtccagtgtaaagctgttggagcgcgggagcaaaggtaaagaatgatgtaatgcgctggctgctccaaagcatcttttgttgtggaatggttattccagtcatctctttatgaatcaaatgtgaggggctgctttgtggacggagtcctttgcaagagcacatcaacgggaaagagaaagagacattcacttggagggctcttgctgaaaatgggtttaactctccttttgccagtcaccaccagcctgacctcatacacttttagtacaatggagtggctgagcctttgagcacaccaccattacatcatcgtggcaaattaaagaaggaggtgggaaaagaggacttattgttgtcatggcccatgagatgatt

SEQ ID NO: 128216 - DNA, 566 bp, Homo sapiens
  Payload ID: 5104
  Gene Symbol: DUSP16
  Gene Name: dual specificity phosphatase 16
  ENST ID: ENST00000539940
  CDS Start-End: 492-566
aaaactctctgaagtttttatttacccagcgctctggctcccacttctgttttaaaagattataagtaaatactctgctctttcaagtgaaccaaacctatcaaacctgtttagaaaataaaccaggctttcagtccagtgtaaagctgttggagcgcgggagcaaaggtaaagaatgatgtaatgcgctggctgctccaaagcatcttttgttgtggaatggttattccagtcatctctttatgaatcaaatgtgaggggctgctttgtggacggagtcctttgcaagagcacatcaacgggaaagagaaagagacattcacttggagggctcttgctgaaaatgggtttaactctccttttgccagtcaccaccagcctgacctcatacacttttagtacaatggagtggctgagcctttgagcacaccaccattacatcatcgtggcaaattaaagaaggaggtgggaaaagaggacttattgttgtcatggcccatgagatgattggaactcaaattgttactgagaggttggtggctctgctggaaagtggaacggaaaaa

SEQ ID NO: 128217 - DNA, 566 bp, Homo sapiens; identical to SEQ ID NO: 128216
  Payload ID: 5104
  Gene Symbol: DUSP16
  Gene Name: Dual specificity phosphatase 16
  ENST ID: ENST00000626461
  CDS Start-End: 492-566

SEQ ID NO: 128218 - DNA, 3402 bp, Homo sapiens; identical to SEQ ID NO: 128213
  Payload ID: 5104
  Gene Symbol: DUSP16
  Gene Name: Dual specificity phosphatase 16
  ENST ID: ENST00000628303
  CDS Start-End: 633-1064

SEQ ID NO: 128219 - DNA, 585 bp, Homo sapiens; identical to SEQ ID NO: 128215
  Payload ID: 5104
  Gene Symbol: DUSP16
  Gene Name: Dual specificity phosphatase 16
  ENST ID: ENST00000629698
  CDS Start-End: 568-585

SEQ ID NO: 128220 - DNA, 5253 bp, Homo sapiens; identical to SEQ ID NO: 128214
  Payload ID: 5104
  Gene Symbol: DUSP16
  Gene Name: Dual specificity phosphatase 16
  ENST ID: ENST00000626413
  CDS Start-End: 633-2630

SEQ ID NO: 128221 - DNA, 2479 bp, Homo sapiens
  Payload ID: 5105
  Gene Symbol: DUSP18
  Gene Name: dual specificity phosphatase 18
  Uniprot ID: Q8NEJ0
  ENST ID: ENST00000334679
  CDS Start-End: 507-1073
gtcgcacatgcgcacagagcccgggcggctacggaagcggtgagactgtctctcggctgcagccctggtgcgacccggcccgttgccgtagagatgggcagggctggatggagtggggtgcggtgagctgagctgaccctgcttcgccacggggactgcagtgaccccggcttgccggcagggcgggtaacaggttgagccagggtggggctgctcaggggcgtggagccgaggccaggatttctctgaagacccggcacaggctattcctttctgcgacgagcccattgctatggaaaccaaagcgttaggccagcggggattgaggctgcgggatcatgacgggtctctctcccgaagaaccttgcctaaggcttccccaagcggctacttcctgagcgaacccgcccacccgcctgaaggagagagttttccatggacacagcctagcagaaagacgcagccttcgtgcttcgctgactgctgaccactgacccaccgccttgatgacagcaccctcgtgtgccttcccagttcagttccggcagccctcagtcagcggcctctcgcagataaccaaaagcctgtatatcagcaatggtgtggccgccaacaacaagctcatgctgtctagcaaccagatcaccatggtcatcaatgtctcagtggaggtagtgaacaccttgtatgaggatatccagtacatgcaggtacctgtggctgactcccctaactcacgtctctgtgacttctttgaccctattgctgaccatatccacagcgtggagatgaagcagggccgtactttgctgcactgtgctgctggtgtgagccgctcagctgccctgtgcctcgcctacctcatgaagtaccacgccatgtccctgctggacgcccacacgtggaccaagtcatgccggcccatcatccgacccaacagcggcttttgggagcagctcatccactatgagttccaattgtttggcaagaacactgtgcacatggtcagttccccagtgggaatgatccctgacatctatgagaaggaagtccgtttgatgattccactgtgagccatcccacgagcccctgcattggagtcagaggtacagatctattgttgatcttacaccaagatccaaacttgaacattctacttttgttgatacagaaaaaaacagatgatgccttttatgagcacaaaaaagagttgctgtagcttttaactttataatccattttttttaagattaaactaattgtgagatggtgaagataaattttctgccctgtgagtgacactggccaggggataggttgaggcagatggtgcccagaagaaagagggcagcacccattgcacatggcaggcctggaatcctgcagccctccccaaaaacagattgacccaggaatgaatctgctacaattccacctcattctttcacacccagagccagagccttaagcatcatggtacctcttgcgcttcttacagtgagtgccaatctactagataaatggccttcaggcagtgctccaggaatcctggggggtcccaggccacctctgcttccaccttcactataagtggcccagttctggttttctagattgtacttatgcataagatagtttttaaagaaagcattccactgtgtaaatttttttttgtctttttttgaaactgtcctgctctgtcacccatcctagagtgcagtagtgtgatcatggctcactgtagccacaacctctcaggctcaagtgatcctcttaccttagcctcctgcgtggctgggactacagatgtttgccaccatgcccgcctcattttttttctttttttatagagatgagattttactatgtcgcccagactggtctcaaactcctggcctcaagcaatcctcacgcctcagcctcccaaagtgttgatgagccactgtaccccgataccactgtataaaaaatttaaaaaaaattgtgagtgctattgtacatggcaaagtttcaaagagctcttggccatccctcaccaaactttggcaaaagatggtgttagtccccttctccagggcacatgagaaaaacaggcctaacatcaggtctcagcggttcctctcacaggccttggcttggaaggctggagcttcggaccaaggcccagccctgtcacctcctcttcatgtgatgtggacccctgggagcatcagtgtcctcatctgtccaatgacagcccttttctcacagagttattgtgaagattcaacaatttcttggcatagtgcctggcacatggtgtgtgcttagcgcaaatggcagctctcatcatgaatgatagactctttcaccctgctggtcccaggtcggcacacacatccccataatggcatttctcctttctgtgcacagcactttattgttacaaagtactcttccaaaaagttaccctgtgtgtaaaaaaaaaaaaaaaaaaaaa

SEQ ID NO: 128222 - DNA, 1157 bp, Homo sapiens
  Payload ID: 5105
  Gene Symbol: DUSP18
  Gene Name: dual specificity phosphatase 18
  ENST ID: ENST00000342474
  CDS Start-End: 669-1157
acatgcgcacagagcccgggcggctacggaagcggtgagactgtctctcggctgcagccctggtgcgacccggcccgttgccgtagagatgggcagggctggatggagtggggtgcggtgagctgagctgaccctgcttcgccacggggactgcagtgaccccggcttgccggcagggcgggtaacaggttgagccagggtggggctgctcaggggcgtggagccgaggccaggatttctctgaagacccggcacaggctattcctttctgcgacgagcccattgctatggaaaccaaagcgttaggccagcggggattgaggctgcgggatcatgacgggtctctctcccgaagaaccttgcctaaggcttccccaagcggctacttcctgagcgaacccgcccacccgcctgaaggagagagctttgtttaagactgagaaagtgagggtccgagagtctaatgaatgctctgggcacccaggccgcacctgaggagcaccgacgactgcacggtctgcggcgcgggaagcagatctgcggctgaacctctaccccaattacttagcggcgactgagcctatcgagcagttttccatggacacagcctagcagaaagacgcagccttcgtgcttcgctgactgctgaccactgacccaccgccttgatgacagcaccctcgtgtgccttcccagttcagttccggcagccctcagtcagcggcctctcgcagataaccaaaagcctgtatatcagcaatggtgtggccgccaacaacaagctcatgctgtctagcaaccagatcaccatggtcatcaatgtctcagtggaggtagtgaacaccttgtatgaggatatccagtacatgcaggtacctgtggctgactcccctaactcacgtctctgtgacttctttgaccctattgctgaccatatccacagcgtggagatgaagcagggccgtactttgctgcactgtgctgctggtgtgagccgctcagctgccctgtgcctcgcctacctcatgaagtaccacgccatgtccctgctggacgcccacacgtggaccaagtcatgccggcccatcatccgacccaacagcggcttttgggagcagctcatccactatgagttccaattgtttggcaagaacact

SEQ ID NO: 128223 - DNA, 1732 bp, Homo sapiens
  Payload ID: 5105
  Gene Symbol: DUSP18
  Gene Name: dual specificity phosphatase 18
  Uniprot ID: Q8NEJ0
  ENST ID: ENST00000377087
  CDS Start-End: 426-992
gttgccgtagagatgggcagggctggatggagtggggtgcggtgagctgagctgaccctgcttcgccacggggactgcagtgaccccggcttgccggcagggcgggtaacaggttgagccagggtggggctgctcaggggcgtggagccgaggccaggatttctctgaagacccggcacaggctattcctttctgcgacgagcccattgctatggaaaccaaagcgttaggccagcggggattgaggctgcgggatcatgacgggtctctctcccgaagaaccttgcctaaggcttccccaagcggctacttcctgagcgaacccgcccacccgcctgaaggagagagttttccatggacacagcctagcagaaagacgcagccttcgtgcttcgctgactgctgaccactgacccaccgccttgatgacagcaccctcgtgtgccttcccagttcagttccggcagccctcagtcagcggcctctcgcagataaccaaaagcctgtatatcagcaatggtgtggccgccaacaacaagctcatgctgtctagcaaccagatcaccatggtcatcaatgtctcagtggaggtagtgaacaccttgtatgaggatatccagtacatgcaggtacctgtggctgactcccctaactcacgtctctgtgacttctttgaccctattgctgaccatatccacagcgtggagatgaagcagggccgtactttgctgcactgtgctgctggtgtgagccgctcagctgccctgtgcctcgcctacctcatgaagtaccacgccatgtccctgctggacgcccacacgtggaccaagtcatgccggcccatcatccgacccaacagcggcttttgggagcagctcatccactatgagttccaattgtttggcaagaacactgtgcacatggtcagttccccagtgggaatgatccctgacatctatgagaaggaagtccgtttgatgattccactgtgagccatcccacgagcccctgcattggagtcagaggtacagatctattgttgatcttacaccaagatccaaacttgaacattctacttttgttgatacagaaaaaaacagatgatgccttttatgagcacaaaaaagagttgctgtagcttttaactttataatccattttttttaagattaaactaattgtgagatggtgaagataaattttctgccctgtgagtgacactggccaggggataggttgaggcagatggtgcccagaagaaagagggcagcacccattgcacatggcaggcctggaatcctgcagccctccccaaaaacagattgacccaggaatgaatctgctacaattccacctcattctttcacacccagagccagagccttaagcatcatggtacctcttgcgcttcttacagtggtggttcctgctgccctccaggttgtgcatctgaagcctacaagaaagtttgcctacctggggcagctggatcacaaagttggctggaagtaccagacagtgacagccaccctggaggagaagaggaaggagaaggccaagatccactaccagaataagaaacagctcatgggatggccgggcgcggtggctcacgcctgtaatcctagcactttgggaggcggaggcgggcagatcaggaggtcaggagattgagaccatcctggctaacatggtgaaacccagtctctactaaaaaaataaaaaataaaaa

SEQ ID NO: 128224 - DNA, 2920 bp, Homo sapiens
  Payload ID: 5105
  Gene Symbol: DUSP18
  Gene Name: dual specificity phosphatase 18
  ENST ID: ENST00000403268
  CDS Start-End: 472-825
agcggtgagactgtctctcggctgcagccctggtgcgacccggcccgttgccgtagagatgggcagggctggatggagtggggtgcggtgagctgagctgaccctgcttcgccacggggactgcagtgaccccggcttgccggcagggcgggtaacaggttgagccagggtggggctgctcaggggcgtggagccgaggccaggatttctctgaagacccggcacaggctattcctttctgcgacgagcccattgctatggaaaccaaagcgttaggccagcggggattgaggctgcgggatcatgacgggtctctctcccgaagaaccttgcctaaggcttccccaagcggctacttcctgagcgaacccgcccacccgcctgaaggagagagttttccatggacacagcctagcagaaagacgcagccttcgtgcttcgctgactgctgaccactgacccaccgccttgatgacagcaccctcgtgtgccttcccagttcagttccggcagccctcagtcagcggcctctcgcagataaccaaaagcctgtatatcagcaatggtgtggccgccaacaacaagctcatgctgtctagcaaccagatcaccatggtcatcaatgtctcagtggagcgtggagatgaagcagggccgtactttgctgcactgtgctgctggtgtgagccgctcagctgccctgtgcctcgcctacctcatgaagtaccacgccatgtccctgctggacgcccacacgtggaccaagtcatgccggcccatcatccgacccaacagcggcttttgggagcagctcatccactatgagttccaattgtttggcaagaacactgtgcacatggtcagttccccagtgggaatgatccctgacatctatgagaaggaagtccgtttgatgattccactgtgagccatcccacgagcccctgcattggagtcagaggtacagatctattgttgatcttacaccaagatccaaacttgaacattctacttttgttgatacagaaaaaaacagatgatgccttttatgagcacaaaaaagagttgctgtagcttttaactttataatccattttttttaagattaaactaattgtgagatggtgaagataaattttctgccctgtgagtgacactggccaggggataggttgaggcagatggtgcccagaagaaagagggcagcacccattgcacatggcaggcctggaatcctgcagccctccccaaaaacagattgacccaggaatgaatctgctacaattccacctcattctttcacacccagagccagagccttaagcatcatggtacctcttgcgcttcttacagtgagtgccaatctactagataaatggccttcaggcagtgctccaggaatcctggggggtcccaggccacctctgcttccaccttcactataagtggcccagttctggttttctagattgtacttatgcataagatagtttttaaagaaagcattccactgtgtaaatttttttttgtctttttttgaaactgtcctgctctgtcacccatcctagagtgcagtagtgtgatcatggctcactgtagccacaacctctcaggctcaagtgatcctcttaccttagcctcctgcgtggctgggactacagatgtttgccaccatgcccgcctcattttttttctttttttatagagatgagattttactatgtcgcccagactggtctcaaactcctggcctcaagcaatcctcacgcctcagcctcccaaagtgttgatgagccactgtaccccgataccactgtataaaaaatttaaaaaaaattgtgagtgctattgtacatggcaaagtttcaaagagctcttggccatccctcaccaaactttggcaaaagatggtgttagtccccttctccagggcacatgagaaaaacaggcctaacatcaggtctcagcggttcctctcacaggccttggcttggaaggctggagcttcggaccaaggcccagccctgtcacctcctcttcatgtgatgtggacccctgggagcatcagtgtcctcatctgtccaatgacagcccttttctcacagagttattgtgaagattcaacaatttcttggcatagtgcctggcacatggtgtgtgcttagcgcaaatggcagctctcatcatgaatgatagactctttcaccctgctggtcccaggtcggcacacacatccccataatggcatttctcctttctgtgcacagcactttattgttacaaagtactcttccaaaaagttaccctgtgtgtaaaaaaaaaaaaaaaaaaaaatggtttaagtcctttcagaccctacctcacaggaggcctagacttagagccttttgagagcttccgtcttgtttaatctaggtgcaatctagaggtcctgaaacaaggagcacagttccagcttcccccaatcacttctaaacagtgactgcagccttgtttagaatcactatgaaaacctgcaccccggctgactactgggatccataagggggccgtgtcaaagggactaactagtggactccatcagtaggccctggaattcaggattgttcacatcctcttggtgccaaggacctggctgaagaccagctcttctgatccagaggttttcagcaaacagcatttgaaacaaaagcacagctgctctgtttgacaccaaactgtggctccagattccagtagaagccaaatgctttttcttttaacagctgggtgcctgtaatcccagttacttgggaggctgaggcaggagaattgcttgaacccaggaggcggaggttgcagtgagccgagcttgcaccattgcactccagcctgggcaacaagagtgagactccatctcaaaaagaaaaaaaaaaaaaaa

SEQ ID NO: 128225 - DNA, 1306 bp, Homo sapiens
  Payload ID: 5105
  Gene Symbol: DUSP18
  Gene Name: dual specificity phosphatase 18
  Uniprot ID: Q8NEJ0
  ENST ID: ENST00000404885
  CDS Start-End: 460-1026
gtctctcggctgcagccctggtgcgacccggcccgttgccgtagagatgggcagggctggatggagtggggtgcggtgagctgagctgaccctgcttcgccacggggactgcagtgaccccggcttgccggcagggcgggtaacaggttgagccagggtggggctgctcaggggcgtggagccgaggccaggatttctctgaagacccggcacaggctattcctttctgcgacgagcccattgctatggaaaccaaagcgttaggccagcggggattgaggctgcgggatcatgacgggtctctctcccgaagaaccttgcctaaggcttccccaagcggctacttcctgagcgaacccgcccacccgcctgaaggagagagttttccatggacacagcctagcagaaagacgcagccttcgtgcttcgctgactgctgaccactgacccaccgccttgatgacagcaccctcgtgtgccttcccagttcagttccggcagccctcagtcagcggcctctcgcagataaccaaaagcctgtatatcagcaatggtgtggccgccaacaacaagctcatgctgtctagcaaccagatcaccatggtcatcaatgtctcagtggaggtagtgaacaccttgtatgaggatatccagtacatgcaggtacctgtggctgactcccctaactcacgtctctgtgacttctttgaccctattgctgaccatatccacagcgtggagatgaagcagggccgtactttgctgcactgtgctgctggtgtgagccgctcagctgccctgtgcctcgcctacctcatgaagtaccacgccatgtccctgctggacgcccacacgtggaccaagtcatgccggcccatcatccgacccaacagcggcttttgggagcagctcatccactatgagttccaattgtttggcaagaacactgtgcacatggtcagttccccagtgggaatgatccctgacatctatgagaaggaagtccgtttgatgattccactgtgagccatcccacgagcccctgcattggagtcagagcccctgcccttgatggatcagctggcaccacccagattgataaactggctcgtctgatcttgtggcccccacccaggaactgactgggcactagaaaacagcttcaacatcctgtgatttcatccctgaccaatcagcactcctgtctcactggcttcccccaacccaccaagttgtccttaaaactctgctccctgaatggtcggggagactgatttcagtaatagtaaaactctggtctcctgca

SEQ ID NO: 128226 - DNA, 1978 bp, Homo sapiens
  Payload ID: 5105
  Gene Symbol: DUSP18
  Gene Name: dual specificity phosphatase 18
  Uniprot ID: Q8NEJ0
  ENST ID: ENST00000407308
  CDS Start-End: 1132-1698
acggaagcggtgagactgtctctcggctgcagccctggtgcgacccggcccgttgccgtagagatgggcagggctggatggagtggggtgcggtgagctgagctgaccctgcttcgccacggggactgcagtgaccccggcttgccggcagggcgggtaacaggttgagccagggtggggctgctcaggggcgtggagccgaggccaggatttctctgaagacccggcacaggctattcctttctgcgacgagcccattgctatggaaaccaaagcgttaggccagcggggattgaggctgcgggatcatgacgggtctctctcccgaagaaccttgcctaaggcttccccaagcggctacttcctgagcgaacccgcccacccgcctgaaggagagaggtaaaaccctgggggtcctgacactaagcaggcgaagaagcctattccaatgccagctcccctaggaaacctacccggcccacccctagaagtgatgcttcgctctcgttaactcttggactttgttccatgtttataacttagtatttcacgaacgccccgcggtgtttgttcatttttcccacacataatggaccataaaggtcggcttctttgctttatgactcgttctgaacaagtccttttccgcgctgtgtctcactttcctcttttgtaaaatggaaatattaactctagacgccggtctgattaggttgctttgaagatcgaaccagatgagggaagccaaatacttcataggctgtaaagtggtgaagctgaactgctaccgagttgctatttttttctcctcctccctctcaagctaaacgttctttagatcttttgtgatttcttcaggtggtctttgcgactccctaggctccgacctggaagaaatcttttttacacttccctttcacagagccctgcattttaacttccctatcagaagcgagaaaaatagttatcattttgagagggcttactctatgccaagccctgagaaaactctttacgtggattatctcgtttaatttcacaacatccttttaagttttccatggacacagcctagcagaaagacgcagccttcgtgcttcgctgactgctgaccactgacccaccgccttgatgacagcaccctcgtgtgccttcccagttcagttccggcagccctcagtcagcggcctctcgcagataaccaaaagcctgtatatcagcaatggtgtggccgccaacaacaagctcatgctgtctagcaaccagatcaccatggtcatcaatgtctcagtggaggtagtgaacaccttgtatgaggatatccagtacatgcaggtacctgtggctgactcccctaactcacgtctctgtgacttctttgaccctattgctgaccatatccacagcgtggagatgaagcagggccgtactttgctgcactgtgctgctggtgtgagccgctcagctgccctgtgcctcgcctacctcatgaagtaccacgccatgtccctgctggacgcccacacgtggaccaagtcatgccggcccatcatccgacccaacagcggcttttgggagcagctcatccactatgagttccaattgtttggcaagaacactgtgcacatggtcagttccccagtgggaatgatccctgacatctatgagaaggaagtccgtttgatgattccactgtgagccatcccacgagcccctgcattggagtcagagcccctgcccttgatggatcagctggcaccacccagattgataaactggctcgtctgatcttgtggcccccacccaggaactgactgggcactagaaaacagcttcaacatcctgtgatttcatccctgaccaatcagcactcctgtctcactggcttcccccaacccaccaagttgtccttaaaactctgctccctgaatggtcggggagactgatttcagtaatagtaaaactctggtctcctgca

SEQ ID NO: 128227 - DNA, 699 bp, Homo sapiens
  Payload ID: 5105
  Gene Symbol: DUSP18
  Gene Name: dual specificity phosphatase 18
  ENST ID: ENST00000412865
  CDS Start-End: 1-21
cgtttgatgattccactgtgagccatcccacgagcccctgcattggagtcagaggtacagatctattgttgatcttacaccaagatccaaacttgaacattctacttttgttgatacagaaaaaaacagatgatgccttttatgagcacaaaaaagagttgctgtagcttttaactttataatccattttttttaagattaaactaattgtgagatggtgaagataaattttctgccctgtgagtgacactggccaggggataggttgaggcagatggtgcccagaagaaagagggcagcacccattgcacatggcaggcctggaatcctgcagccctccccaaaaacagattgacccaggaatgaatctgctacaattccacctcattctttcacacccagagccagagccttaagcatcatggtacctcttgcgcttcttacagttgtgcatctgaagcctacaagaaagtttgcctacctggggcagctggatcacaaagttggctggaagtaccagacagtgacagccaccctggaggagaagaggaaggagaaggccaagatccactaccagaataagaaacagctcatgggatggccgggcgcggtggctcacgcctgtaatcctagcactttgggaggcggaggcgggcagatcaggaggtcaggagattgagaccatcctggctaacatgg

SEQ ID NO: 128228 - DNA, 657 bp, Homo sapiens
  Payload ID: 5105
  Gene Symbol: DUSP18
  Gene Name: dual specificity phosphatase 18
  ENST ID: ENST00000442752
  CDS Start-End: 625-657
ttaactcttggactttgttccatgtttataacttagtatttcacgaacgccccgcggtgtttgttcatttttcccacacataatggaccataaaggtcggcttctttgctttatgactcgttctgaacaagtccttttccgcgctgtgtctcactttcctcttttgtaaaatggaaatattaactctagacgccggtctgattaggttgctttgaagatcgaaccagatgagggaagccaaatacttcataggctgtaaagtggtgaagctgaactgctaccgagttgctatttttttctcctcctccctctcaagctaaacgttctttagatcttttgtgatttcttcaggtggtctttgcgactccctaggctccgacctggaagaaatcttttttacacttccctttcacagagccctgcattttaacttccctatcagaagcgagaaaaatagttatcattttgagagggcttactctatgccaagccctgagaaaactctttacgtggattatctcgtttaatttcacaacatccttttaagttttccatggacacagcctagcagaaagacgcagccttcgtgcttcgctgactgctgaccactgacccaccgccttgatgacagcaccctcgtgtgccttcccagttcag

SEQ ID NO: 128229 - DNA, 598 bp, Homo sapiens
  Payload ID: 5105
  Gene Symbol: DUSP18
  Gene Name: dual specificity phosphatase 18
  ENST ID: ENST00000430175
  CDS Start-End: 1-70
ggtcagttccccagtgggaatgatccctgacatctatgagaaggaagtccgtttgatgattccactgtgagccatcccacgagcccctgcattggagtcagagattaaactaattgtgagatggtgaagataaattttctgccctgtgagtgacactggccaggggataggttgaggcagatggtgcccagaagaaagagggcagcacccattgcacatggcaggcctggaatcctgcagccctccccaaaaacagattgacccaggaatgaatctgctacaattccacctcattctttcacacccagagccagagccttaagcatcatggtacctcttgcgcttcttacacccctgcccttgatggatcagctggcaccacccagattgataaactggctcgtctgatcttgtggcccccacccaggaactgactgggcactagaaaacagcttcaacatcctgtgatttcatccctgaccaatcagcactcctgtctcactggcttcccccaacccaccaagttgtccttaaaactctgctccctgaatggtcggggagactgatttcagtaatagtaaaactctggtctcctgca

SEQ ID NO: 128230 - DNA, 1117 bp, Homo sapiens
  Payload ID: 5106
  Gene Symbol: DUSP19
  Gene Name: dual specificity phosphatase 19
  Uniprot ID: Q8WTR2
  ENST ID: ENST00000342619
  CDS Start-End: 376-876
tctccaacgaagtcttatattttaccattctgcgtgtattagaaagctaaatttaaacagcaacaataagaaatcttccccagtggatccctcgagcctttcgggaaaatgcaggtttctggctgacaggaagaagaaacagcatccaatcggcacttgtgtctcaatgaccaatcaaatttcgccttacattgcatcgctgggataaacggagctggacgactcagtctcttggtctgtggctgctgcggttacctggatgggcgagcacctctgaggctggctttgttacctgggcaataagggactagcagttcagccgttttctatgcctgctggatttgtttgtatttgttcccagccactgctcatgtaatgtactcccttaaccaggaaattaaagcattctcccggaataatctcaggaagcaatgcaccagggtgacaacgctaactggaaagaaaattatagaaacatggaaagatgccagaattcatgttgtggaagaagtagagccgagcagtgggggtggttgtggttatgtgcaggaccttagctcggacctgcaagttggcgttattaagccatggttgctcctagggtcacaagatgctgctcatgatttggatacactgaaaaagaataaggatggagtggttcttgttcattgtaatgcaggcgtttccagggctgctgcaattgtaataggtttcctgatgaattctgaacaaacctcatttaccagtgctttttctttggtgaaaaatgcaagaccttccatatgtccaaattctggcttcatggagcagcttcgtacatatcaagagggcaaagaaagcaataagtgtgacagaatacaggagaacagttcatgagttgcattgtagcagacaatggacaactgtagtttctgaattgacttctatagccatcttttcccttttttggagagtagactagcaaaactcccttttttctcttgccttttttatgcataaatggaggtcaatttgattgtcctgacctactgtataagtaaatttcaaatgtcattactttctctttgttattataatgtgtgattaaatgcttttttaaattgctaagggaaaataa

SEQ ID NO: 128231 - DNA, 5176 bp, Homo sapiens
  Payload ID: 5106
  Gene Symbol: DUSP19
  Gene Name: dual specificity phosphatase 19
  Uniprot ID: Q8WTR2
  ENST ID: ENST00000354221
  CDS Start-End: 176-829
tgggataaacggagctggacgactcagtctcttggtctgtggctgctgcggttacctggatgggcgagcacctctgaggctggctttgttacctgggcaataagggactagcagttcagccgttttctatgcctgctggatttgtttgtatttgttcccagccactgctcatgtaatgtactcccttaaccaggaaattaaagcattctcccggaataatctcaggaagcaatgcaccagggtgacaacgctaactggaaagaaaattatagaaacatggaaagatgccagaattcatgttgtggaagaagtagagccgagcagtgggggtggttgtggttatgtgcaggaccttagctcggacctgcaagttggcgttattaagccatggttgctcctagggtcacaagatgctgctcatgatttggatacactgaaaaagaataaggtgactcatattcttaatgttgcatatggagttgaaaatgctttcctcagtgactttacatataagagcatttctatattggatctgcctgaaaccaacatcctgtcttattttccagaatgttttgaatttattgaagaagcaaaaagaaaagatggagtggttcttgttcattgtaatgcaggcgtttccagggctgctgcaattgtaataggtttcctgatgaattctgaacaaacctcatttaccagtgctttttctttggtgaaaaatgcaagaccttccatatgtccaaattctggcttcatggagcagcttcgtacatatcaagagggcaaagaaagcaataagtgtgacagaatacaggagaacagttcatgagttgcattgtagcagacaatggacaactgtagtttctgaattgacttctatagccatcttttcccttttttggagagtagactagcaaaactcccttttttctcttgccttttttatgcataaatggaggtcaatttgattgtcctgacctactgtataagtaaatttcaaatgtcattactttctctttgttattataatgtgtgattaaatgcttttttaaattgctaagggaaaataacaaagtgttagtaatcattgctttctgtagaagaaaaaggtttaaatttaaaatgtgtatttagagcatggagagaatcatttaatgaagcctatttttctgttccagcaactgtttttatgaaagaaaaacttgaaatgctacttaacttactatttcaaagggaagtatatttctttttaaagaatctttttaagattaaaaatgaataccttaaatctcccaaaagagataaccagtatctgaaggtttatacaatatttacacagtggctacaatattcacaaaattcttatgttctcttatgaaaaatatacacttttcattttgtcttcttctttttttttctttttttagatggagtttggctcttgtcacccaggctggagtgcaatggcgcaatctcagctcactgcaacctctgcctcccgggttcaagcgattctcctgccccagcctcccatatagctgggattataggtgcctgccaccatgcccagctaatttttgtgtttttagtagagatggagtctcaccacataggccaggcagtctcgaactcctgacctcaggtgatccacccaccttggcctctctaaatactgggattacaggcgtgagccactgcatccgacctcattttgtttttttcaattctgttatcggcatttctttctttttttttttaatgtataggtgttctgtcatacgttattgtgagctttggttctttgaacaggtgatctattctcttacattttgtgctttttatcttgggtgcctagcattctgtttttttgatcctatgtcataattttttgagaaaatgtttgatactgcaagatcattgtttagtggtctgttttctacttcagtattctaccagagaacatattttttaggggagaagggttatggttttgtaagaaactttaaatatacttttaggagacccacaatcatttacagttttatctttggcctttgaataggttcttttttctttaatgtctccgtatttgaagaactgagctctgtacattataaatttgcttaaagattttgattttttcttcagaatatggtatacttaaaattaattaattaagacagtttcttttttcttttcttttttttttttttcgagacagggtcttgctctgtcacctaggctagagtggagtggcatgaacacaacgcactgcagcctctacctcctgggctcaagcagtcctcccacctcagtctcctgagtagctgagactacagctgtgcgccaccacatctggctaattttatttttatttttgtagagacaggagtcttgccatgttgcccaggctgatctcaaactcctaggcttaagtgatcctcccgccttagcctcccaagtgctaggattacaggcatcagccaccacgcctggcctgatagtttccacatagtttttcatgacttagaagatatcattgccatgtaggttttatttttaaaagtcttgagctcttcttaaatatacattataaagagcaagcatagatggaaagtgcatattgaacacatctgtgcatttgagaaggcaggctttcatatgctgtcatgagcaaaaagtagaagtgataaatgcaagttatgttttgagattgcttacaccgtgacaagatgccatcacttgtgatgttatgaactgttataaactctttgcttctgctaagaagcagtctaaatataatcaacgtacagtgagctctttgaagccaaccaaggcaggcagaaccctcttaaatatgagactgatgtataggttctctctatggtcagtatcactggataagccttctcctttcataagaaaggatgtatttaaatacattttattttgctaaatcctgtttagttttcagccattaaatgtcacatgaagccttgatagaatttgttcataatggctcatgtattattattatttttgagatggagttttgctcttaatgatattattattatttgagacagagttttgctcttattgcccaggctggagtgcagtggcgtgatcttggctcactgcaacctctgcctcccagcttcaagcgattctcctgtatcagcctcccaagtagctgggattataggcatgtgccaccatgcccagcaaattttgtatttttttttggtagagacagggttcaaccatgttggtcaggctggtctcgaactcctgaccgcaagtgatccacacgccttggtctcccaaagtgctgggattacggtgttagccactacacctggcctggattgtgtattatttatgtctgtagtttatatgcttagttgttgcctatagtgatctgggtaagattcaaacatttatcttttgtatcttctacagaagtgctttgagcatcaaatttgttttaacgttaaattgtagtttgctgtattaaaatagatcaatgaatataattcagtcttttaggggcaccaagtaaagcataaggtcatatatactatacaatatgtttattgcacttcccatggggataaatcactctgtcattcctagttattttaaaaaaagaactttatgattacggtcctctttctcacatactgcaaacttaaaagatacatacaccaaatataggtctgttttaaaggagaggaaaaatagttcaaggagtttttgcctctttgtttttcaatagattattctgccattttttaaaggaaagggaaaatgaaaacagcatgtctttttaaacattgaaaagaaatatggaggctttaaaccgcaaactgaaaaagctgagtagaacaaaggcagtggagcatacaatacaattctatttatttgaggttaattgaagttaataatttttaaatttttttctaattttatgccttaaaataggtttctgattacataaaatttgaatagaacactcaagaagtatgtagatttttgaaaaacccaaacaatattcttcttagatttttggaggcaaaatttagaccagtatactaattcaaaagacaaatatttcagaggaagtggagtacagtatttaacattttgtttgcaattttactttttcttcccttcttccctattgaaccttgattaaaatgtatgaatacaatacttggatttttttttttcagcttagactctgataatttcagtggtagtggggaaacctgaatttgtcagcatgattatttgtaactcagattgttcaaatgtatatagaaggtccccttcaagtgttgtttctccaagtagtcataaatgtagcaagtataaatcagaatatcatcttataatcttacagagttaacctaatgagtcaatacctttataagcaaaaccatgataaatttaaaaacaacagaaatgtggcatgattacttatttatttgttccaggtgactctaaatagttgatttttctgcctgaaggatcctgaacatatttagttaccctgtagttatttaggaatttaaaccagaagactttgaagttgtatattcttgcaatgcataaaatgacattataatcaacaaacttatggtttgtttcaattgatgcacacaaaaaataacttatagttagacttttctatttcaagtaaagctttgagttacttgtttttatacatattcatcatgtaccctttattgtttctaggtgttgatatactttaataaaaatgatatgtttaatattttcccattaatatatttctttgaagctatttgttttaaaagatgtaacacttatttgctgtcaaattctgaattaaaaaatctgttggtggccaggcgcagtggctcatgcctgtaatcccaacattttgggaggccaaggagatggatcacttgaggccaggagttcaagaccagcctggccaacatggcaaaaccccatcactaaaaatacaaaaattacccgggcatggtggtgggtgcctgtaatcccagcttcttaggaggctgaggtaggagaattgcttgaccctgggaggtggaggtggcagtgagccgagatagcaccactgcacttctagttgacagagtgagactctgactcaaaaaaaaaaaaa

SEQ ID NO: 128232 - DNA, 1688 bp, Homo sapiens
  Payload ID: 5107
  Gene Symbol: DUSP2
  Gene Name: dual specificity phosphatase 2
  Uniprot ID: Q05923
  ENST ID: ENST00000288943
  CDS Start-End: 87-1031
ggagtcgaccgctcgggcagcgccaccgccacgagagcccgggacgcgggaaagaccgaaaggaagaggaagaggcaccggtggccatggggctggaggcggcgcgcgagctggagtgcgcggcgctgggcacgctgctgcgggatccgcgggaggcggaacgcacgctgctgctggactgccgccccttcctggccttctgccggcgccacgtgcgcgccgcgcggccagtgccttggaacgcgctgctgcggcgccgcgcgcgcggccctcctgccgccgttctcgcctgcctgctgcccgaccgcgcgctgcggacgcgcctggtccgcggggagctggcgcgggccgtggtgctggacgagggcagtgcctcggtggcggagctccggcccgacagcccggctcatgtgctgctggccgcgctgctgcacgagacccgcgcggggcccactgccgtgtacttcctgcgaggaggcttcgacggcttccagggctgctgtcccgatctgtgctctgaggcccccgcccctgcgctgccgccaacaggggacaaaaccagccgctccgactccagggctcctgtctacgaccagggtggccctgtggagatcttgccctacctgttcctgggcagctgcagtcactcgtcagacctgcaggggctgcaggcctgtggcatcacagccgtcctcaacgtgtccgccagctgccccaaccactttgagggccttttccgctacaagagtatccctgtggaggacaaccagatggtggagatcagtgcctggttccaggaggccataggcttcattgactgggtgaagaacagcggaggccgggtgctggtgcactgccaggcgggtatctcgcgctctgccaccatctgtctggcatacctcatgcagagtcgccgtgtgcggctggacgaggcctttgacttcgttaagcagcgccggggggtcatctcccccaacttcagtttcatggggcagctgctgcagtttgagacccaggtgctgtgtcactgaggtggtgcccctctgcctgcctgccccactgtgctggcaggagctgactgtggactggtgggctcccctctgggccagcacagtcccctcacctctggcagggctgctacctcctcagagtttcagaagcccccacatgggggctctaggaatgccggcatgctggtctttccgacctggtgctcttctgctgggggactgaggctggccctcattcggggtcgggaaccaagggtgtgtctgctctttccctccccatcctctggcagaaatcagctagacgctataccgtggactctccctggtccaccaccatgttgaagcccttggcagcctgagagctccaaggaacaagctgtgacaaccaggagccctgtctgtgggttcgtctgcccagggcctggagcccaagccctgtgttcctggggaagctggggacttgggaagtgatgggtgtgtcatgttgcgtgtgtctgtctgtgagcctttcacacctgtgctggcgctggaaaattatttgtgctcagctgacatttaacactccctcccccgcttcctcctagccctgtgggcaggggttggaaacttagcactttatatttatacagaacattcaggatatgtcaataaaatattgttatatttaaaaaacaacaa

SEQ ID NO: 128233 - DNA, 885 bp, Homo sapiens
  Payload ID: 5108
  Gene Symbol: DUSP21
  Gene Name: dual specificity phosphatase 21
  Uniprot ID: Q9H596
  ENST ID: ENST00000339042
  CDS Start-End: 130-702
gtggccgatagctggtcctctttctccaacacctagcctgagacttggcggcgcggctgctatcctgaactagcttggtaagtgttgtgtcccgaaccagcgtagagagacctcggaccagccgccttgatgacagcatccgcgtcctccttttcatcatctcagggtgtccagcagccctccatctacagcttctcccaaataaccagaagcttgtttctcagcaatggtgtggccgccaacgacaaactccttctgtccagcaatcgcatcaccgccattgtcaatgcctcggtggaagtggtcaacgtattcttcgagggcattcagtacataaaggtgcctgttaccgatgctcgtgactcgcgtctctacgacttttttgaccccattgctgatcttatccacaccatcgatatgaggcagggccgtacgctgctgcactgcatggctggagtgagccgttccgcctcactgtgccttgcgtacctcatgaaataccactccatgtcgctgctggacgcccatacatggaccaagtcgcgccgccccatcatccggcccaacaacggcttttgggaacagctcatcaattacgaattcaagctgtttaataacaacaccgtgcgcatgatcaactcgccggtaggtaacatccctgacatctatgagaaggacctacgtatgatgatatcaatgtaagccatcccggccagcccctgacatctgccatcgatcttgcaccaagactgaacttgaacactgacattttgttagtaaagaaaaccggatggtgccttgttaaagggcaagaaaaaagggagggggttggagttttgaacgtagtaagccttaccttaatagaattaaattcatgaaacataa

SEQ ID NO: 128234 - DNA, 1485 bp, Homo sapiens
  Payload ID: 5109
  Gene Symbol: DUSP22
  Gene Name: dual specificity phosphatase 22
  Uniprot ID: Q9NRW4
  ENST ID: ENST00000344450
  CDS Start-End: 444-998
gagcccgagcctagtgcctcccacgcccggcggccgcgagccggggtccgcgagggcggagtggggcgcggcagccaggaacccgactacgaatcccagggtgcgggcgggcggagcgaggagggacgctgggcctgcccggtgcgcacgggggcggggaccggcaaggcgggaccatttcccggcataggctccggtgcccctgcccggctcccgccgggaagttctaggccgccgcacagaaagccctgccctccacgccgggtctctggagcgccctgggttgcccggccggtccctgccgctgacttgttgacactgcgagcactcagtccctcccgcgcgcctcctccccgcccgccccgccgctcctcctccctgtaacatgccatagtgcgcctgcgaccacacggccggggcgctagcgttcgccttcagccaccatggggaatgggatgaacaagatcctgcccggcctgtacatcggcaacttcaaagatgccagagacgcggaacaattgagcaagaacaaggtgacacatattctgtctgtccacgatagtgccaggcctatgttggagggagttaaatacctgtgcatcccagcagcggattcaccatctcaaaacctgacaagacatttcaaagaaagtattaaattcattcacgagtgccggctccgcggtgagagctgccttgtacactgcctggccggggtctccaggagcgtgacactggtgatcgcatacatcatgaccgtcactgactttggctgggaggatgccctgcacaccgtgcgtgctgggagatcctgtgccaaccccaacgtgggcttccagagacagctccaggagtttgagaagcatgaggtccatcagtatcggcagtggctgaaggaagaatatggagagagccctttgcaggatgcagaagaagccaaaaacattctggccgctccgggaattctgaagttctgggcctttctcagaagactgtaatgtacctgaagtttctgaaatattgcaaacccacagagtttaggctggtgctgccaaaaagaaaagcaacatagagtttaagtatccagtagtgatttgtaaacttgtttttcatttgaagctgaatatatacgtagtcatgtttatgttgagaactaaggatattctttagcaagagaaaatattttccccttatccccactgctgtggaggtttctgtacctcgcttggatgcctgtaaggatcccgggagccttgccgcactgccttgtgggtggcttggcgctcgtgattgcttcctgtgaacgcctcccaaggacgagcccagtgtagttgtgtggcgtgaactctgcccgtgtgttctcaaattccccagcttgggaaatagcccttggtgtgggttttatctctggtttgtgttctccgtggtggaattgaccgaaagctctatgttttcgttaataaagggcaacttagccaagtttaa

SEQ ID NO: 128235 - DNA, 3098 bp, Homo sapiens
  Payload ID: 5109
  Gene Symbol: DUSP22
  Gene Name: dual specificity phosphatase 22
  Uniprot ID: Q9NRW4
  ENST ID: ENST00000419235
  CDS Start-End: 79-696
ccgctcctcctccctgtaacatgccatagtgcgcctgcgaccacacggccggggcgctagcgttcgccttcagccaccatggggaatgggatgaacaagatcctgcccggcctgtacatcggcaacttcaaagatgccagagacgcggaacaattgagcaagaacaaggtgacacatattctgtctgtccacgatagtgccaggcctatgttggagggagttaaatacctgtgcatcccagcagcggattcaccatctcaaaacctgacaagacatttcaaagaaagtattaaattcattcacgagtgccggctccgcggtgagagctgccttgtacactgcctggccggggtctccaggagcgtgacactggtgatcgcatacatcatgaccgtcactgactttggctgggaggatgccctgcacaccgtgcgtgctgggagatcctgtgccaaccccaacgtgggcttccagagacagctccaggagtttgagaagcatgaggtccatcagtatcggcagtggctgaaggaagaatatggagagagccctttgcaggatgcagaagaagccaaaaacattctgggtaaatataaggagcaagggcgcacagagccccagcccggcgccaggcggtggagcagttttccggcactggctccgctgacctacgataattatacgacggagacctaacgcaagcgacctgctgccttccttcccactgcttgtcttcagtgtgcccggctgggcaggggtgcggtggtggtggccgatgaggacaggaaagggagatagccagggcgaggtggggcgagggctccttcccccaagcaacaccgcccagccctgctccaggcccctgcactccgcccacccctaccctggctgcacctgagcttgctgcccctggggatgttgcccagtggctgtgcactgctctgtgcacgtgcgtgtgtgtgagtgcacttgtgtgtgggtgactaagtggatgcatgtgtgtgcctgtgtgagtgagggtatgtgcacctaagtgtgtacatgtgtgtatgttgtgaaagtgtctgtgcacatgaatgtttgtgtgtgtgtgaactctttcttactgctggaagtcacagaattcatattgctgcccgggttggtgtggccacctttccctttgtccaagactccacatggaaggcatttgagctcgacctccgaaaagctacccagcaaagagcagtctgtgcctctgagcagaccgtgagaactcaggggacgagtggctaagagcatggcctctcccagaacccacccagggtggtgtggtgggggcaacaggggccagactcctctagagggagggtggctctggggccctggaaaacgtgagagactgccctgagctggtccagtgggccagcactttataccaactcagcatttaagggaagtatcttagattgcctccatctcaatgtgaatgcaccaggctgagggttccctagcgccttgagtcaaggccacttttcagcccatcgagccctgagttctacttggtgtttgttctctggagctgattgcacttgagctctgtggtgggcaggcgcactttagcctaagttgggtgccccagggcaccccctcctctctgctccttgccagcttcattcactcccagcctctcgctgtcctcactttgcaggggctcctcctcaacatttgcatgcacctgcaagaattgggaagaaagagcatttattaggcactgtagcaatttgcattttaaaatgcctgagcatttattaagcttcttggtattcacttgggtttgataattgatctgagctacctcattgaatgtttttggaaaggtgttttttggtatgcaagtcagctttgcctcacagttgaaaatgttcggtcatgattgcttttgaaaccaaaggggaaggtaccgatatcattgagctatttaaagttgccagtttgggctccagtaatgctttctggtgggtaaaattccacattcaggccacgagagcatctacagtttgtactctggggctgcaggcatcctgggacgctgtacgcaattcagtggtctagtcctttataccgactcagattccttaagcatgcagagtcactcgaatgaaaaaacatactcgacctctccctaaaaagatgttgcaacccagtttctctgaattccaccacaaaaagagaccctgaataagaagagcagttttcctgtgcatatagagggtgtgtcaaaggtgagctttttggggaccgggaaaaacaaagttgcctgattccgcgcaggtgcacaggccccggatgtacacccggaaaggggagtgtggctgtagaatcatccatccgtctacagctaaaacaatttgccaataaagtacatgtttttcctaagccaaaaataaatacgttaacagaaaaatgatttaggatatagcttgaatgcttaaatatgtgcacctttacaaacctctcagtgtattcttggagttcttgaaatgttgttttaatatttgttgccagtaatgttctttcttcacagccgctccgggaattctgaagttctgggcctttctcagaagactgtaatgtacctgaagtttctgaaatattgcaaacccacagagtttaggctggtgctgccaaaaagaaaagcaacatagagtttaagtatccagtagtgatttgtaaacttgtttttcatttgaagctgaatatatacgtagtcatgtttatgttgagaactaaggatattctttagcaagagaaaatattttccccttatccccactgctgtggaggtttctgtacctcgcttggatgcctgtaaggatcccgggagccttgccgcactgccttgtgggtggcttggcgctcgtgattgcttcctgtgaacgcctcccaaggacgagcccagtgtagttgtgtggcgtgaactctgcccgtgtgttctcaaattccccagcttgggaaatagcccttggtgtgggttttatctctggtttgtgttctccgtggtggaattgaccgaaagctctatgttttcgttaataaagggcaacttagccaagttt

SEQ ID NO: 128236 - DNA, 551 bp, Homo sapiens
  Payload ID: 5109
  Gene Symbol: DUSP22
  Gene Name: dual specificity phosphatase 22
  ENST ID: ENST00000605863
  CDS Start-End: 204-344
aacatgccatagtgcgcctgcgaccacacggccggggcgctagcgttcgccttcagccaccatggggaatgggatgaacaaggacaagacatttcaaagaaagtattaaattcattcacgagtgccggctccgcggtgagagctgccttgtacactgcctggccggggtctccaggagcgtgacactggtgatcgcatacatcatgaccgtcactgactttggctgggaggatgccctgcacaccgtgcgtgctgggagatcctgtgccaaccccaacgtgggcttccagagacagctccaggagtttgagaagcatgaggtccatcaggtaagcagttcttaggggacatcagagatgcaggcaggtgcccctgaacggtgcccacagtctttccgtacacagccagcatcatggcgtttggagttgaaaggcccacagaggacatcggctcccagggcgcccagctgcaccccttcagaagtcgtcacgatccctcgtgcacctgttgaagccacaggcgcctaccctttgtcattctccttgtgcctg

SEQ ID NO: 128237 - DNA, 405 bp, Homo sapiens
  Payload ID: 5109
  Gene Symbol: DUSP22
  Gene Name: dual specificity phosphatase 22
  ENST ID: ENST00000603296
  CDS Start-End: 180-405
aggccgtgaggtctgaggtcagagatccagccatctgctcccccagggtagggaggtcgggcctccccgggatcctgcccggcctgtacatcggcaacttcaaagatgccagagacgcggaacaattgagcaagaacaaggtgacacatattctgtctgtccacgatagtgccaggcctatgttggagggagttaaatacctgtgcatcccagcagcggattcaccatctcaaaacctgacaagacatttcaaagaaagtattaaattcattcacgagtgccggctccgcggtgagagctgccttgtacactgcctggccggggtctccaggagcgtgacactggtgatcgcatacatcatgaccgtcactgactttggctgggaggatgccctgcacaccgtgc

SEQ ID NO: 128238 - DNA, 587 bp, Homo sapiens
  Payload ID: 5109
  Gene Symbol: DUSP22
  Gene Name: dual specificity phosphatase 22
  ENST ID: ENST00000603726
  CDS Start-End: 1-165
atggggaatgggatgaacaagatcctgcccggcctgtacatcggcaacttcaaagatgccagagacgcggaacaattgagcaagaacaaggtgacacatattctgtctgtccacgatagtgccaggcctatgttggaggacaagacatttcaaagaaagtattaaattcattcacgagtgccggctccgcggtgagagctgccttgtacactgcctggccggggtctccaggagcgtgacactggtgatcgcatacatcatgaccgtcactgactttggctgggaggatgccctgcacaccgtgcgtgctgggagatcctgtgccaaccccaacgtgggcttccagagacagctccaggagtttgagaagcatgaggtccatcagtatcggcagtggctgaaggaagaatatggagagagccctttgcaggatgcagaagaagccaaaaacattctggccgctccgggaattctgaagttctgggcctttctcagaagactgtaatgtacctgaagtttctgaaatattgcaaacccacagagtttaggctggtgctgccaaaaagaaaagcaacatagagtttaag

SEQ ID NO: 128239 - DNA, 465 bp, Homo sapiens
  Payload ID: 5109
  Gene Symbol: DUSP22
  Gene Name: dual specificity phosphatase 22
  ENST ID: ENST00000603881
  CDS Start-End: 410-465
ccggccggtccctgccgctgacttgttgacactgcgagcactcagtccctcccgcgcgcctcctccccgcccgccccgccgctcctcctccctgtaacatgccatagtgcgcctgcgaccacacggccggggcgctagcgttcgccttcagccaccatggggaatgggatgaacaagatgccagagacgcggaacaattgagcaagaacaaggtgacacatattctgtctgtccacgatagtgccaggcctatgttggaggacaagacatttcaaagaaagtattaaattcattcacgagtgccggctccgcggtgagagctgccttgtacactgcctggccggggtctccaggagcgtgacactggtgatcgcatacatcatgaccgtcactgactttggctgggaggatgccctgcacaccgtgcgtgctgggagatcctgtgccaaccccaacgtgggcttc

SEQ ID NO: 128240 - DNA, 3824 bp, Homo sapiens
  Payload ID: 5109
  Gene Symbol: DUSP22
  Gene Name: dual specificity phosphatase 22
  ENST ID: ENST00000604971
  CDS Start-End: 1114-1422
agtgctgtatctgctggtgcctggagagtcatctgccctgggcttccgcgtcctggtgtgtgcagtgctatatctgctggtgcctggagagtcatctgccctgggcttccgcgtcctggtgtgtgcaatgctgtatctgcgggtgcctggagagtcatctgccctgggcttctgcatcctggtgtgtgcagtgctgtatctgctggtgcctggagtcatctgccctgggcttctgcgtcctggtgtgtgcagtgctgtacctgctggtgcctggagagtcatctgccctgggcttccgtatcctggtgtgtgcagtgctgtatctgctggtgcctggagagtcatctgccctgggcttccgcgtcctggtgtgtgcaatgctgtatctgcgggtgcctggagagtcatctgccctgggcttctgcatcctggtgtgtgcaatgctgtatctgctggtgcctggagtcatctgccctgggcttctgcatcctcgtgtgtgcagtgctgtacctgctggtgcctggagtcatctgccctgggcttccgcatcctcgtgtgtgcagtgctgtacctgctggtgcctggagagtcatctgccctgggcttctgcgttctggtgtgtgcagtgctgtatctgctggtgcctggagagtcatctgccctgggcttccgcgtcctggtgtgtgcaatgctgtatctgctggtgtctggagtcatcttccctgggcttctgcgtcctggtgtgtgcagtgctgtatctgctggtgcctggagagtcatctgcgctgggcttctgcgtcctggtgtgtgcaatgctgtatctgctggtgcctggagagtcatctgccctgggcttctgcgttctggtgtgtgcagtgctgtatctgctggtgcctggagagtcatctgccctgggcttccccgtcctggtgtgtgcaatgctgtatctgctggtgcctggagagtcgtcttccctcggcttctgtgtcctggacaagacatttcaaagaaagtattaaattcattcacgagtgccggctccgcggtgagagctgccttgtacactgcctggccggggtctccaggagcgtgacactggtgatcgcatacatcatgaccgtcactgactttggctgggaggatgccctgcacaccgtgcgtgctgggagatcctgtgccaaccccaacgtgggcttccagagacagctccaggagtttgagaagcatgaggtccatcagtatcggcagtggctgaaggaagaatatggagagagccctttgcaggatgcagaagaagccaaaaacattctgggtaaatataaggagcaagggcgcacagagccccagcccggcgccaggcggtggagcagttttccggcactggctccgctgacctacgataattatacgacggagacctaacgcaagcgacctgctgccttccttcccactgcttgtcttcagtgtgcccggctgggcaggggtgcggtggtggtggccgatgaggacaggaaagggagatagccagggcgaggtggggcgagggctccttcccccaagcaacaccgcccagccctgctccaggcccctgcactccgcccacccctaccctggctgcacctgagcttgctgcccctggggatgttgcccagtggctgtgcactgctctgtgcacgtgcgtgtgtgtgagtgcacttgtgtgtgggtgactaagtggatgcatgtgtgtgcctgtgtgagtgagggtatgtgcacctaagtgtgtacatgtgtgtatgttgtgaaagtgtctgtgcacatgaatgtttgtgtgtgtgtgaactctttcttactgctggaagtcacagaattcatattgctgcccgggttggtgtggccacctttccctttgtccaagactccacatggaaggcatttgagctcgacctccgaaaagctacccagcaaagagcagtctgtgcctctgagcagaccgtgagaactcaggggacgagtggctaagagcatggcctctcccagaacccacccagggtggtgtggtgggggcaacaggggccagactcctctagagggagggtggctctggggccctggaaaacgtgagagactgccctgagctggtccagtgggccagcactttataccaactcagcatttaagggaagtatcttagattgcctccatctcaatgtgaatgcaccaggctgagggttccctagcgccttgagtcaaggccacttttcagcccatcgagccctgagttctacttggtgtttgttctctggagctgattgcacttgagctctgtggtgggcaggcgcactttagcctaagttgggtgccccagggcaccccctcctctctgctccttgccagcttcattcactcccagcctctcgctgtcctcactttgcaggggctcctcctcaacatttgcatgcacctgcaagaattgggaagaaagagcatttattaggcactgtagcaatttgcattttaaaatgcctgagcatttattaagcttcttggtattcacttgggtttgataattgatctgagctacctcattgaatgtttttggaaaggtgttttttggtatgcaagtcagctttgcctcacagttgaaaatgttcggtcatgattgcttttgaaaccaaaggggaaggtaccgatatcattgagctatttaaagttgccagtttgggctccagtaatgctttctggtgggtaaaattccacattcaggccacgagagcatctacagtttgtactctggggctgcaggcatcctgggacgctgtacgcaattcagtggtctagtcctttataccgactcagattccttaagcatgcagagtcactcgaatgaaaaaacatactcgacctctccctaaaaagatgttgcaacccagtttctctgaattccaccacaaaaagagaccctgaataagaagagcagttttcctgtgcatatagagggtgtgtcaaaggtgagctttttggggaccgggaaaaacaaagttgcctgattccgcgcaggtgcacaggccccggatgtacacccggaaaggggagtgtggctgtagaatcatccatccgtctacagctaaaacaatttgccaataaagtacatgtttttcctaagccaaaaataaatacgttaacagaaaaatgatttaggatatagcttgaatgcttaaatatgtgcacctttacaaacctctcagtgtattcttggagttcttgaaatgttgttttaatatttgttgccagtaatgttctttcttcacagccgctccgggaattctgaagttctgggcctttctcagaagactgtaatgtacctgaagtttctgaaatattgcaaacccacagagtttaggctggtgctgccaaaaagaaaagcaacatagagtttaagtatccagtagtgatttgtaaacttgtttttcatttgaagctgaatatatacgtagtcatgtttatgttgagaactaaggatattctttagcaagagaaaatattttccccttatccccactgctgtggaggtttctgtacctcgcttggatgcctgtaaggatcccgggagccttgccgcactgccttgtgggtggcttggcgctcgtgattgcttcctgtgaacgcctcccaaggacgagcccagtgtagttgtgtggcgtgaactctgcccgtgtgttctcaaattccccagcttgggaaatagcccttggtgtgggttttatctctggtttgtgttctccgtggtggaattgaccgaaagctctatgttttcgttaataaagggcaacttagccaagttt

SEQ ID NO: 128241 - DNA, 804 bp, Homo sapiens
  Payload ID: 5109
  Gene Symbol: DUSP22
  Gene Name: dual specificity phosphatase 22
  ENST ID: ENST00000603453
  CDS Start-End: 493-801
tttcccggcataggctccggtgcccctgcccggctcccgccgggaagttctaggccgccgcacagaaagccctgccctccacgccgggtctctggagcgccctgggttgcccggccggtccctgccgctgacttgttgacactgcgagcactcagtccctcccgcgcgcctcctccccgcccgccccgccgctcctcctccctgtaacatgccatagtgcgcctgcgaccacacggccggggcgctagcgttcgccttcagccaccatggggaatgggatgaacaagatcctgcccggcctgtacatcggcaacttcaaagggagttaaatacctgtgcatcccagcagcggattcaccatctcaaaacctgacaagacatttcaaagaaagtattaaattcattcacgagtgccggctccgcggtgagagctgccttgtacactgcctggccggggtctccaggagcgtgacactggtgatcgcatacatcatgaccgtcactgactttggctgggaggatgccctgcacaccgtgcgtgctgggagatcctgtgccaaccccaacgtgggcttccagagacagctccaggagtttgagaagcatgaggtccatcagtatcggcagtggctgaaggaagaatatggagagagccctttgcaggatgcagaagaagccaaaaacattctgggtaaatataaggagcaagggcgcacagagccccagcccggcgccaggcggtggagcagttttccggcactggctccgctgacctacgataattatacgacggagacctaacgc

SEQ ID NO: 128242 - DNA, 867 bp, Homo sapiens
  Payload ID: 5109
  Gene Symbol: DUSP22
  Gene Name: dual specificity phosphatase 22
  ENST ID: ENST00000605315
  CDS Start-End: 408-716
ttcccggcataggctccggtgcccctgcccggctcccgccgggaagttctaggccgccgcacagaaagccctgccctccacgccgggtctctggagcgccctgggttgcccggccggtccctgccgctgacttgttgacactgcgagcactcagtccctcccgcgcgcctcctccccgcccgccccgccgctcctcctccctgtaacatgccatagtgcgcctgcgaccacacggccggggcgctagcgttcgccttcagccaccatggggaatgggatgaacaaggacaagacatttcaaagaaagtattaaattcattcacgagtgccggctccgcggtgagagctgccttgtacactgcctggccggggtctccaggagcgtgacactggtgatcgcatacatcatgaccgtcactgactttggctgggaggatgccctgcacaccgtgcgtgctgggagatcctgtgccaaccccaacgtgggcttccagagacagctccaggagtttgagaagcatgaggtccatcagtatcggcagtggctgaaggaagaatatggagagagccctttgcaggatgcagaagaagccaaaaacattctgggtaaatataaggagcaagggcgcacagagccccagcccggcgccaggcggtggagcagttttccggcactggctccgctgacctacgataattatacgacggagacctaacgcaagcgacctgctgccttccttcccactgcttgtcttcagtgtgcccggctgggcaggggtgcggtggtggtggccgatgaggacaggaaagggagatagccagggcgaggtggggcgagggctccttcccccaagcaacaccgcccag

SEQ ID NO: 128243 - DNA, 1231 bp, Homo sapiens
  Payload ID: 5109
  Gene Symbol: DUSP22
  Gene Name: dual specificity phosphatase 22
  ENST ID: ENST00000605035
  CDS Start-End: 323-463
gtaacatgccatagtgcgcctgcgaccacacggccggggcgctagcgttcgccttcagccaccatggggaatgggatgaacaagatcctgcccggcctgtacatcggcaacttcaaagatgccagagacgcggaacaattgagcaagaacaaggtgacacatattctgtctgtccacgatagtgccaggcctatgttggaggacaagacatttcaaagaaagtattaaattcattcacgagtgccggctccgcggtgagagctgccttgtacactgcctggccggggtctccaggagcgtgacactggtgatcgcatacatcatgaccgtcactgactttggctgggaggatgccctgcacaccgtgcgtgctgggagatcctgtgccaaccccaacgtgggcttccagagacagctccaggagtttgagaagcatgaggtccatcaggtaagcagttcttaggggacatcagagatgcaggcaggtgcccctgaacggtgcccacagtctttccgtacacagccagcatcatggcgtttggagttgaaaggcccacagaggacatcggctcccagggcgcccagctgcaccccttcagaagtcgtcacgatccctcgtgcacctgttgaagccacaggcgcctaccctttgtcattctccttgtgcctggtactccctactagtttgtttctctccctttgggtgacgtaccatttccttggtctggcctattttcatgtcctaggccagcaccttgaaggagcagttccttctcttgcttgaccctggctggccaaccacagagctctgatttcccactgctgtttgtttccctggttatgtgtggcaccatctctgtggtgaagtcacaggtgcaagcccacgtggatgcagacgtgcacatgtgtgtgacgtttcgggtttgtttccatcctctccagtatcggcagtggctgaaggaagaatatggagagagccctttgcaggatgcagaagaagccaaaaacattctgggtaaatataaggagcaagggcgcacagagccccagcccggcgccaggcggtggagcagttttccggcactggctccgctgacctacgataattatacgacggagacctaacgcaagcgacctgctgccttccttcccactgcttgtcttcagtgtgcccggctgggcaggggtgcggtggtggtggccgatgaggacaggaaagggagatagccag

SEQ ID NO: 128244 - DNA, 1166 bp, Homo sapiens
  Payload ID: 5109
  Gene Symbol: DUSP22
  Gene Name: dual specificity phosphatase 22
  ENST ID: ENST00000603795
  CDS Start-End: 79-243
ccgctcctcctccctgtaacatgccatagtgcgcctgcgaccacacggccggggcgctagcgttcgccttcagccaccatggggaatgggatgaacaagatcctgcccggcctgtacatcggcaacttcaaagatgccagagacgcggaacaattgagcaagaacaaggtgacacatattctgtctgtccacgatagtgccaggcctatgttggaggacaagacatttcaaagaaagtattaaattcattcacgagtgccggctccgcggtgagagctgccttgtacactgcctggccggggtctccaggagcgtgacactggtgatcgcatacatcatgaccgtcactgactttggctgggaggatgccctgcacaccgtgcgtgctgggagatcctgtgccaaccccaacgtgggcttccagagacagctccaggagtttgagaagcatgaggtccatcagtatcggcagtggctgaaggaagaatatggagagagccctttgcaggatgcagaagaagccaaaaacattctgggtaaatataaggagcaagggcgcacagagccccagcccggcgccaggcggtggagcagttttccggcactggctccgctgacctacgataattatacgacggagacctaacgcaagcgacctgctgccttccttcccactgcttgtcttcagtgtgcccggctgggcaggggtgcggtggtggtggccgatgaggacaggaaagggagatagccagggcgaggtggggcgagggctccttcccccaagcaacaccgcccagccctgctccaggcccctgcactccgcccacccctaccctggctgcacctgagcttgctgcccctggggatgttgcccagtggctgtgcactgctctgtgcacgtgcgtgtgtgtgagtgcacttgtgtgtgggtgactaagtggatgcatgtgtgtgcctgtgtgagtgagggtatgtgcacctaagtgtgtacatgtgtgtatgttgtgaaagtgtctgtgcacatgaatgtttgtgtgtgtgtgaactctttcttactgctggaagtcacagaattcatattgctgcccgggttggtgtggccacctttccctttgtccaagactccacatggaaggcatttgagctcgacctccgaaaagctaccc

SEQ ID NO: 128245 - DNA, 756 bp, Homo sapiens
  Payload ID: 5110
  Gene Symbol: DUSP23
  Gene Name: dual specificity phosphatase 23
  Uniprot ID: Q9BVJ7
  ENST ID: ENST00000368107
  CDS Start-End: 99-551
gagttacttggctcggagcgggcgaggggacgcgtgggcggagcggggctggccagcctcggcccccatgacccgctgtcctgtgccctttcccagcgatgggcgtgcagccccccaacttctcctgggtgcttccgggccggctggcgggactggcgctgccgcggctccccgcccactaccagttcctgttggacctgggcgtgcggcacctggtgtccctgacggagcgcgggccccctcacagcgacagctgccccggcctcaccctgcaccgcctgcgcatccccgacttctgcccgccggcccccgaccagatcgaccgcttcgtgcagatcgtggacgaggccaacgcacggggagaggctgtgggagtgcactgtgctctgggctttggccgcactggcaccatgctggcctgttacctggtgaaggagcggggcttggctgcaggagatgccattgctgaaatccgacgactacgacccggctccatcgagacctatgagcaggagaaagcagtcttccagttctaccagcgaacgaaataaggggccttagtacccttctaccaggccctcactccccttccccatgttgtcgatggggccagagatgaagggaagtggactaaagtattaaaccctctagctcccattggctgaagacactgaagtagcccacccctgcaggcaggtcctgattgaaggggaggcttgtactgctttgttgaataaatgagttttacgaaccagg

SEQ ID NO: 128246 - DNA, 694 bp, Homo sapiens
  Payload ID: 5110
  Gene Symbol: DUSP23
  Gene Name: dual specificity phosphatase 23
  Uniprot ID: Q9BVJ7
  ENST ID: ENST00000368108
  CDS Start-End: 37-489
gcagaccacgtggcccgggaggcgccgaggccagcgatgggcgtgcagccccccaacttctcctgggtgcttccgggccggctggcgggactggcgctgccgcggctccccgcccactaccagttcctgttggacctgggcgtgcggcacctggtgtccctgacggagcgcgggccccctcacagcgacagctgccccggcctcaccctgcaccgcctgcgcatccccgacttctgcccgccggcccccgaccagatcgaccgcttcgtgcagatcgtggacgaggccaacgcacggggagaggctgtgggagtgcactgtgctctgggctttggccgcactggcaccatgctggcctgttacctggtgaaggagcggggcttggctgcaggagatgccattgctgaaatccgacgactacgacccggctccatcgagacctatgagcaggagaaagcagtcttccagttctaccagcgaacgaaataaggggccttagtacccttctaccaggccctcactccccttccccatgttgtcgatggggccagagatgaagggaagtggactaaagtattaaaccctctagctcccattggctgaagacactgaagtagcccacccctgcaggcaggtcctgattgaaggggaggcttgtactgctttgttgaataaatgagttttacgaaccagg

SEQ ID NO: 128247 - DNA, 729 bp, Homo sapiens
  Payload ID: 5110
  Gene Symbol: DUSP23
  Gene Name: dual specificity phosphatase 23
  Uniprot ID: Q9BVJ7
  ENST ID: ENST00000368109
  CDS Start-End: 72-524
gggcagagcgacccgagggcggcgccctgcagaccacgtggcccgggaggcgccgaggccaggtaggtgcgatgggcgtgcagccccccaacttctcctgggtgcttccgggccggctggcgggactggcgctgccgcggctccccgcccactaccagttcctgttggacctgggcgtgcggcacctggtgtccctgacggagcgcgggccccctcacagcgacagctgccccggcctcaccctgcaccgcctgcgcatccccgacttctgcccgccggcccccgaccagatcgaccgcttcgtgcagatcgtggacgaggccaacgcacggggagaggctgtgggagtgcactgtgctctgggctttggccgcactggcaccatgctggcctgttacctggtgaaggagcggggcttggctgcaggagatgccattgctgaaatccgacgactacgacccggctccatcgagacctatgagcaggagaaagcagtcttccagttctaccagcgaacgaaataaggggccttagtacccttctaccaggccctcactccccttccccatgttgtcgatggggccagagatgaagggaagtggactaaagtattaaaccctctagctcccattggctgaagacactgaagtagcccacccctgcaggcaggtcctgattgaaggggaggcttgtactgctttgttgaataaatgagttttacgaaccagg

SEQ ID NO: 128248 - DNA, 1835 bp, Homo sapiens
  Payload ID: 5111
  Gene Symbol: DUSP26
  Gene Name: dual specificity phosphatase 26 (putative)
  Uniprot ID: Q9BV47
  ENST ID: ENST00000256261
  CDS Start-End: 519-1154
agttaattctgtctgggaggagtgtgtgtgtttaagacagtgcctgggatgacttataatgtaatctttaggcaaaacgctttgtaattggtgcagctctgagaacacacgcatgcattccaggcggtgctgctggggctcggcggggccgtgtctggtctgcaaggcgcgcgggctcgtggggggttggctggggagcccacgctgcctggcgactcgggccaccgaatgtgagaccgagtccctttatgtcaccagcgcacacgctgatttgaaccctgcttcgacgtgtgtgtcatggcttaaaaatagctgctaatctgtcaacctgtcttgggcagaaacagcggcggcgacagcagcaggagcgtcatggccgtggcgctgtctgcgccggcgatccgcctttcggactgaggcccagcgcagcgcttgcaaagagcagcagctacctggcaactgaacccatcatcaccacagccactcctgcagctgccacggtttctgccacctctaagatgtgccctggtaactggctttgggcttctatgacttttatggcccgcttctcccggagtagctcaaggtctcctgttcgaactcgagggaccctggaggagatgccaaccgttcaacatcctttcctcaatgtcttcgagttggagcggctcctctacacaggcaagacagcctgtaaccatgccgacgaggtctggccaggcctctatctcggagaccaggacatggctaacaaccgccgggagcttcgccgcctgggcatcacgcacgtcctcaatgcctcacacagccggtggcgaggcacgcccgaggcctatgaggggctgggcatccgctacctgggtgttgaggcccacgactcgccagcctttgacatgagcatccacttccagacggctgccgacttcatccaccgggcgctgagccagccaggagggaagatcctggtgcattgtgctgtgggcgtgagccgatccgccaccctggtactggcctacctcatgctgtaccaccaccttaccctcgtggaggccatcaagaaagtcaaagaccaccgaggcatcatccccaaccggggcttcctgaggcagctcctggccctggaccgcaggctgcggcagggtctggaagcatgaggggagggggagagaggtcaggccaggcccgtgggtaggtccctggctcccagctggagataggaggcccaggtggcaggtagcaggaggcccagatcacccatcctcccctggggtcaggagaggccgagccccaggccactgtcactctttgtgggaggggacggggagtgaggttgggcagtgtggtggatgggcacccaggaagggttgaccagggaaggaggcagctaggctgtagatggaagatggtcctgggattcgaacaccgctgggatctggccagggtgctccctgggattcacagtcccttcccctctttgtgcccaagtgtttccctctctccctcaccaaaacaaaagggccatctctgccctgcacttgtgcagaaagtcagggatacggcaagcatgaatgcaatggtgtagagttgtgtgaaacccctagcatagagacagacagcgaagagatggtgtgaaaagcttgcagaaccagacagagaaccccacagactttccactccaagcacaggaggaggtagctagcgtgtgagggttggcactaggcccacggctgctgcttgggccaaaaacatacagaggtgcatggctggcagtcttgaaattgtcactcgcttactggatccaagcgtctcgaggataaataaagatcatgaaaaag

SEQ ID NO: 128249 - DNA, 1373 bp, Homo sapiens
  Payload ID: 5111
  Gene Symbol: DUSP26
  Gene Name: dual specificity phosphatase 26 (putative)
  Uniprot ID: Q9BV47
  ENST ID: ENST00000523956
  CDS Start-End: 573-1208
gctgctggggctcggcggggccgtgtctggtctgcaaggcgcgcgggctcgtggggggttggctggggagcccacgctgcctggcgactcgggccaccgaatgtgagaccgagtccctttatgtcaccagcgcacacgctgatttgaaccctgcttcgacgtgtgtgtcatggcttaaaaatagctgctaatctgtcaacctgtcttgggcagaaacagcggcggcgacagcagcaggagcgtcatggccgtggcgctgtctgcgccggcgatccgcctttcggactgaggcccagcgcagcgcttgcaaagagagccaaagagctgagcaaaaggagctgctgcagcttgaagaaaaagccacccctgaaggctcctgccagagccaggcttaccttctctccctcgagaatcttctcccgaaggaccagcccagggaagggaagcagctgctctggactcactcaagtgtgtctcacaccccttcctcttccagcagcagctacctggcaactgaacccatcatcaccacagccactcctgcagctgccacggtttctgccacctctaagatgtgccctggtaactggctttgggcttctatgacttttatggcccgcttctcccggagtagctcaaggtctcctgttcgaactcgagggaccctggaggagatgccaaccgttcaacatcctttcctcaatgtcttcgagttggagcggctcctctacacaggcaagacagcctgtaaccatgccgacgaggtctggccaggcctctatctcggagaccaggacatggctaacaaccgccgggagcttcgccgcctgggcatcacgcacgtcctcaatgcctcacacagccggtggcgaggcacgcccgaggcctatgaggggctgggcatccgctacctgggtgttgaggcccacgactcgccagcctttgacatgagcatccacttccagacggctgccgacttcatccaccgggcgctgagccagccaggagggaagatcctggtgcattgtgctgtgggcgtgagccgatccgccaccctggtactggcctacctcatgctgtaccaccaccttaccctcgtggaggccatcaagaaagtcaaagaccaccgaggcatcatccccaaccggggcttcctgaggcagctcctggccctggaccgcaggctgcggcagggtctggaagcatgaggggagggggagagaggtcaggccaggcccgtgggtaggtccctggctcccagctggagataggaggcccaggtggcaggtagcaggaggcccagatcacccatcctcccctggggtcaggagaggccgagccccaggccactgtcactctttgtgggaggggac

SEQ ID NO: 128250 - DNA, 729 bp, Homo sapiens
  Payload ID: 5111
  Gene Symbol: DUSP26
  Gene Name: dual specificity phosphatase 26 (putative)
  ENST ID: ENST00000522982
  CDS Start-End: 293-729
ggacatgtgactctcccacctcgtttcgtggcagagccaaagagctgagcaaaaggagctgctgcagcttgaagaaaaagccacccctgaaggctcctgccagagccaggcttaccttctctccctcgagaatcttctcccgaaggaccagcccagggaagggaagcagctgctctggactcactcaagtgtgtctcacaccccttcctcttccagcagcagctacctggcaactgaacccatcatcaccacagccactcctgcagctgccacggtttctgccacctctaagatgtgccctggtaactggctttgggcttctatgacttttatggcccgcttctcccggagtagctcaaggtctcctgttcgaactcgagggaccctggaggagatgccaaccgttcaacatcctttcctcaatgtcttcgagttggagcggctcctctacacaggcaagacagcctgtaaccatgccgacgaggtctggccaggcctctatctcggagaccaggacatggctaacaaccgccgggagcttcgccgcctgggcatcacgcacgtcctcaatgcctcacacagccggtggcgaggcacgcccgaggcctatgaggggctgggcatccgctacctgggtgttgaggcccacgactcgccagcctttgacatgagcatccacttccagacggctgccgacttcatccaccgggcgctgagccagccaggagg

SEQ ID NO: 128251 - DNA, 3597 bp, Homo sapiens
  Payload ID: 5112
  Gene Symbol: DUSP27
  Gene Name: dual specificity phosphatase 27 (putative)
  Uniprot ID: Q5VZP5
  ENST ID: ENST00000271385
  CDS Start-End: 121-3597
atgacgcctgagccaaaggccctacctcctgtggccttggttagagacaccgaaggccagctgtgtcttccccagcagagacaaaggtgtgcgcatgggcatagaggttggcaggttgtcatggcgaccagaaaggacacagaggaggagcaggtagtcccaagcgaggaggacgaagccaacgtgagggcggtgcaggcccactacctccgaagcccctcccctagccagtattcgatggtctcagatgcagaaacagaaagcattttcatggaacccattcacctctcctcagccattgcagccaaacagatcatcaatgaagaactcaagccaccgggggtcagagcagacgcagagtgtccaggcatgctggagtctgctgaacagctgctggtggaggacctgtacaaccgcgtcagggagaagatggatgacaccagcctctataatacgccctgtgtcctggacctacagcgggccctggttcaggatcgccaagaggcgccctggaatgaggtggatgaggtctggcccaatgtcttcatagctgagaagagtgtggctgtgaacaaggggaggctgaagaggctgggaatcacccacattctgaatgctgcgcatggcaccggcgtttacactggccccgaattctacactggcctggagatccagtacctgggtgtagaggtggatgactttcctgaggtggacatttcccagcatttccggaaggcgtctgagttcctggatgaggcgctgctgacttacagagggaaagtcctggtcagcagcgaaatgggcatcagccggtcagcagtgctggtggtcgcctacctgatgatcttccacaacatggccatcctggaggctttgatgaccgtgcgtaagaagcgggccatctaccccaatgagggcttcctgaagcagctgcgggagctcaatgagaagttgatggaggagagagaagaggactatggccgggaggggggatcagctgaggctgaggagggcgagggcactgggagcatgctcggggccagagtgcacgccctgacggtggaagaggaggacgacagcgccagccacctgagtggctcctccctggggaaggccacccaggcctccaagcccctcaccctcatagacgaggaggaggaggagaaactgtacgagcagtggaagaaggggcagggcctcctctcagacaaggtcccccaggatggaggtggctggcgctcagcctcctctggccagggtggggaggagctcgaggacgaggacgtggagaggatcatccaggagtggcagagccgaaacgagaggtaccaagcagaagggtaccggaggtggggaagggaggaggagaaggaggaggagagcgacgctggctcctcggtggggaggcggcggcgcaccctgagcgagagcagcgcctgggagagcgtgagcagccacgacatctgggtcctgaagcagcagctggagctgaaccgcccggaccacggcaggaggcgccgcgcagactcgatgtcctcggagagcacctgggacgcatggaacgagaggctgctggagattgagaaggaggcttcccggaggtaccacgccaagagcaagagagaggaggcggcagacaggagctcagaagcagggagcagggtgcgggaggatgatgaggacagcgtgggctctgaggccagttccttctacaacttctgcagcaggaacaaggacaagctcactgccctggaaagatggaagatcaagagaatccaatttggatttcacaagaaagacttgggagcgggagacagcagcggtgagcccggtgcagaggaggcagtaggggagaagaacccctccgacgtcagcctgacagcctaccaggcctggaagctgaaacaccagaagaaggtgggcagtgagaacaaggaggaggtggtggagctcagcaagggggaggactcggccttggctaagaagagacaacggaggctggagctgctggagagaagccggcagacgctggaggagagccagtctatggcaagctgggaggcggacagctccacggccagcgggagcattcccctgtctgcgttctggtctgcagacccctcagtcagcgctgatggggacacgacgtcagtactgagcacccagagccaccgctcccacctgtctcaggctgcaagcaacatagcggggtgttcaacctccaaccccaccacacccctgcctaacctgccagtggggcctggagacaccatttccattgccagtatccagaactggattgccaatgtagtcagtgagacccttgctcagaagcaaaatgaaatgctgctgttgtcccgctcaccgtctgttgcaagcatgaaggcagtaccagcggctagctgcctgggggatgaccaagtctccatgcttagtggacacagcagctcctccttgggtggctgcctgttgcctcagagccaggcaagacccagctctgacatgcagtctgtgctgtcctgcaacaccacactgagctcacccgcggaaagttgcagaagcaaagtgagggggaccagcaagcccatcttcagcctctttgctgacaatgtggacctaaaggaacttggccggaaggagaaggagatgcagatggagcttagggagaagatgtctgagtacaaaatggaaaagctggcctcagacaacaaacgcagctccctcttcaagaagaagaaggtcaaggaagatgaggatgatggtgtgggtgatggggatgaggacactgacagtgccatagggagcttccgatattcttcccgcagtaattcccagaaacctgaaacagacacatgctcctccctggctgtctgtgatcactatgcaagtggcagcagagttggcaaagagatggatagcagtattaataagtggctcagtggcctcaggacggaggaaaaacctcctttccaaagtgactggtctggaagttccagagggaagtacaccagatcgtccctgctcagggagacagagtctaaatcctccagttacaagttttccaaatcccagtcagaggaacaggacacctcctcctaccacgaggcaaatggcaactctgtaagaagcacttcacggttctcatcttcctccaccagggagggcagagagatgcacaagttctccaggtccacgtacaacgagacctcaagttcccgagaggagagcccagagccctacttcttccgccggaccccagagtcctcagaaagggaagagtccccagaaccacagcgcccaaattgggccaggtccagggactgggaagatgtggaagagtcatccaagtcagacttctctgaatttggagccaagaggaagttcacccagagctttatgaggtctgaagaagagggagagaaagagaggacagaaaacagagaagaagggaggtttgcatctggacggcggtcccagtatcggagaagcactgacagggaggaagaggaagaaatggacgatgaagccatcattgctgcttggagacgccggcaagaagaaaccaggaccaagctgcagaaaaggagggaggactga

SEQ ID NO: 128252 - DNA, 4164 bp, Homo sapiens
  Payload ID: 5112
  Gene Symbol: DUSP27
  Gene Name: dual specificity phosphatase 27 (putative)
  Uniprot ID: Q5VZP5
  ENST ID: ENST00000361200
  CDS Start-End: 167-3643
aggtttcctgttaacagctgtcctgcccctaggagaagaagccctgaggaaggaggtggctggttcctgtctcactggccggagcttcagcttcagtcatttcatctgggtccctcagcccttggtggggaacatccaggcaggttagagaggttggcaggttgtcatggcgaccagaaaggacacagaggaggagcaggtagtcccaagcgaggaggacgaagccaacgtgagggcggtgcaggcccactacctccgaagcccctcccctagccagtattcgatggtctcagatgcagaaacagaaagcattttcatggaacccattcacctctcctcagccattgcagccaaacagatcatcaatgaagaactcaagccaccgggggtcagagcagacgcagagtgtccaggcatgctggagtctgctgaacagctgctggtggaggacctgtacaaccgcgtcagggagaagatggatgacaccagcctctataatacgccctgtgtcctggacctacagcgggccctggttcaggatcgccaagaggcgccctggaatgaggtggatgaggtctggcccaatgtcttcatagctgagaagagtgtggctgtgaacaaggggaggctgaagaggctgggaatcacccacattctgaatgctgcgcatggcaccggcgtttacactggccccgaattctacactggcctggagatccagtacctgggtgtagaggtggatgactttcctgaggtggacatttcccagcatttccggaaggcgtctgagttcctggatgaggcgctgctgacttacagagggaaagtcctggtcagcagcgaaatgggcatcagccggtcagcagtgctggtggtcgcctacctgatgatcttccacaacatggccatcctggaggctttgatgaccgtgcgtaagaagcgggccatctaccccaatgagggcttcctgaagcagctgcgggagctcaatgagaagttgatggaggagagagaagaggactatggccgggaggggggatcagctgaggctgaggagggcgagggcactgggagcatgctcggggccagagtgcacgccctgacggtggaagaggaggacgacagcgccagccacctgagtggctcctccctggggaaggccacccaggcctccaagcccctcaccctcatagacgaggaggaggaggagaaactgtacgagcagtggaagaaggggcagggcctcctctcagacaaggtcccccaggatggaggtggctggcgctcagcctcctctggccagggtggggaggagctcgaggacgaggacgtggagaggatcatccaggagtggcagagccgaaacgagaggtaccaagcagaagggtaccggaggtggggaagggaggaggagaaggaggaggagagcgacgctggctcctcggtggggaggcggcggcgcaccctgagcgagagcagcgcctgggagagcgtgagcagccacgacatctgggtcctgaagcagcagctggagctgaaccgcccggaccacggcaggaggcgccgcgcagactcgatgtcctcggagagcacctgggacgcatggaacgagaggctgctggagattgagaaggaggcttcccggaggtaccacgccaagagcaagagagaggaggcggcagacaggagctcagaagcagggagcagggtgcgggaggatgatgaggacagcgtgggctctgaggccagttccttctacaacttctgcagcaggaacaaggacaagctcactgccctggaaagatggaagatcaagagaatccaatttggatttcacaagaaagacttgggagcgggagacagcagcggtgagcccggtgcagaggaggcagtaggggagaagaacccctccgacgtcagcctgacagcctaccaggcctggaagctgaaacaccagaagaaggtgggcagtgagaacaaggaggaggtggtggagctcagcaagggggaggactcggccttggctaagaagagacaacggaggctggagctgctggagagaagccggcagacgctggaggagagccagtctatggcaagctgggaggcggacagctccacggccagcgggagcattcccctgtctgcgttctggtctgcagacccctcagtcagcgctgatggggacacgacgtcagtactgagcacccagagccaccgctcccacctgtctcaggctgcaagcaacatagcggggtgttcaacctccaaccccaccacacccctgcctaacctgccagtggggcctggagacaccatttccattgccagtatccagaactggattgccaatgtagtcagtgagacccttgctcagaagcaaaatgaaatgctgctgttgtcccgctcaccgtctgttgcaagcatgaaggcagtaccagcggctagctgcctgggggatgaccaagtctccatgcttagtggacacagcagctcctccttgggtggctgcctgttgcctcagagccaggcaagacccagctctgacatgcagtctgtgctgtcctgcaacaccacactgagctcacccgcggaaagttgcagaagcaaagtgagggggaccagcaagcccatcttcagcctctttgctgacaatgtggacctaaaggaacttggccggaaggagaaggagatgcagatggagcttagggagaagatgtctgagtacaaaatggaaaagctggcctcagacaacaaacgcagctccctcttcaagaagaagaaggtcaaggaagatgaggatgatggtgtgggtgatggggatgaggacactgacagtgccatagggagcttccgatattcttcccgcagtaattcccagaaacctgaaacagacacatgctcctccctggctgtctgtgatcactatgcaagtggcagcagagttggcaaagagatggatagcagtattaataagtggctcagtggcctcaggacggaggaaaaacctcctttccaaagtgactggtctggaagttccagagggaagtacaccagatcgtccctgctcagggagacagagtctaaatcctccagttacaagttttccaaatcccagtcagaggaacaggacacctcctcctaccacgaggcaaatggcaactctgtaagaagcacttcacggttctcatcttcctccaccagggagggcagagagatgcacaagttctccaggtccacgtacaacgagacctcaagttcccgagaggagagcccagagccctacttcttccgccggaccccagagtcctcagaaagggaagagtccccagaaccacagcgcccaaattgggccaggtccagggactgggaagatgtggaagagtcatccaagtcagacttctctgaatttggagccaagaggaagttcacccagagctttatgaggtctgaagaagagggagagaaagagaggacagaaaacagagaagaagggaggtttgcatctggacggcggtcccagtatcggagaagcactgacagggaggaagaggaagaaatggacgatgaagccatcattgctgcttggagacgccggcaagaagaaaccaggaccaagctgcagaaaaggagggaggactgagctggggaaaatctgagaacactgaaagaaaccactcacgttagcatagggctcagggcacacgttgccaccactcatcgcaggatgaggatacagagaggatcttccagaggggcagagccaaaatgagaggtaccaagcataagggcagcagaggtggagtagggaggaggcaaggagggggagaaccatcaatacgaatacgaggtccgaatgcggaccaactgataccattttctgttgctcagcgccctctaagctttggtgtttcacttaatgtatttggcagtgttcatcacaggctagagaggtgagcttggaaaagcactgtagtttgtcagagactccagtttacatccagaaaggccatgaacataggacacgcttctgtctgtagaggcttcatatgagacccagaaagtctatcctatggcaagtctgacctctcctggcaatgctcagttctgatttttttttttttaatgttttgagtctccattaaaaatggtatgttggcaaat

SEQ ID NO: 128253 - DNA, 4034 bp, Homo sapiens
  Payload ID: 5112
  Gene Symbol: DUSP27
  Gene Name: dual specificity phosphatase 27 (putative)
  Uniprot ID: Q5VZP5
  ENST ID: ENST00000443333
  CDS Start-End: 1-3477
atggcgaccagaaaggacacagaggaggagcaggtagtcccaagcgaggaggacgaagccaacgtgagggcggtgcaggcccactacctccgaagcccctcccctagccagtattcgatggtctcagatgcagaaacagaaagcattttcatggaacccattcacctctcctcagccattgcagccaaacagatcatcaatgaagaactcaagccaccgggggtcagagcagacgcagagtgtccaggcatgctggagtctgctgaacagctgctggtggaggacctgtacaaccgcgtcagggagaagatggatgacaccagcctctataatacgccctgtgtcctggacctacagcgggccctggttcaggatcgccaagaggcgccctggaatgaggtggatgaggtctggcccaatgtcttcatagctgagaagagtgtggctgtgaacaaggggaggctgaagaggctgggaatcacccacattctgaatgctgcgcatggcaccggcgtttacactggccccgaattctacactggcctggagatccagtacctgggtgtagaggtggatgactttcctgaggtggacatttcccagcatttccggaaggcgtctgagttcctggatgaggcgctgctgacttacagagggaaagtcctggtcagcagcgaaatgggcatcagccggtcagcagtgctggtggtcgcctacctgatgatcttccacaacatggccatcctggaggctttgatgaccgtgcgtaagaagcgggccatctaccccaatgagggcttcctgaagcagctgcgggagctcaatgagaagttgatggaggagagagaagaggactatggccgggaggggggatcagctgaggctgaggagggcgagggcactgggagcatgctcggggccagagtgcacgccctgacggtggaagaggaggacgacagcgccagccacctgagtggctcctccctggggaaggccacccaggcctccaagcccctcaccctcatagacgaggaggaggaggagaaactgtacgagcagtggaagaaggggcagggcctcctctcagacaaggtcccccaggatggaggtggctggcgctcagcctcctctggccagggtggggaggagctcgaggacgaggacgtggagaggatcatccaggagtggcagagccgaaacgagaggtaccaagcagaagggtaccggaggtggggaagggaggaggagaaggaggaggagagcgacgctggctcctcggtggggaggcggcggcgcaccctgagcgagagcagcgcctgggagagcgtgagcagccacgacatctgggtcctgaagcagcagctggagctgaaccgcccggaccacggcaggaggcgccgcgcagactcgatgtcctcggagagcacctgggacgcatggaacgagaggctgctggagattgagaaggaggcttcccggaggtaccacgccaagagcaagagagaggaggcggcagacaggagctcagaagcagggagcagggtgcgggaggatgatgaggacagcgtgggctctgaggccagttccttctacaacttctgcagcaggaacaaggacaagctcactgccctggaaagatggaagatcaagagaatccaatttggatttcacaagaaagacttgggagcgggagacagcagcggtgagcccggtgcagaggaggcagtaggggagaagaacccctccgacgtcagcctgacagcctaccaggcctggaagctgaaacaccagaagaaggtgggcagtgagaacaaggaggaggtggtggagctcagcaagggggaggactcggccttggctaagaagagacaacggaggctggagctgctggagagaagccggcagacgctggaggagagccagtctatggcaagctgggaggcggacagctccacggccagcgggagcattcccctgtctgcgttctggtctgcagacccctcagtcagcgctgatggggacacgacgtcagtactgagcacccagagccaccgctcccacctgtctcaggctgcaagcaacatagcggggtgttcaacctccaaccccaccacacccctgcctaacctgccagtggggcctggagacaccatttccattgccagtatccagaactggattgccaatgtagtcagtgagacccttgctcagaagcaaaatgaaatgctgctgttgtcccgctcaccgtctgttgcaagcatgaaggcagtaccagcggctagctgcctgggggatgaccaagtctccatgcttagtggacacagcagctcctccttgggtggctgcctgttgcctcagagccaggcaagacccagctctgacatgcagtctgtgctgtcctgcaacaccacactgagctcacccgcggaaagttgcagaagcaaagtgagggggaccagcaagcccatcttcagcctctttgctgacaatgtggacctaaaggaacttggccggaaggagaaggagatgcagatggagcttagggagaagatgtctgagtacaaaatggaaaagctggcctcagacaacaaacgcagctccctcttcaagaagaagaaggtcaaggaagatgaggatgatggtgtgggtgatggggatgaggacactgacagtgccatagggagcttccgatattcttcccgcagtaattcccagaaacctgaaacagacacatgctcctccctggctgtctgtgatcactatgcaagtggcagcagagttggcaaagagatggatagcagtattaataagtggctcagtggcctcaggacggaggaaaaacctcctttccaaagtgactggtctggaagttccagagggaagtacaccagatcgtccctgctcagggagacagagtctaaatcctccagttacaagttttccaaatcccagtcagaggaacaggacacctcctcctaccacgaggcaaatggcaactctgtaagaagcacttcacggttctcatcttcctccaccagggagggcagagagatgcacaagttctccaggtccacgtacaacgagacctcaagttcccgagaggagagcccagagccctacttcttccgccggaccccagagtcctcagaaagggaagagtccccagaaccacagcgcccaaattgggccaggtccagggactgggaagatgtggaagagtcatccaagtcagacttctctgaatttggagccaagaggaagttcacccagagctttatgaggtctgaagaagagggagagaaagagaggacagaaaacagagaagaagggaggtttgcatctggacggcggtcccagtatcggagaagcactgacagggaggaagaggaagaaatggacgatgaagccatcattgctgcttggagacgccggcaagaagaaaccaggaccaagctgcagaaaaggagggaggactgagctggggaaaatctgagaacactgaaagaaaccactcacgttagcatagggctcagggcacacgttgccaccactcatcgcaggatgaggatacagagaggatcttccagaggggcagagccaaaatgagaggtaccaagcataagggcagcagaggtggagtagggaggaggcaaggagggggagaaccatcaatacgaatacgaggtccgaatgcggaccaactgataccattttctgttgctcagcgccctctaagctttggtgtttcacttaatgtatttggcagtgttcatcacaggctagagaggtgagcttggaaaagcactgtagtttgtcagagactccagtttacatccagaaaggccatgaacataggacacgcttctgtctgtagaggcttcatatgagacccagaaagtctatcctatggcaagtctgacctctcctggcaatgctcagttctgatttttttttttttaatgttttgagtctccattaaaaatggtatgttggcaaatagttcttctttattctggtcatgtttaactttttgg

SEQ ID NO: 128254 - DNA, 1555 bp, Homo sapiens
  Payload ID: 5113
  Gene Symbol: DUSP28
  Gene Name: dual specificity phosphatase 28
  Uniprot ID: Q4G0W2
  ENST ID: ENST00000343217
  CDS Start-End: 632-1162
tggtctatgaagaagtgatgaaaatagaaattagttttattttatgagccatgtgttataatacatagaaaaaaatgcaccaattacaaagcgggccacaaaaaggaataaacgtaaagccgacaacgcagtcactagggaaagggtgaagacacgggaaccacgcagcccgccgtccacgtgcaccgggtagccacggggccctagccgaacgacgcggacgcgaagtgggcgggcccggccaagccacgcctccgcgccagacgccgcagtagagcgggcagggcgctgcgcccaagagccacagacgcaagcccagtgccacaggccgcgggggcggggaggacggcgcccggggacagagaacatgggacgcagagcggtccaaggccccggcgccctggtgaggcccaaacctcccgccatgccccggccccaacgagacccaagccccctgtcccggcccagcgcccgcgggggacccaagccccagcctggtccacctcggaggcctctaggacccgggggcgcccggcggcccgcccggctcccacaaatagactcctgggcgggcgcctgagcccccaaaatagatcctcagggcccaaaagcagactcttcggcgggcgccatgggaccggcagaagctgggcgccgcggggccgcctcgcccgtacctccaccgttggtgcgcgtcgcgccctcactcttcctcgggagcgcgcgagccgcgggcgcggaggagcagctggcgcgcgcgggagtcacgctgtgcgtcaacgtctcccgccagcagcccggcccgcgcgcgcccggcgtggcagagctgcgcgtgcccgtgttcgacgacccggctgaggacctgctggcgcacctggagcccacgtgcgccgccatggaggccgcggtgcgcgccggcggcgcctgcctagtctactgcaagaacggccgcagccgctcggccgccgtctgcaccgcgtacctcatgcggcaccgcggcctcagcctggcgaaggccttccagatggtgaagagcgctcgcccggtagcagaaccgaacccgggcttctggtctcagctccagaagtatgaggaggccctccaggcccagtcctgcctgcagggagagcccccagccttagggttgggccctgaggcttgaagcttgaaggcctgctgcctggaggaaggatgtccctgcactgatacagaagctgtttctggcaaagcctgccgtgtcttacatttgtctctctatccggattagatgttgctatatgaacacatcgggactgtgtctgcaggaaggagctccccattcgaggccttcacagtgtcacccacattcacctctttccacttaaacgtgtcccatgaatcttgtcataacagttttgtgttccttaactattttgtctgccatgtcatttatgatgtatataacctctttaatgcctgaaatcataagaataatcatcaaaggcaagagggttgtatattttcccgttggagacacatctggaatttgctgcaataaaataataataagaaagca

SEQ ID NO: 128255 - DNA, 3461 bp, Homo sapiens
  Payload ID: 5113
  Gene Symbol: DUSP28
  Gene Name: dual specificity phosphatase 28
  Uniprot ID: Q4G0W2
  ENST ID: ENST00000405954
  CDS Start-End: 384-914
acgcctccgcgccagacgccgcagtagagcgggcagggcgctgcgcccaagagccacagacgcaagcccagtgccacaggccgcgggggcggggaggacggcgcccggggacagagaacatgggacgcagagcggtccaaggccccggcgccctggtgaggcccaaacctcccgccatgccccggccccaacgagacccaagccccctgtcccggcccagcgcccgcgggggacccaagccccagcctggtccacctcggaggcctctaggacccgggggcgcccggcggcccgcccggctcccacaaatagactcctgggcgggcgcctgagcccccaaaatagatcctcagggcccaaaagcagactcttcggcgggcgccatgggaccggcagaagctgggcgccgcggggccgcctcgcccgtacctccaccgttggtgcgcgtcgcgccctcactcttcctcgggagcgcgcgagccgcgggcgcggaggagcagctggcgcgcgcgggagtcacgctgtgcgtcaacgtctcccgccagcagcccggcccgcgcgcgcccggcgtggcagagctgcgcgtgcccgtgttcgacgacccggctgaggacctgctggcgcacctggagcccacgtgcgccgccatggaggccgcggtgcgcgccggcggcgcctgcctagtctactgcaagaacggccgcagccgctcggccgccgtctgcaccgcgtacctcatgcggcaccgcggcctcagcctggcgaaggccttccagatggtgaagagcgctcgcccggtagcagaaccgaacccgggcttctggtctcagctccagaagtatgaggaggccctccaggcccagtcctgcctgcagggagagcccccagccttagggttgggccctgaggcttgaagcttgaaggcctgctgcctggaggaaggatgtccctgcactgatacagaaggctggtctttacccttcttcctcactgtcatatcgagttttcctttgtgtgtgtgtgtgtgaaacatagtgcttttaattttatatttccggctgaggtgatgcacaaattatcttacagacacaaaaagaaatacatttggtaaaacatcgaagacaaattaagaaaaagcaaatagggatcctccattatttacactccagaatcttgagtgtttgggggtgccggcgcattctaccagtctcagggaaggacatgagtacagactacagtaatcagaatctgagtcataggtgaaatcaggaaaagcaactcttcttgtgtttatttttagtagtgtcataagaacggactagttcttcctgcgtgaccacggatgcttctgtttgagaaaatgcatacccacgtgggacatttagatcaagaaagctgttgatgaagacattgttgaagggcaacttgggtgattggggaattattctcttcatcagcccctctgcaatacagctggagctgtcccataggagttcggacaattacggacatcctttttctttctctctttctttttttttgtttgtttgtttgagacagagtctctgttgcccaggctggagtgcagtggcgcaatcccggctcactgcaacctccgcctccctggttcaagtgattctcctgcctcagcctcctgagtagctgggactacaggtgtgtgacaccagacccggctaattttttgtatttttagtagagatggggggtttcaccatgttagccaggatggtctcaaactcctgacctcgtgatccacccacctcagcctcccaaagtgctgggattacaggcgtgagccaccgtgcccagcctcctttttctattactagagaactccaggacattaagaatttcaaaagtgattttttcacccatggcttctacggtgacagagtatggtgttcctgtagggaaacaaagccaagtttttttgctcctttcactaaagctgcttcatccggggaggaagcctggtagattataatatttccagggataacagtgtggcacacagataacagggtaagaaattggtctatatagttttctgtgggatggccattctcaatgttctccaataaactggggtaattaaaatatcagggctcggatggaaggtgttgcaccataaatgacacctgcagtggtacttgttaaatgtcttaacattgcaagtgagggttcccattttatcagaaaatagaaattttacctgcccaagttcttcactgagattgaatgtgctggccatggtgtggacactatttactttataatgcacatcttgatcccagtttataaactgggcctgaatatatttcacaatttccatagtgaccagcagactaatggggatgaggtactgttataagatgatgaacaccagtatgtcaaacacaatgctgtgagctggaatcctctttcaggtaccaaatgtcaccatactttttattccatagcacggctcccacgcagctcactacagacatgaccagagcagcaggaaccaaagggagacccgcccattgtcactttcttaatctctgatctcttgaggtgatttgacagaattctgcaggaatttggtttcaaagccagtgtaaacaactatgccagtgatccactgagcatttcttttttttttttcttgagacggagtctcactctggtgcccaggctggagtgggcgccatcttggctcactgcaagctccgcctcccggcttcatgccattctcgtccttcagcctcctgagtggctgggattacaggcgcccgccaccacgcctagctaatttctttgtatttttggtagagacggggtttcactgtgttagccaggatggtctcaatctcctgacctcatgatcctcccgcctcggcctcccaaagcgctgggattacaggcgtgagccacctcgcccggccaatccactgagcatttctaagctgtgtatctcttaacaagacccagtcaggccctattggaacagggcttttaccacctaggcggaagctcagccattgaaatgacgatcaggtgcttcacggtctatttttccagataggcctaacagctggttttctgtttgcatttcagctgtttctggcaaagcctgccgtgtcttacatttgtctctctatccggattagatgttgctatatgaacacatcgggactgtgtctgcaggaaggagctccccattcgaggccttcacagtgtcacccacattcacctctttccacttaaacgtgtcccatgaatcttgtcataacagttttgtgttccttaactattttgtctgccatgtcatttatgatgtatataacctctttaatgcctgaaatcataagaataatcatcaaaggcaagagggttgtatattttcccgttggagacacatctggaatttgctgcaataaaataataataagaaagca

SEQ ID NO: 128256 - DNA, 817 bp, Homo sapiens
  Payload ID: 5113
  Gene Symbol: DUSP28
  Gene Name: dual specificity phosphatase 28
  ENST ID: ENST00000438823
  CDS Start-End: 1-424
ggaggagcagctggcgcgcgcgggagtcacgctgtgcgtcaacgtctcccgccagcagcccggcccgcgcgcgcccggcgtggcagagctgcgcgtgcccgtgttcgacgacccggctgaggacctgctggcgcacctggagcccacgtgcgccgccatggaggccgcggtgcgcgccggcggcgcctgcctagtctactgcaagaacggccgcagccgctcggccgccgtctgcaccgcgtacctcatgcggcaccgcggcctcagcctggcgaaggccttccagatggtgaagagcgctcgcccggtagcagaaccgaacccgggcttctggtctcagctccagaagtatgaggaggccctccaggcccagtcctgcctgcagggagagcccccagccttagggttgggccctgaggcttgaagcttgaaggcctgctgcctggaggaaggatgtccctgcactgatacagaagctgtttctggcaaagcctgccgtgtcttacatttgtctctctatccggattagatgttgctatatgaacacatcgggactgtgtctgcaggaaggagctccccattcgaggccttcacagtgtcacccacattcacctctttccacttaaacgtgtcccatgaatcttgtcataacagttttgtgttccttaactattttgtctgccatgtcatttatgatgtatataacctctttaatgcctgaaatcataagaataatcatcaaaggcaagagggttgtatattttcccgttggagacacatctggaatttgctgcaataaaataataataagaaagca

SEQ ID NO: 128257 - DNA, 4110 bp, Homo sapiens
  Payload ID: 5114
  Gene Symbol: DUSP3
  Gene Name: dual specificity phosphatase 3
  Uniprot ID: P51452
  ENST ID: ENST00000226004
  CDS Start-End: 65-622
ccagctgatccgccgctctccgcctcgcttgctcctgccgggcgtgcagggccccgccgccgccatgtcgggctcgttcgagctctcggtgcaggatctcaacgacctgctctcggacggcagcggctgctacagcctcccgagccagccctgcaacgaggtcaccccgcggatctacgtgggcaacgcgtctgtggctcaggacatccccaagctgcagaaactaggcatcacccatgtgctgaacgcggctgagggcaggtccttcatgcacgtcaacaccaatgccaacttctacaaggactccggcatcacatacctgggcatcaaggccaacgacacacaggagttcaacctcagcgcttactttgaaagggctgccgacttcattgaccaggctttggctcaaaagaatggccgggtgctcgtccactgccgggaaggttatagccgctccccaacgctagttatcgcctacctcatgatgcggcagaagatggacgtcaagtctgccctgagcatcgtgaggcagaaccgtgagatcggccccaacgatggcttcctggcccagctctgccagctcaatgacagactagccaaggaggggaagttgaaaccctagggcacccccaccacctctgctcgagaggtccgtgggggaggccgtgggcaaaggtgtcccgagctgccatgtttaggaaacacactgtaccctgctcccagcatcacaaggcacttgtctacaagtgtgtcccaacacagtcctgggccactttccccaccctggggagcacataaagaagcttgccaaggggggcgtccttgctccccagttgtcctgtttctgtaacttatgatgtcttttccctgagatgggggctcagagggggaaggcctgtggcctgcatgcttcccgatggcccacggcaggaggtgtgtggaagtgtaaggcctaagatgctcacagaggtccctcatgacctcccttccccaactcccgaatcctctcttgagtgtggacctcaacaccttgagccctagtaaaggaactatgcaaatgcaggccactctccccaccacgtctgtgccctgcactgtccccacagccttccacaccctgtgcataggcagccctctcacgtcttgaggtccgaagctggggtgggggtgtccgtcagttattagtggatggagattcccacagcaaggctgcatttgaatgatttccttaggatgaatggtccctacacaaagaggccttgtgggcaaacctggagaaccctcctaaatccatagagttttcaaaatgtgaatctttggaagccttgagttcagaatctgctgctctggaatatttcccttcgatcttatctcagtcacttcgtttttgagaagagtgatgccttgggcatgcttttttttttttcttttttagaaaacagggagttgaagtccaacctatttaaaaaccccaccatttggagaattacaagggttttgtcctgaattgtagtgttggcaagcccaagccactcgtgctaactgctttttgtctcggttgctattccaagaacagaaggaggaagttggccaattacagcgtgtgtgcatggatgtgtgtggggggcgtgcctctcagaaacgcggccagaagacaagcagggaagtgaaaggtcccaggcacacaccctgcccattgcaggtggctcttacagctctctggtgccagcacgggatccctgaagtgactcagccaggcagacatgagacatggcggagtgtccaaatggatcctttattggtggtagagcaaaaaaacccaaacacgataaacctttcaaaagactttctaaggatgatattggaatgcaccagccctcacatgtgtatgcacatttgccagaatataagagttttgttttaaatacagtcttgttaggattttacgttattgttattatggaaagtgattgtgatgctatttatcttcagggtcactctgggcaaagagaaggtcctcagccatgcccccagcaccttgcacataggtgtctgataaaagtttaagaaagtaaacactttttgagcaccaaatatatatagggcattgttctggtgggtgtgtcacgctcccagaagactgaattcatggtaggatcactcgcaaggccttgtgaaggagtcttacctaaaacgaaagaaatatcagggacttttgttgactatttacaactcagttttacatttaaattcaggcagtgttaatatgccaaggtagggaatgtgcctttttcagagttggccaggagctcctggctgggacacggagaggcaggtgtggcgtaaggcctcactcccggctgggaaggtctctgatcacacagaagcagccctgcccagcctggtcatttgctgtccgcttttctctgtgaccacagcagccctgaacaaccagtatgtgtcttcttctccagatagtgaaaaaggtgtccagataaacccacctaagtgaaatggccatcctctaaactgggtacctcactgcacagcttctaggtagccttccaacttaatctaacttgagcctcacagtaaccctgtaaagttagtagagcttgttcttgtattgtgaccttttttaaaaaaaaggaactgaggttcagaatgattaagggcctggcccccagggttgtccagctccataaggtggagctgggcaagattttgggtttgctgctccctgaagctggattctttcatacgatactctttctcaagaagggggctccctgggatctccaggtgtactgcacttaccctcaatccagccccggagaagcaagtgaaaagggtgggtccctcataggctagaatgtgcagctctttctccaggtgggatgtagcaccccgaagtagagctttctgctctgctcctggaaaaggctagggagctggggctggggctcccctcccatgaccaggcagtggtcaccccatgggacaggcacagctacttacgcgaacacagcaggttggtgtggctggctaactaggacctctcgaaagtctctgtgggggcatgagggagaaaaggccattgggagaattactgcctttactttgggactacttttatgctgataacttgggatttcttgatagtccttcacccctgaaaccccgtatttacttaacaagatttagctcttagttcttcaagtaaaattaaagtctcttgtgtaagagccaacacatgcccagctgcggatgggagctgttcctggacagccttctactgcctgggaagtgatggaacaggaactcagggtgcccttaccccctccccagacctgttccctttctttgactgacagagcaccatccaggcaaaattagagcgccaaatggttttcttctcaatcttaaagcagtatacctttccacaggctcgtctgtgtccctgccactctgagttatccagaaaccaccacctacaaatgaggggactcatctagaagacctctaaggtccccttttggctctgaggggtctctaataatccccacttggaattcagcaccgcaaggaaattatgggtatgtgagccataatatgatgggcagcaggtggcgctgccttccacccatggtgatggatggtttggaaagggaatgttggtgccttttgtgccacaagttaagatgctactgttttaaaggaaaaaaaaaaaaaaaagtactgatcttcaatatgaagacatgagcttttctcgcaggaaattttctttttcacagaactggtgtcaggaatcactgaagggctaaccgtgatagtccttgcaagtaagtcaaggttttatcctgattggaaatagaagacatttccggttgagagaacagattcgttggaagcttaacttttgttgcctcttaacgccaccaaattttagggtaatttgattatgaaagagtgaatttttctggacagaaaagggagagctaccaaattgtttttttctttttaaaaggaagtttaatgtccgttgtatcacaaatcagtgttaaaacaccagaactttagccaaaataaatgtcttacattacaaaggta

SEQ ID NO: 128258 - DNA, 1019 bp, Homo sapiens
  Payload ID: 5114
  Gene Symbol: DUSP3
  Gene Name: dual specificity phosphatase 3
  ENST ID: ENST00000590753
  CDS Start-End: 1-338
gcgcttactttgaaagggctgccgacttcattgaccaggctttggctcaaaagaatgatggagtttcactcttgttgcccaggctgaagagcaatggcgcgatcttggctcaccgcaacctccacctcccaggccgggtgctcgtccactgccgggaaggttatagccgctccccaacgctagttatcgcctacctcatgatgcggcagaagatggacgtcaagtctgccctgagcatcgtgaggcagaaccgtgagatcggccccaacgatggcttcctggcccagctctgccagctcaatgacagactagccaaggaggggaagttgaaaccctagggcacccccaccacctctgctcgagaggctcgtctgtgtccctgccactctgagttatccagaaaccaccacctacaaatgaggggactcatctagaagacctctaaggtccccttttggctctgaggggtctctaataatccccacttggaattcagcaccgcaaggaaattatgggtatgtgagccataatatgatgggcagcaggtggcgctgccttccacccatggtgatggatggtttggaaagggaatgttggtgccttttgtgccacaagttaagatgctactgttttaaaggaaaaaaaaaaaaaaaagtactgatcttcaatatgaagacatgagcttttctcgcaggaaattttctttttcacagaactggtgtcaggaatcactgaagggctaaccgtgatagtccttgcaagtaagtcaaggttttatcctgattggaaatagaagacatttccggttgagagaacagattcgttggaagcttaacttttgttgcctcttaacgccaccaaattttagggtaatttgattatgaaagagtgaatttttctggacagaaaagggagagctaccaaattgtttttttctttttaaaaggaagtttaatgtccgttgtatcacaaatcagtgttaaaacaccagaactttagccaaaataaatgtcttacat

SEQ ID NO: 128259 - DNA, 2077 bp, Homo sapiens
  Payload ID: 5114
  Gene Symbol: DUSP3
  Gene Name: dual specificity phosphatase 3
  ENST ID: ENST00000590342
  CDS Start-End: 12-149
ccgccgccgccatgtcgggctcgttcgagctctcggtgcaggatctcaacgacctgctctcggacggcagcggctgctacagcctcccgagccagccctgcaacgaggtcaccccgcggatctacgtgggcaacgctaagaatgtctaatcagcaggaaagaaccagtgttaacattctgagatgtgaaataggagcctcaagaaagaatatattagcatgcctgtacagccttggaaagcctcaagttggattttcacgatactctgaggacccagttaccaaaatcctaagcttcatggctcagcccaaggatggcatgttgaaaactcaaaactaaccctcctcccattttacagaggaggaaatggtggctcagagtgtgtgagggactacaaggacagggtcaatgtcttgttcatgtctgtggctcaggacatccccaagctgcagaaactaggcatcacccatgtgctgaacgcggctgagggcaggtccttcatgcacgtcaacaccaatgccaacttctacaaggactccggcatcacatacctgggcatcaaggccaacgacacacaggagttcaacctcagcgcttactttgaaagggctgccgacttcattgaccaggctttggctcaaaagaatggccgggtgctcgtccactgccgggaaggttatagccgctccccaacgctagttatcgcctacctcatgatgcggcagaagatggacgtcaagtctgccctgagcatcgtgaggcagaaccgtgagatcggccccaacgatggcttcctggcccagctctgccagctcaatgacagactagccaaggaggggaagttgaaaccctagggcacccccaccacctctgctcgagaggtccgtgggggaggccgtgggcaaaggtgtcccgagctgccatgtttaggaaacacactgtaccctgctcccagcatcacaaggcacttgtctacaagtgtgtcccaacacagtcctgggccactttccccaccctggggagcacataaagaagcttgccaaggggggcgtccttgctccccagttgtcctgtttctgtaacttatgatgtcttttccctgagatgggggctcagagggggaaggcctgtggcctgcatgcttcccgatggcccacggcaggaggtgtgtggaagtgtaaggcctaagatgctcacagaggtccctcatgacctcccttccccaactcccgaatcctctcttgagtgtggacctcaacaccttgagccctagtaaaggaactatgcaaatgcaggccactctccccaccacgtctgtgccctgcactgtccccacagccttccacaccctgtgcataggcagccctctcacgtcttgaggtccgaagctggggtgggggtgtccgtcagttattagtggatggagattcccacagcaaggctgcatttgaatgatttccttaggatgaatggtccctacacaaagaggccttgtgggcaaacctggagaaccctcctaaatccatagagttttcaaaatgtgaatctttggaagccttgagttcagaatctgctgctctggaatatttcccttcgatcttatctcagtcacttcgtttttgagaagagtgatgccttgggcatgcttttttttttttcttttttagaaaacagggagttgaagtccaacctatttaaaaaccccaccatttggagaattacaagggttttgtcctgaattgtagtgttggcaagcccaagccactcgtgctaactgctttttgtctcggttgctattccaagaacagaaggaggaagttggccaattacagcgtgtgtgcatggatgtgtgtggggggcgtgcctctcagaaacgcggccagaagacaagcagggaagtgaaaggtcccaggcacacaccctgcccattgcaggtggctcttacagctctctggtgccagcacgggatccctgaagtgactcagccaggcagacatgagacatggcggagtgtccaaatggatcctttattggtggtagagcaaaaaaacccaaacacgataaacctttcaaaaga

SEQ ID NO: 128260 - DNA, 3666 bp, Homo sapiens
  Payload ID: 5114
  Gene Symbol: DUSP3
  Gene Name: dual specificity phosphatase 3
  ENST ID: ENST00000590935
  CDS Start-End: 1-397
gtctgtggctcaggacatccccaagctgcagaaactaggcatcacccatgtgctgaacgcggctgagggcaggtccttcatgcacgtcaacaccaatgccaacttctacaaggactccggcatcacatacctgggcatcaaggccaacgacacacaggagttcaacctcagcgcttactttgaaagggctgccgacttcattgaccaggctttggctcaaaagaatgatggagtttcactcttgttgcccaggctgaagagcaatggcgcgatcttggctcaccgcaacctccacctcccaggttcaagcgattctcctgcctcagcctcccgcctcagcctcccaagtagctgggattacaggccgggtgctcgtccactgccgggaaggttatagccgctccccaacgctagttatcgcctacctcatgatgcggcagaagatggacgtcaagtctgccctgagcatcgtgaggcagaaccgtgagatcggccccaacgatggcttcctggcccagctctgccagctcaatgacagactagccaaggaggggaagttgaaaccctagggcacccccaccacctctgctcgagaggtccgtgggggaggccgtgggcaaaggtgtcccgagctgccatgtttaggaaacacactgtaccctgctcccagcatcacaaggcacttgtctacaagtgtgtcccaacacagtcctgggccactttccccaccctggggagcacataaagaagcttgccaaggggggcgtccttgctccccagttgtcctgtttctgtaacttatgatgtcttttccctgagatgggggctcagagggggaaggcctgtggcctgcatgcttcccgatggcccacggcaggaggtgtgtggaagtgtaaggcctaagatgctcacagaggtccctcatgacctcccttccccaactcccgaatcctctcttgagtgtggacctcaacaccttgagccctagtaaaggaactatgcaaatgcaggccactctccccaccacgtctgtgccctgcactgtccccacagccttccacaccctgtgcataggcagccctctcacgtcttgaggtccgaagctggggtgggggtgtccgtcagttattagtggatggagattcccacagcaaggctgcatttgaatgatttccttaggatgaatggtccctacacaaagaggccttgtgggcaaacctggagaaccctcctaaatccatagagttttcaaaatgtgaatctttggaagccttgagttcagaatctgctgctctggaatatttcccttcgatcttatctcagtcacttcgtttttgagaagagtgatgccttgggcatgcttttttttttttcttttttagaaaacagggagttgaagtccaacctatttaaaaaccccaccatttggagaattacaagggttttgtcctgaattgtagtgttggcaagcccaagccactcgtgctaactgctttttgtctcggttgctattccaagaacagaaggaggaagttggccaattacagcgtgtgtgcatggatgtgtgtggggggcgtgcctctcagaaacgcggccagaagacaagcagggaagtgaaaggtcccaggcacacaccctgcccattgcaggtggctcttacagctctctggtgccagcacgggatccctgaagtgactcagccaggcagacatgagacatggcggagtgtccaaatggatcctttattggtggtagagcaaaaaaacccaaacacgataaacctttcaaaagactttctaaggatgatattggaatgcaccagccctcacatgtgtatgcacatttgccagaatataagagttttgttttaaatacagtcttgttaggattttacgttattgttattatggaaagtgattgtgatgctatttatcttcagggtcactctgggcaaagagaaggtcctcagccatgcccccagcaccttgcacataggtgtctgataaaagtttaagaaagtaaacactttttgagcaccaaatatatatagggcattgttctggtgggtgtgtcacgctcccagaagactgaattcatggtaggatcactcgcaaggccttgtgaaggagtcttacctaaaacgaaagaaatatcagggacttttgttgactatttacaactcagttttacatttaaattcaggcagtgttaatatgccaaggtagggaatgtgcctttttcagagttggccaggagctcctggctgggacacggagaggcaggtgtggcgtaaggcctcactcccggctgggaaggtctctgatcacacagaagcagccctgcccagcctggtcatttgctgtccgcttttctctgtgaccacagcagccctgaacaaccagtatgtgtcttcttctccagatagtgaaaaaggtgtccagataaacccacctaagtgaaatggccatcctctaaactgggtacctcactgcacagcttctaggtagccttccaacttaatctaacttgagcctcacagtaaccctgtaaagttagtagagcttgttcttgtattgtgaccttttttaaaaaaaaggaactgaggttcagaatgattaagggcctggcccccagggttgtccagctccataaggtggagctgggcaagattttgggtttgctgctccctgaagctggattctttcatacgatactctttctcaagaagggggctccctgggatctccaggtgtactgcacttaccctcaatccagccccggagaagcaagtgaaaagggtgggtccctcataggctagaatgtgcagctctttctccaggtgggatgtagcaccccgaagtagagctttctgctctgctcctggaaaaggctagggagctggggctggggctcccctcccatgaccaggcagtggtcaccccatgggacaggcacagctacttacgcgaacacagcaggttggtgtggctggctaactaggacctctcgaaagtctctgtgggggcatgagggagaaaaggccattgggagaattactgcctttactttgggactacttttatgctgataacttgggatttcttgatagtccttcacccctgaaaccccgtatttacttaacaagatttagctcttagttcttcaagtaaaattaaagtctcttgtgtaagagccaacacatgcccagctgcggatgggagctgttcctggacagccttctactgcctgggaagtgatggaacaggaactcagggtgcccttaccccctccccagacctgttccctttctttgactgacagagcaccatccaggcaaaattagagcgccaaatggttttcttctcaatcttaaagcagtatacctttccacaggctcgtctgtgtccctgccactctgagttatccagaaaccaccacctacaaatgaggggactcatctagaagacctctaaggtccccttttggctctgaggggtctctaataatccccacttggaattcagcaccgcaaggaaattatgggtatgtgagccataatatgatgggcagcaggtggcgctgccttccacccatggtgatggatggtttggaaagggaatgttggtgccttttgtgccacaagttaagatgctactgttttaaagg

SEQ ID NO: 128261 - DNA, 5537 bp, Homo sapiens
  Payload ID: 5115
  Gene Symbol: DUSP4
  Gene Name: dual specificity phosphatase 4
  Uniprot ID: Q13115
  ENST ID: ENST00000240100
  CDS Start-End: 391-1575
gctgagcgccggaggagcgtaggcagggcagcgctggcgccagtggcgacaggagccgcgcgaccggcaaaaatacacgggaggccgtcgccgaaaagagtccgcggtcctctctcgtaaacacactctcctccaccggcgcctccccctccgctctgcgcgccgcccggctgggcgcccgaggccgctccgactgctatgtgaccgcgaggctgcgggaggaaggggacagggaagaagaggctctcccgcgggagcccttgaggaccaagtttgcggccacttctgcaggcgtcccttcttagctctcgcccgcccctttctgcagcctaggcggcccgggttctcttctcttcctcgcgcgcccagccgcctcggttcccggcgaccatggtgacgatggaggagctgcgggagatggactgcagtgtgctcaaaaggctgatgaaccgggacgagaatggcggcggcgcgggcggcagcggcagccacggcaccctggggctgccgagcggcggcaagtgcctgctgctggactgcagaccgttcctggcgcacagcgcgggctacatcctaggttcggtcaacgtgcgctgtaacaccatcgtgcggcggcgggctaagggctccgtgagcctggagcagatcctgcccgccgaggaggaggtacgcgcccgcttgcgctccggcctctactcggcggtcatcgtctacgacgagcgcagcccgcgcgccgagagcctccgcgaggacagcaccgtgtcgctggtggtgcaggcgctgcgccgcaacgccgagcgcaccgacatctgcctgctcaaaggcggctatgagaggttttcctccgagtacccagaattctgttctaaaaccaaggccctggcagccatcccacccccggttccccccagtgccacagagcccttggacctgggctgcagctcctgtgggaccccactacacgaccaggggggtcctgtggagatccttcccttcctctacctcggcagtgcctaccatgctgcccggagagacatgctggacgccctgggcatcacggctctgttgaatgtctcctcggactgcccaaaccactttgaaggacactatcagtacaagtgcatcccagtggaagataaccacaaggccgacatcagctcctggttcatggaagccatagagtacatcgatgccgtgaaggactgccgtgggcgcgtgctggtgcactgccaggcgggcatctcgcggtcggccaccatctgcctggcctacctgatgatgaagaaacgggtgaggctggaggaggccttcgagttcgttaagcagcgccgcagcatcatctcgcccaacttcagcttcatggggcagctgctgcagttcgagtcccaggtgctggccacgtcctgtgctgcggaggctgctagcccctcgggacccctgcgggagcggggcaagacccccgccacccccacctcgcagttcgtcttcagctttccggtctccgtgggcgtgcactcggcccccagcagcctgccctacctgcacagccccatcaccacctctcccagctgttagagccgccctgggggccccagaaccagagctggctcccagcaagggtaggacgggccgcatgcgggcagaaagttgggactgagcagctgggagcaggcgaccgagctccttccccatcatttctccttggccaacgacgaggccagccagaatggcaataaggactccgaatacataataaaagcaaacagaacactccaacttagagcaataacggctgccgcagcagccagggaagaccttggtttggtttatgtgtcagtttcacttttccgatagaaatttcttacctcatttttttaagcagtaaggcttgaagtgatgaaacccacagatcctagcaaatgtgcccaaccagctttactaaagggggaggaagggagggcaaagggatgagaagacaagtttcccagaagtgcctggttctgtgtacttgtccctttgttgtcgttgttgtagttaaaggaatttcattttttaaaagaaatcttcgaaggtgtggttttcatttctcagtcaccaacagatgaataattatgcttaataataaagtatttattaagactttcttcagagtatgaaagtacaaaaagtctagttacagtggatttagaatatatttatgttgatgtcaaacagctgagcaccgtagcatgcagatgtcaaggcagttaggaagtaaatggtgtcttgtagatatgtgcaaggtagcatgatgagcaacttgagtttgttgccactgagaagcaggcgggttgggtgggaggaggaagaaagggaagaattaggtttgaattgctttttaaaaaaaaaagaaaagaaaaagacagcatctcactatgttgccaaggctcatcttgagaagcaggcgggttgggtgggaggaggaagaaagggaagaattaggtttgaattgcttttttaaaaaaaaagaaaagaaaaaaaaagacagcatctcactatgttgccaaggctcatctcaagctcttgggctcaagagatcctcccacctcggcctcctgagtagctgggactgcaggtgtgtgtcatcatgaccaatgtgaattgcttttgaagctggttcatgggcatgtaggccaccgaagcaattttagaccacagtaagtcaagcttttttccctccgatgatcactgggtggttgcagcattttttgcataaacctgcctaagacttgtctatcgtctgtgatcaatatgccatattacactaaggtgctcctggaaaattgggtgcagttcaaattttcctacagcaaatcatttggcaaggccagccattggggaaaccagacaactagagataaccctgaaatgaatccttttgtaaattgaagcaccatcttttctttttttgcataaattggaggttttaattttagggcagttacctgaagtgaaatataccaacaatttcttgtgttctttaaattcctagttaggtgaatatttttgaaggtcctcttttgaataaagaggggaatggacaccacatttcaggtcttctcgaagtgtggaagggcaagagagcatcagtgagctgatggtggattgcttacatcggattccattggtatgaatttcccaaactggaaatcaaagcgccagggtggggttggggctgactgctggtgagggggctggccgctggctcccgtgacgtgcgtcatgggcacgcaggcgccattttgaatctatcgtcggcacgtgggtgccattttgaatccttagttgggcctttctaaatggagaatggctttggagggagacacgttttctgtggggagggtttgggggggagggaggagggaacaagctacatgctattttgtttgtagtattgtggaacagtcttgttatggagtgccagcttagaggttgttgcaaacttgtctagaagtgagagcatggttttttttagccctttgagagtctacatctaatgaacattcttgctcacccataaataacgtcaagcctcaatgtcaccgtcacgttgggatactctttctcatctggcatcctagacaggacaaggttggttacctttccttccatgaaccatgaacctgtgacggcatcattcatcctgacttcaccaagctccgcctgtgggtgaggccagagctcccactggcaatttttagaagagccagaggctccctgcttcctctagaaataacagttcagggtgaagcatggagggtttcagttcccagacaatggaaccatttagagacaacacagttggacatttccactttttccttgattcctggaagtccagtgggttctgcagctgaaaaagccctgggtcccagcagcagagagacaggacagaggggatgcttgggcggggagggacggtaacctgcagaacagattccatttttatagaacgagtacacgtttgctaaaacagtcctgctttcccagactggattcccaccacagggacagtcggaactcaggactagctccagcgacatctttcctccgaattcaagccttctatcacaatgtcaaaacagctatttataaagccattttcattgtacttgataacagcacgagtcccaaaacttttagaaataaaataggacattggcttgattgaaaagagggactttttaaaaattgttctttcgtcagaagccttttggatgacttacaatagctctgatgaagataccaccccagcgtcagtccaataggtcagtgagtttcaacaggcatccatccctcccatgaagggattctggtgatgggaagtttctgtaatgacaggaaagcattgaccctcattgattgtcaactttggtattagccatgaaagacaggatgctcattgggtgttctgtagagtgaggaatgctgcctattccctcccagaacgtctgacccaggggtgtgtgttgaggagccctgggggaaatggaccaagttttcccacagagcagtattaggctgaagagcaggtgactggtaggccccagctcccatcattccctcccaaagccattttgttcagttgctcatccacgctggattccagagagttttccaatttgggaagccatgagaaaggtttttaaatcttgggaagatggagagagggacataggatagttgactccaacatgacaggaagaggctggagattgggaattggccatcaaccaagcctgtagtagtaaagccatggtcccgcattggaattacttggggaacttatacagttctgatacccaggctctcctagaccagttcaaccaattctaggtgggggactcaggcatcagtgtgtttcgtagctccccgggtgttttccctgtgcagccgagcttgggaaactgccatgctttttggatgtcaaggcgctgttggaggctgggtgtgacagcacagagccaggttgtcttgtggaaaccacagccacgggtttgccactggctcagcatggcctcactgccagtcccagcctggctgagggacaagatggtttctcttgggagttcctgagtggagcacccttccaggctttttgaaagccagctgatctgtggagccttgttaagggactcaatacggtgtttggatattgatgtttttccttgagactgtcttgtccatcaataaagatggaggatgtctcctctttgaaccccgcttccccaccagtactctctctcccttagagtttatgagttattcaaggaggagacttcttaaagacagcaacgcaattcttgtaacttgtgtaaatagccccatctttcagagtgataccatttctacatttgataatgcctgtattcctgtaggatgtatatagtttaggggattttttttttgtttggttttgttttttagaagtcaatatgtctggttttatttattgcttgaaaaagatcatttgaaaaaaataaatacattttcaacca

SEQ ID NO: 128262 - DNA, 2959 bp, Homo sapiens
  Payload ID: 5115
  Gene Symbol: DUSP4
  Gene Name: dual specificity phosphatase 4
  Uniprot ID: Q13115
  ENST ID: ENST00000240101
  CDS Start-End: 1561-2472
gcagttcagacccccccacacccatcaaagagccgctcctcccccccgcaggcgccttcgccgcctccctcccttcctttcctttccgctcctcttccgacctgtccacccgggaggaagggagctggaaagggggcggaaacctctcccctccaaaaagcacaacaaaactgttcagtgcggaggagccgggttcgcccctgccggacagcggggggctttgttccccgcagttgtttcctgcccatttgacctgtcagctgctggggaaacgctgctgttgacctttggttgaactgctaaggcgattttgctgatttttctttctttttccgcgagggctgtcttttgctcctccaaatgagcccagtccccctcccttctccccaaagcgctccaagagaaagtgccaggaaggggcttgtcccggaaggcctggcggctgagcggggccaggtcctggttaggccaccagggtgggcgtccgcgccattgtttgagcttgtcggcgctggtgggagagatgagggcaattcctctgggacgcaagtcccctcgaatggccggggctggccgggatgttccccgcacggcgctgccctcgagtccccccgatggagagcgcgggcgcgccttccttcgctggcgtccaaacccgggaccagctagaacacagcagggctgggactgggttccagccccacgtggagtctggatttgttttgttgtgttttgctttccttcctggaagaaatcccgaggggaccgccctagagcggcagctccaggacctcggcccttgggcttccgggggtgcagccacttaggccccgctcccggggagagagggattattttttaagatttatccccagggcgcgcggcatttccctgtccctcgtgaatcccgttgagagtcctccctccccaacctcctccatttccccagccagaccgattcgagagccctggagattctgggcgaggctagtgactgggtagtacaggcctctagccccaccattgctctctctgtcttcagttccccaggagggcaatggcatcaaacagcacagctctgggggatgtcaatattgcataccttttctacctaaagggaaaatgactcgcttttctgcttgcaaatatggtagtttctgcttacaaatgtaatacaatgcccatgacagccaaggactggaagcataagttgctaggtcttacaggtgattttttacaatgaagcaaactcactatgttagacaccatttacattggatgtctccaactaacaaaagtaactaaagacagatgtaggtgtaaattgagagtgaaatttgaccctttagaccgtcacaacttccttgggcttatcctgggtgcttataggagaggtgggctccacccacaaaaatggactgctcagaaaaatgagggagagagaaagggtggccactttcccgagccaagaaattccttgaaaaaaaatcagaacatctgaaaccagagagccgatttccttaccgggaggcagttcctggctaacgaagaggaagcacgatgggaagaaaagttcactccaacggaagccagtttgctgaacatagcagatcgcccaggaggactgggagagactgcaaaccagttcgagcccccagcatggcgttaggtgtcagccagctggcaggaaggtccaggtgtctgtgttcagagtctcaaggcggctatgagaggttttcctccgagtacccagaattctgttctaaaaccaaggccctggcagccatcccacccccggttccccccagtgccacagagcccttggacctgggctgcagctcctgtgggaccccactacacgaccaggggggtcctgtggagatccttcccttcctctacctcggcagtgcctaccatgctgcccggagagacatgctggacgccctgggcatcacggctctgttgaatgtctcctcggactgcccaaaccactttgaaggacactatcagtacaagtgcatcccagtggaagataaccacaaggccgacatcagctcctggttcatggaagccatagagtacatcgatgccgtgaaggactgccgtgggcgcgtgctggtgcactgccaggcgggcatctcgcggtcggccaccatctgcctggcctacctgatgatgaagaaacgggtgaggctggaggaggccttcgagttcgttaagcagcgccgcagcatcatctcgcccaacttcagcttcatggggcagctgctgcagttcgagtcccaggtgctggccacgtcctgtgctgcggaggctgctagcccctcgggacccctgcgggagcggggcaagacccccgccacccccacctcgcagttcgtcttcagctttccggtctccgtgggcgtgcactcggcccccagcagcctgccctacctgcacagccccatcaccacctctcccagctgttagagccgccctgggggccccagaaccagagctggctcccagcaagggtaggacgggccgcatgcgggcagaaagttgggactgagcagctgggagcaggcgaccgagctccttccccatcatttctccttggccaacgacgaggccagccagaatggcaataaggactccgaatacataataaaagcaaacagaacactccaacttagagcaataacggctgccgcagcagccagggaagaccttggtttggtttatgtgtcagtttcacttttccgatagaaatttcttacctcatttttttaagcagtaaggcttgaagtgatgaaacccacagatcctagcaaatgtgcccaaccagctttactaaagggggaggaagggagggcaaagggatgagaagacaagtttcccagaagtgcctggttctgtgtacttgtccctttgttgtcgttgttgtagttaaaggaatttcattttttaaaagaaa

SEQ ID NO: 128263 - DNA, 2557 bp, Homo sapiens
  Payload ID: 5116
  Gene Symbol: DUSP5
  Gene Name: dual specificity phosphatase 5
  Uniprot ID: Q16690
  ENST ID: ENST00000369583
  CDS Start-End: 285-1439
cttatatgggcagccgcgtcacggacggcactcattcacataaaacgctgcgcggccggcggaatccccggcttctagggcggcgagcggccgggctggctatcgagcgagcggggcgggaacgcggagttgcgccgccgctcgggcgccgggctccgtcgcggccgcagccccgcgggtcgccctcccgtgcctcgcccgcggacaccctggccgtggacaccctggccgtgggcacccgcggggcgcgcggcgcggggccgctggccggcggcggcggcggcatgaaggtcacgtcgctcgacgggcgccagctgcgcaagatgctccgcaaggaggcggcggcgcgctgcgtggtgctcgactgccggccctatctggccttcgctgcctcgaacgtgcgcggctcgctcaacgtcaacctcaactcggtggtgctgcggcgggcccggggcggcgcggtgtcggcgcgctacgtgctgcccgacgaggcggcgcgcgcgcggctcctgcaggagggcggcggcggcgtcgcggccgtggtggtgctggaccagggcagccgccactggcagaagctgcgagaggagagcgccgcgcgtgtcgtcctcacctcgctactcgcttgcctacccgccggcccgcgggtctacttcctcaaagggggatatgagactttctactcggaatatcctgagtgttgcgtggatgtaaaacccatttcacaagagaagattgagagtgagagagccctcatcagccagtgtggaaaaccagtggtaaatgtcagctacaggccagcttatgaccagggtggcccagttgaaatccttcccttcctctaccttggaagtgcctaccatgcatccaagtgcgagttcctcgccaacctgcacatcacagccctgctgaatgtctcccgacggacctccgaggcctgcgcgacccacctacactacaaatggatccctgtggaagacagccacacggctgacattagctcccactttcaagaagcaatagacttcattgactgtgtcagggaaaagggaggcaaggtcctggtccactgtgaggctgggatctcccgttcacccaccatctgcatggcttaccttatgaagaccaagcagttccgcctgaaggaggccttcgattacatcaagcagaggaggagcatggtctcgcccaactttggcttcatgggccagctcctgcagtacgaatctgagatcctgccctccacgcccaacccccagcctccctcctgccaaggggaggcagcaggctcttcactgataggccatttgcagacactgagccctgacatgcagggtgcctactgcacattccctgcctcggtgctggcaccggtgcctacccactcaacagtctcagagctcagcagaagccctgtggcaacggccacatcctgctaaaactgggatggaggaatcggcccagccccaagagcaactgtgatttttgtttttaagactcatggacatttcatacctgtgcaatactgaagacctcattctgtcatgctgccccagtgagatagtgagtggtcaccaggcttgcaaatgaacttcagacggacctcagggtaggttctcgggactgaaggaaggccaagccattacgggagcacagcatgtgctgactactgtacttccagacccctgccctcttgggactgcccagtccttgcacctcagagttcgccttttcatttcaagcataaggcaataaatacctgcagcaacgtgggagaaagaagttgctggaccaggagaaaaggcagttatgaagccaattcattttgaaggaagcacaatttccaccttattttttgaactttggcagtttcaatgtctgtctctgttgcttcggggcataagctgatcaccgtctagttgggaaagtaaccctacagggtttgtagggacatgatcagcatcctgatttgaaccctgaaatgttgtgtagacaccctcttgggtccaatgaggtagttggttgaagtagcaagatgttggcttttctggattttttttgccatgggttcttcactgaccttggactttggcatgattcttagtcatacttgaacttgtctcattccacctcttctcagagcaactcttcctttgggaaaagagttcttcagatcatagaccaaaaaagtcataccttcgaggtggtagcagtagattccaggaggagaagggtacttgctaggtatcctgggtcagtggcggtgcaaactggtttcctcagctgcctgtccttctgtgtgcttatgtctcttgtgacaattgttttcctccctgcccctggaggttgtcttcaagctgtggacttctgggatttgcagattttgcaacgtggtactactttttttttctttttgtctgttagttatttctccaggggaaaaggcaataattttctaagacccgtgtgaatgtgaagaaaagcagtatgttactggttgttgttgttgttcttgttttttatagtgtaaaataaaaatagtaaaaggagaaaagca

SEQ ID NO: 128264 - DNA, 4400 bp, Homo sapiens
  Payload ID: 5117
  Gene Symbol: DUSP6
  Gene Name: dual specificity phosphatase 6
  Uniprot ID: Q16828
  ENST ID: ENST00000279488
  CDS Start-End: 1233-2378
tttgtttctgcactctacattgttttaatgaaaataaaatgttattttaagaaaaaaggttttcttctgattttctgcacaaccagacgtttgtttgtttgctttaaaatgtttcaacaaaatcctggtttgtttcgaaatatgttggattagcatttaacacctcatcggtcactaaagcccagtcagttcaccagccccaacacagcctcggctaaaagaacatcagagcaaacagagctgggcctttaaaagtggcaaacaaatgccacacaccgcctaaagaaggggggttgggggaggggagggttaaggcgaacttgggtccaaatgagtttgaagggaatacaaagaacgaaaagtcagcacaagttttcctaaagctagctcgcgaacgcaagcgtcgcgaacaagggcttttgtgcatgctaattgcgccattggtgcgcaaaagttccgacgcgaagtgtgaactctcaacagaaggaaacatgagacaactgaagtgccctggtttatgtgccctgctcctcctccgctgccgcctccccttctttctccttcctcccgccgagcccgctgttgcagcttgtttgcactggggcttatccggagcggaaattcctttccgtttttgtgaatgacaaactcattaacaattcatcaacacaacctgttccagccggcccgtccccacggcaacagccccttccgcagcacgctcattggctggcccggagaatgtatccattgagacgctcgctgtttgtatccattgaggagctgcctcgcgcagggggtgtgcgaggctgagtccaagagatagcaaatcgagtcttaaataatccggggagaaagacgcccgggtagatttgaggtgcagccttggagggagggattagaagccgctagactttttttcctcccctctcagtagcacggagtccgaattaattggatttcattcactggggaggaacaaaaactatctgggcagcttcattgagagagattcattgacactaagagccagcggctgcagctgggtgcagagagaacctccggctttacttctgtctcgtctgccccaaccgctagcctcggcttgggtaaggcgaggcggaattaaaccccgctccgagagcggcagcttcgcgcgcggtgcgctcggcctatgcctgccccgaggggcgtctggtaggcaccccgccctctcccgcagctcgacccccatgatagatacgctcagacccgtgcccttcgcgtcggaaatggcgatcagcaagacggtggcgtggctcaacgagcagctggagctgggcaacgagcggctgctgctgatggactgccggccgcaggagctatacgagtcgtcgcacatcgagtcggccatcaacgtggccatcccgggcatcatgctgcggcgcctgcagaagggtaacctgccggtgcgcgcgctcttcacgcgcggcgaggaccgggaccgcttcacccggcgctgtggcaccgacacagtggtgctctacgacgagagcagcagcgactggaacgagaatacgggcggcgagtcggtgctcgggctgctgctcaagaagctcaaggacgagggctgccgggcgttctacctggaaggtggcttcagtaagttccaagccgagttctccctgcattgcgagaccaatctagacggctcgtgtagcagcagctcgccgccgttgccagtgctggggctcgggggcctgcggatcagctctgactcttcctcggacatcgagtctgaccttgaccgagaccccaatagtgcaacagactcggatggtagtccgctgtccaacagccagccttccttcccagtggagatcttgcccttcctctacttgggctgtgccaaagactccaccaacttggacgtgttggaggaattcggcatcaagtacatcttgaacgtcacccccaatttgccgaatctctttgagaacgcaggagagtttaaatacaagcaaatccccatctcggatcactggagccaaaacctgtcccagtttttccctgaggccatttctttcatagatgaagcccggggcaagaactgtggtgtcttggtacattgcttggctggcattagccgctcagtcactgtgactgtggcttaccttatgcagaagctcaatctgtcgatgaacgatgcctatgacattgtcaaaatgaaaaaatccaacatatcccctaacttcaacttcatgggtcagctgctggacttcgagaggacgctgggactcagcagcccatgtgacaacagggttccagcacagcagctgtattttaccaccccttccaaccagaatgtataccaggtggactctctgcaatctacgtgaaagaccccacacccctccttgctggaatgtgtctggcccttcagcagtttctcttggcagcatcagctgggctgctttctttgtgtgtggccccaggtgtcaaaatgacaccagctgtctgtactagacaaggttaccaagtgcggaattggttaatactaacagagagatttgctccattctctttggaataacaggacatgctgtatagatacaggcagtaggtttgctctgtacccatgtgtacagcctacccatgcagggactgggattcgaggacttccaggcgcatagggtagaaccaaatgatagggtaggagcatgtgttctttagggccttgtaaggctgtttccttttgcatctggaactgactatataattgtcttcaatgaagactaattcaattttgcatatagaggagccaaagagagatttcagctctgtatttgtggtatcagtttggaaaaaaaaatctgatactccatttgattattgtaaatatttgatcttgaatcacttgacagtgtttgtttgaattgtgtttgttttttcctttgatgggcttaaaagaaattatccaaagggagaaagagcagtatgccacttcttaaaacagaacaaaacaaaaaaagaaaattgtgctcttttctaatccaaagggtatatttgcagcatgcttgactttaccaattctgatgacatctttacggacactattatcactaagaccttgttatggcgaagtctttagtctttttcatgtattttcctcatgattttttctctttatgtagtttgactatgccttacctttgtaaatatttttgcttgtgttgtcgcaaaggggataatctgggaaagacaccaaatcatgggctcactttaaaaaaagaaagaataaaaaaaccttcagctgtgctaaacagtatattacctctgtataaaattcttcagggagtgtcacctcaaatgcaatactttgggttggtttctttcctttaaaaaaatttgtataaaactggaagtgtgtgtgtgtgagcatgggtacccatttgataagagaaatgcatttgattgtgaagaagggagagttaaattctccattatgttcgtggtgtaaagtttagagctggaatttattataagaatgtaaaaccttaaattattaataaataactattttggctattgaatgtgtgtttttaaaaactcagttatacctatgtgtgaagtgacacattttagaactttttcattcagggattgattttgacttgtaggcatagtagggcaaggttcttttaagcttttcctagaacgtttttcagcagcagtttatgaaattcatcgtttgccacgaataaagatgacatcctagaatggaccgactgtaccgtgtatatgaacaatacctcttatgagtatagttccggcttaagattttaaagcccctgaagaaaaatgaacctatagagcatagcttgctgaggaatacaatttggatattaaccacagagaggtgtagcagaataccaagatgacagccacatgttaacctcctccctatccttcactgtcaggatcttctgctttataatgctgagataatgccaaagaggaagtagggataattctttttccagtctgttgtcatgggcaattctacctgcagatatcctagtgtgagaatgctgaatccagaatgatgtctccactttttcccctagcatgcgcatggcaaggcatatctaagcttcctcaccgtgtcaggatatggctttagaattttacattggcacttaggaggcaactttgtcatccctgttgtaatgtgcttttttgtttaactggcttgggatgtgggtcagaaacccttattgaaacttgtggggattattttagtttcttttcaagctaaagactttatatcttgccatttttcttgggacctaccctctccttacctcaaatgtaaaaatacacaaaccaaaataaaaggcaggtgtatggaatcaaaagaa

SEQ ID NO: 128265 - DNA, 1959 bp, Homo sapiens
  Payload ID: 5117
  Gene Symbol: DUSP6
  Gene Name: dual specificity phosphatase 6
  Uniprot ID: Q16828
  ENST ID: ENST00000308385
  CDS Start-End: 367-1074
gtagatttgaggtgcagccttggagggagggattagaagccgctagactttttttcctcccctctcagtagcacggagtccgaattaattggatttcattcactggggaggaacaaaaactatctgggcagcttcattgagagagattcattgacactaagagccagcggctgcagctgggtgcagagagaacctccggctttacttctgtctcgtctgccccaaccgctagcctcggcttgggtaaggcgaggcggaattaaaccccgctccgagagcggcagcttcgcgcgcggtgcgctcggcctatgcctgccccgaggggcgtctggtaggcaccccgccctctcccgcagctcgacccccatgatagatacgctcagacccgtgcccttcgcgtcggaaatggcgatcagcaagacggtggcgtggctcaacgagcagctggagctgggcaacgagcggctgctgctgatggactgccggccgcaggagctatacgagtcgtcgcacatcgagtcggccatcaacgtggccatcccgggcatcatgctgcggcgcctgcagaagggtaacctgccggtgcgcgcgctcttcacgcgcggcgaggaccgggaccgcttcacccggcgctgtggcaccgacacagtggtgctctacgacgagagcagcagcgactggaacgagaatacgggcggcgagtcggtgctcgggctgctgctcaagaagctcaaggacgagggctgccgggcgttctacctggaagatgaagcccggggcaagaactgtggtgtcttggtacattgcttggctggcattagccgctcagtcactgtgactgtggcttaccttatgcagaagctcaatctgtcgatgaacgatgcctatgacattgtcaaaatgaaaaaatccaacatatcccctaacttcaacttcatgggtcagctgctggacttcgagaggacgctgggactcagcagcccatgtgacaacagggttccagcacagcagctgtattttaccaccccttccaaccagaatgtataccaggtggactctctgcaatctacgtgaaagaccccacacccctccttgctggaatgtgtctggcccttcagcagtttctcttggcagcatcagctgggctgctttctttgtgtgtggccccaggtgtcaaaatgacaccagctgtctgtactagacaaggttaccaagtgcggaattggttaatactaacagagagatttgctccattctctttggaataacaggacatgctgtatagatacaggcagtaggtttgctctgtacccatgtgtacagcctacccatgcagggactgggattcgaggacttccaggcgcatagggtagaaccaaatgatagggtaggagcatgtgttctttagggccttgtaaggctgtttccttttgcatctggaactgactatataattgtcttcaatgaagactaattcaattttgcatatagaggagccaaagagagatttcagctctgtatttgtggtatcagtttggaaaaaaaaatctgatactccatttgattattgtaaatatttgatcttgaatcacttgacagtgtttgtttgaattgtgtttgttttttcctttgatgggcttaaaagaaattatccaaagggagaaagagcagtatgccacttcttaaaacagaacaaaacaaaaaaagaaaattgtgctcttttctaatccaaagggtatatttgcagcatgcttgactttaccaattctgatgacatctttacggacactattatcactaagaccttgttatggcgaagtctttagtctttttcatgtattttcctcatgattttttctctttatgtagtttgactatgccttacctttgtaaatatttttgcttgtgttgtcgcaaaggggataatctgggaaagacaccaaatcatgggctcacttt

SEQ ID NO: 128266 - DNA, 567 bp, Homo sapiens
  Payload ID: 5117
  Gene Symbol: DUSP6
  Gene Name: dual specificity phosphatase 6
  ENST ID: ENST00000548755
  CDS Start-End: 217-567
attgaggagctgcctcgcgcagggggtgtgcgaggctgagtccaagagatagcaaatcgagtcttaaataatccggggagaaagacgcccgggtagatttgaggcggaattaaaccccgctccgagagcggcagcttcgcgcgcggtgcgctcggcctatgcctgccccgaggggcgtctggtaggcaccccgccctctcccgcagctcgacccccatgatagatacgctcagacccgtgcccttcgcgtcggaaatggcgatcagcaagacggtggcgtggctcaacgagcagctggagctgggcaacgagcggctgctgctgatggactgccggccgcaggagctatacgagtcgtcgcacatcgagtcggccatcaacgtggccatcccgggcatcatgctgcggcgcctgcagaagggtaacctgccggtgcgcgcgctcttcacgcgcggcgaggaccgggaccgcttcacccggcgctgtggcaccgacacagtggtgctctacgacgagagcagcagcgactggaacgagaatacgggcggcgagtcggtgctcgggctg

SEQ ID NO: 128267 - DNA, 1074 bp, Homo sapiens
  Payload ID: 5117
  Gene Symbol: DUSP6
  Gene Name: dual specificity phosphatase 6
  ENST ID: ENST00000547291
  CDS Start-End: 122-892
aaagtgtgtttctcttatagatggttctgtatgtagggggttcgtaggatgcttgtggtgtttcttgcgccgggctgcggttcttacaagctgtgaaaactactacggcttctcaggttagatgattgcttttctcgttctggcaggtggcttcagtaagttccaagccgagttctccctgcattgcgagaccaatctagacggctcgtgtagcagcagctcgccgccgttgccagtgctggggctcgggggcctgcggatcagctctgactcttcctcggacatcgagtctgaccttgaccgagaccccaatagtgcaacagactcggatggtagtccgctgtccaacagccagccttccttcccagtggagatcttgcccttcctctacttgggctgtgccaaagactccaccaacttggacgtgttggaggaattcggcatcaagtacatcttgaacgtcacccccaatttgccgaatctctttgagaacgcaggagagtttaaatacaagcaaatccccatctcggatcactggagccaaaacctgtcccagtttttccctgaggccatttctttcatagatgaagcccggggcaagaactgtggtgtcttggtacattgcttggctggcattagccgctcagtcactgtgactgtggcttaccttatgcagaagctcaatctgtcgatgaacgatgcctatgacattgtcaaaatgaaaaaatccaacatatcccctaacttcaacttcatgggtcagctgctggacttcgagaggacgctgggactcagcagcccatgtgacaacagggttccagcacagcagctgtattttaccaccccttccaaccagaatgtataccaggtggactctctgcaatctacgtgaaagaccccacacccctccttgctggaatgtgtctggcccttcagcagtttctcttggcagcatcagctgggctgctttctttgtgtgtggccccaggtgtcaaaatgacaccagctgtctgtactagacaaggttaccaagtgcggaattggttaatactaacagagagatttgctccattc

SEQ ID NO: 128268 - DNA, 3340 bp, Homo sapiens
  Payload ID: 5118
  Gene Symbol: DUSP7
  Gene Name: dual specificity phosphatase 7
  Uniprot ID: Q16829
  ENST ID: ENST00000495880
  CDS Start-End: 185-1444
cgcggtgcgcgcggagggccgggcgggcgggcgggacggaggccgggaggccgggaggccggggcggcgggcgcgcagctcggcgggaggcgggcgcccggagacgcggctggggcccgcgcggccggggcgccgtcccagggcagggctgcccggccccggccccgggccgcccgcgctccccatgaaaaaccagctccgcggccccccagcgcgggcgcacatgtcgacttcgggggcggcggcggctgggggcacccgggcggggtccgagcccggtgcggggtcggggtccggcgcaggcaccggggcgggcgcggcgacgggggcaggggccatgccctgcaagagcgccgagtggctgcaggaggagctggaggcgcgcggcggcgcgtccttgctgctgctcgactgccggccgcacgagctcttcgagtcgtcgcacatcgagacggccatcaacctggccatcccgggcctcatgttgcgccgcctgcgcaagggcaacctgcccatccgctccatcatccccaaccacgccgacaaggagcgcttcgccacgcgctgcaaggcggccaccgtgctgctctacgacgaggccacggccgagtggcagcccgagcccggcgctcccgcctccgtgctcggcctgctcctacagaagctgcgcgacgacggctgccaggcctactacctccaaggtggtttcaacaagtttcaaacagagtactctgagcactgcgagaccaacgtggacagctcttcctcgccgagcagctcgccacccacctcagtgctgggcctggggggcctgcgcatcagctctgactgctccgacggcgagtcggaccgagagctgcccagcagtgccaccgagtcagacggcagccctgtgccatccagccaaccagccttccctgtccagatcctgccctacctctacctcggctgcgccaaggactccaccaacctggacgtgctcggcaagtatggcatcaagtatatcctcaatgtcacacccaacctacccaacgccttcgagcacggcggcgagttcacctacaagcagatccccatctctgaccactggagccagaacctctcccagttcttccctgaggccatcagcttcattgacgaagcccgctccaagaagtgtggtgtcctggtgcactgcctggcaggcatcagccgctcagtgacggtcactgtggcctatctgatgcagaagatgaacctgtcactcaacgacgcctacgactttgtcaagaggaaaaagtccaacatctcgcccaacttcaacttcatggggcagctgctggactttgagcggacgctggggctaagcagcccgtgcgacaaccacgcgtcgagtgagcagctctacttttccacgcccaccaaccacaacctgttcccactcaatacgctggagtccacgtgaggcctggtgcacggggggcatggcaccaggcccctgctcggctctccacagggctaggtgggagagcccaagcccgccacctctggcctgaggaacccccagatgtcacctgtgcccagaggcccaggctgatcggtgtcggagcgcccctcaccatccttgggggcagggcccgcaggcaaggtctcccactgcagggcttgctggagaggcctcggctcttggacacgtggctttgggcgtccaccagggcctcatcctgtccaggacgctcctttctgctgacagcccagccagtttggctgttttttaaagacacatccacggacctgagtttactttttacttttggcaggtaaatccaagctccctggagcacaaagagtgtttgagctcttcttgatttttcttttttttttttttttttaacaaaaagtgttattttcaggctacatgcaacagtggattgtataacccagtatttcatccctttcctgatcctgcaagagagagaaatgttcagttttgtttttcgttcaatttcaaaaagcaagtatcgtgtttgtttttgtttttgttttttaatggaaaagacagacgccatgttgaccttgaccaaatgcgttttgcacatgtgtgaagcctctgtttcctcagcgggcccttcttgaaggggtggcttactgctcttcaggtattgggacccccagtcgtgccgcctcccacccttggcccagtctgacttagctctgcattcgcctgtgatgactgctgcaagttgtgattggtgggctggatggtggtctttgcattttctgccgtctcatccatccctctggtggtccctgcagacctccctgaggcagaaggtggggaccctggggccctgccgctgtcccccaggaggtgggccgcagggggctgccaggcagtagcattagccctctggggtcagcccctaagaaggcctgggctctgagcccttttatatacttagccactacttctgtctgtctgtctgtctctctctcttcctctccctctctctctttctctctctccctctctctctctttctttctctctccccccctccctctctcttcctttcctctctcttgttgtaactgggagtggaggcccagtggctggggagacattaggtggtggggcccagcccgacctccaggttcttccttctccctagctgttgctttggtctggccactcccagcccccttgtccccttggaagcttgccctgccctcatcttgcccatgccttctactgccaggagacttgcacccatttcaaccctagggcgggggcaagtggggcaaggatggaccagcagaaggggggtaaggctctgttcacttccccctgcctccacagaacgaagccacggattccgttatcttcctccagttttgttccttctccagcctcagttccaccaggtgtcaggactgcatgggggcctggggcaggcagaggagtcaggccagggtccctgacggagcagcactcagcatgtgagtgaggccacagaaaaactctgccccactgcttcttacctcacgggggtggctttcagggattctttagcgcagcagattaaaatcttgccacagtcgagaaattgacaacaagcttccatgctgtacatggttctctttttctctcttttatttttaaaaagaaaacccagaaagatgtaccagatttgtgtaaatgagggtatgccagaaggtggccagttttgctttatgatcttatgaaggaagatttgtgaccctacgtatatatatacacacacatacatatatatatatatcccgaaccaacaacgggactttgtttatattgcaaataaatattattttttctttaaaa

SEQ ID NO: 128269 - DNA, 3059 bp, Homo sapiens
  Payload ID: 5118
  Gene Symbol: DUSP7
  Gene Name: dual specificity phosphatase 7
  ENST ID: ENST00000469623
  CDS Start-End: 1-828
ggcggcgcgtccttgctgctgctcgactgccggccgcacgagctcttcgagtcgtcgcacatcgagacggccatcaacctggccatcccgggcctcatgttgcgccgcctgcgcaagggcaacctgcccatccgctccatcatccccaaccacgccgacaaggagcgcttcgccacgcgctgcaaggcggccaccgtgctgctctacgacgaggccacggccgagtggcagcccgagcccggcgctcccgcctccgtgctcggcctgctcctacagaagctgcgcgacgacggctgccaggcctactacctccaaggtggtttcaacaagtttcaaacagagtactctgagcactgcgagaccaacgtggacagctcttcctcgccgagcagctcgccacccacctcagtgctgggcctggggggcctgcgcatcagctctgactgctccgacggcgagtcggaccgagagctgcccagcagtgccaccgagtcagacggcagccctgtgccatccagccaaccagccttccctgtccagatcctgccctacctctacctcggctgcgccaaggactccaccaacctggacgtgctcggcaagtatggcatcaagtatatcctcaatgtcacacccaacctacccaacgccttcgagcacggcggcgagttcacctacaagcagatccccatctctgaccactggagccagaacctctcccagttcttccctgaggccatcagcttcattggtaggtgctgtgtgctgggcaggggggtgtgggtgcatcaaggtgtatgcaggactctgggtggcgcccccgcctgactgggtacctctgggcctgttgagacctgtgtgtgccctacgtgtgccagcgtgtgcccgtgggtgtacccaggcctactgtgagtcaccgagtcccttgggcccctctacctgttggggcctgagcagtctcctgagtcctgagctccccctagctgacagcacgtcatgggctctctgctgtccagcttgtgttttcctggcttagatgttgtttcgggcttagcaagctgaaacatcacagcgcacagacctcccacgggtctcacttgctccgcatcacgcctcagcacacgtgtctctccaggatggggttgtcatagtgcctctttgggctttaatgtggacctaagagggctgaaaggtagccctggagccagaggcacaccccaaacaggcagctattgaaatgtggtgactgctagctcagtcagcctccagatgctctctgcagcctgtagggcttgcttggagtgtagggaggagtgcaagagaaggtgggggagtggagaaaggccttccccagagcagtgtgtcctgctgtctggcttagtgcccttcgagtccctgtatccccagcctcagcagactcgggtccccactgctttctccttggccagctggaggctgagaccacaggtcatctcccctggcccagggtgcaaggaaggggcacgagggctcaggatgaatgtaaacgctctatctctgagcctggtgacccaatgtttctgcccagcctccagtggcaaggtgtgggggtggcccgggctgtcttttcccgatggtggctgtgtccagtggagggcgttttggtgtcggctgggctgggctagctttaacaacaggaagtgggaggcttccccgcctcatccgcttactgggaaccaaaagtaggtgcctggctgggaggaaggaaggaagctgaggcctgggggaggggctgcaactggggctgcctggagcttctcagccctgcccaccaccccctgggtcaagagggctaggggtgctgcctcagcatttgaactcccccaacgagggaggggaatagagagagggaagcaggcttcgccaggctgggcctggctagtgggtacctttatccttcctgaaagctcctccccgtctgggtagggggacctttttcctcatttgacaagtgaaggaattgaggcccaggcatcccttaggagtcagtgggacaggatcagtcaccagctacaccctgaaaaggccaaaaataaagccagcagaaacagactgtctttggatcacctggaggtgggtttggaggccaggcgttcctcacatcctggtgtcaccactggaggctggtcccagcacccccttttcccacccccaatctcgaggtctgaccacacagctcctcatgaagctgcaatgtctgtctccttgccagatgatcctgccccagtgccttagccatggggccccctgtcagtccctgagtctggaggaagcacctactgtatgctttactccttggttgggaggggatgggagaggaagctctgtcaggacaaaggcaacgaagaacagtgggtgaacccgtatgtcatcttgtaggaaggcattgattgcgtgctagctgtgtgcctggctcctggagggttcagagtcagggtggtggggacatcaaggaccccatggctgcctcttgtgaatctatgtccctggcacagctgtggcacacagagaggcagctgccccggggtccaggagagattacaggactgagttgttcagtagctcggccagtatttattgagcttctatgtgtcagacagaggagtctgagggtggcactgggggaagctgggagggttggaggggaaaggggacaggaaggttggccccatccagtcagctgtggtaggagatatcactgacacatgggcctcctgaggaaggtctagcaagtggcaggggtggggcccatttaagcacacctcacttatgaagccccatcacaagtgatagtgtggccatcatcccagtccatgtgtcttaggagctggagttaaggccttggggactagctgggcagatggcagagcgaaatgcagggccaggccacctacttccttccagaggagcctccctcaggccactttcctagaagactctcagggacaacccatgggagcggctccaagagaaccagcccagcccccagtcccaggtcatggcctggcagcagcgggcgc

SEQ ID NO: 128270 - DNA, 4455 bp, Homo sapiens
  Payload ID: 5119
  Gene Symbol: DUSP8
  Gene Name: dual specificity phosphatase 8
  Uniprot ID: Q13202
  ENST ID: ENST00000331588
  CDS Start-End: 111-1988
aggtccagcaccatgtgctaggtcactcccagcgcgaggccacacctgggccgtcggagcagcccctcctcacttcaggggtcaccctccccagcacccattgccccaccatggctggggaccggctcccgaggaaggtgatggatgccaagaagctggccagcctgctgcggggcgggcctggggggccgctggtcatcgacagccgctccttcgtggagtacaacagctggcatgtgctcagctccgtcaacatctgctgctccaagctggtgaagcggcggctgcagcagggcaaggtgaccattgcggagctcatccagccggctgcacgcagccaggtggaggctacggagccacaggacgtggtggtctatgaccagagcacgcgggacgccagcgtgctggccgcagacagcttcctctccatcctgctgagcaagctggacggctgcttcgacagcgtggccatcctcactgggggcttcgccaccttctcctcctgcttccccggcctctgcgagggcaagcctgctgccctgctacccatgagcctctcccagccctgcctgcctgtgcccagcgtgggcctgacccgcatcctgcctcacctctacctgggctcgcagaaggacgtcctaaacaaggatctgatgacgcaaaatggaataagctacgtcctcaacgccagcaactcctgccccaagcctgacttcatctgcgagagccgcttcatgcgggtccccatcaacgacaactactgtgaaaaactgctgccctggctggacaagtccatcgagttcatcgataaagccaagctctccagctgccaagtcatcgtccactgtctggctggcatctcccgctctgccaccatcgccatcgcctacatcatgaagaccatgggcatgtcctccgacgacgcctacaggttcgtgaaggacaggcgcccgtccatctcgcccaacttcaacttcctgggccagctgctggagtacgagcgcagcctgaagctgctggccgccctgcagggcgacccgggcaccccctcagggacgccggagcctccgcccagtcctgccgccggggccccgctgccacggctgccaccacctacctcagagagcgctgccacagggaatgcggctgccagggagggcggcctgagcgcgggcggggagccccccgcgccccccacgcccccggcgaccagcgcactgcagcagggcctgcgcggcctgcacctctcctcggaccgcctgcaggacactaaccgcctcaagcgctccttctccctggacatcaagtctgcctacgcccctagcaggcggcccgacggccccgggccccccgaccccggcgaggccccgaagctctgcaagctggacagcccgtcgggggccgcgctgggcctgtcctcgcccagcccggacagcccggacgccgcgcctgaggcgcgcccacggccccgccggcggccccggccccccgccggctcccccgcgcgctcccccgcgcacagcctcggcctgaacttcggcgatgcggcccggcagactccgcggcacggcctctcggccctgtcggcgcccgggctgcccggccctggccagccggccggccccggggcctgggcaccgccgctcgactccccaggcacgccgtcgcccgacgggccctggtgcttcagccccgagggcgcacagggggcgggcggggtgctgtttgcgcccttcggccgggcgggcgccccgggaccaggcggcggcagcgacctgcggcggcgggaggcagcgagggctgagccccgggacgcgcggaccggctggcccgaggagccggccccggagacgcagttcaagcgccgcagctgccagatggagttcgaggagggcatggtggaggggcgcgcgcgcggcgaggagctggccgccctgggcaagcaggcgagcttctcgggcagcgtggaggtcatcgaggtgtcctgacccctccgctgccctcggccccgccgcccgcagccaggcccgttataaatgtatattatatataatgcaaagaaaggtaaatggttttactgggatttttatcgagaagtaaatatttcgattttttatttatttaagctgttcattctggcaatgatttggcaacagtgcgggtggtcctcgagctctatttttactgtctggtatttaaactgaaacatacgtttctaagcaatacgaggccaccttcagtcgcaagctgggtgccaggcctggggcccctcccagttcccccgccccaggaaacactgctgacctttgcaaaggctgccgagctttcgtgcactttttacataacaaaaaggtgaaaaaaaggaaaaaaaaacttctttgccacaaactgagccgcagaaccccccttctccccccacccacctcccctgctccctcccttctctgcgccggcctagggctctgcaccaaagccataggatggaggagcaggagctggtgtgccccggagaggtgcggccagccctccatcagctccaggcaccaaatcttggtggcaaggagggcaccccgctgcccgttgccccagagctgttctctggcaggggaggacaggcattgggcttcatggtgccagggtgttcagaggggctgagaaatagaacagtgtgtgtaggggcttcgggcagggggttctggaacgtcagatgaggtgcagcccaggggaggacagaggtgttagtgcccccaactcctgccagagccccagtccagccacagagtggctcagaaaggccattcctagagggctgcggccctcccttctcccttgcccatgcccccagagctgcctgccgggcagggtggcaccattgcaggagaggagcttggcctccgggggtcaggcaggaggcgcctggctagccagtgctggctccactgggcaggaagccctggacccccaggtatgaggagggggtggtcttagggttctgttccaggtctgccccgcccccctcccagccatgccccaggcagaacttggaattcaggtgtgcacctgcaggctgaggggctctgtgagcaggtgctgctcacacagggagttcaggcgccagccaagcccctgtgctgctgggataggcctgcttcacttagggagcactgcctcaagacaggtaaagccccctcgtttgcccccacccccatggggccgctcaggagagaaactcccattcacccctttcccagggtgctctctctctaggtggcatgccagcccccaaacacaagtggcttttgggcccaggtgggtcagcctgctgcccctgccccataccccctcgggccattgggacccctgcccttcagatgtcctagggtctaggagtggggccagtcactgtgggaagaggccaggggcttggccggagaggcagcccagggcaggacccagtcctgagtcctggagcagggccagggaggcgcccatcccgccccagccagccgccctctctgctgtttcttctatttgttcttcttttcacccacagctctgtgttcctgtcatccctcctttcagcaaaagtcctgttcccgttccctctgtccccacccactcctgttcccccaagaaaataagctatcgttgtatttgcaatctatggattagaggtttaagtatttattattattggttaattattattaattatgtaaatttgcctcccatatgtctgttgcgttgggtttctgaggagaccctgggtgaggaggatgcactggcttcccgcttctcgccccccacccctgtgctgtccgggagacagtggtctggggccactggttgggcccccttctcccttcccccttccccttgtcccttctgcaggccgttgaggggggctgtctgtctcagtctgtctctgctcccactcttgaggcactggttaccgcaaagtgagcagccagcaggggggcgaaggtcctgtgttggccactgcctcctccagtgctgcaggaggcgggctgaggccccacctggtggctttcacctgacccagccctgagtcctctccaagcctctctccggcccctcccacctggccactgcctcctccagtgctgcgggaggcgggccagggccccacctggtggctttcacctgacccagccctgagtcctctccaagcctctctccggcccctcccacctggccactgcctggcattgggatcgccccaaaatggacccggcccctcctgttatttgctgggaagtccagcggaggagagggtgcaggtcccccgctgagcctccagtctctgtagactgggctgccggcccttcagccccccttggagcccctcccgccacagccgcaccttctgctcccggcccctccctttgtatttggagacaatgtgttgtaataaagcttaaagtggatgttttc

SEQ ID NO: 128271 - DNA, 4480 bp, Homo sapiens
  Payload ID: 5119
  Gene Symbol: DUSP8
  Gene Name: dual specificity phosphatase 8
  Uniprot ID: Q13202
  ENST ID: ENST00000397374
  CDS Start-End: 129-2006
ccgaggcgagcgcgagcgaggtccagcaccatgtgctaggtcactcccagcgcgaggccacacctgggccgtcggagcagcccctcctcacttcaggggtcaccctccccagcacccattgccccaccatggctggggaccggctcccgaggaaggtgatggatgccaagaagctggccagcctgctgcggggcgggcctggggggccgctggtcatcgacagccgctccttcgtggagtacaacagctggcatgtgctcagctccgtcaacatctgctgctccaagctggtgaagcggcggctgcagcagggcaaggtgaccattgcggagctcatccagccggctgcacgcagccaggtggaggctacggagccacaggacgtggtggtctatgaccagagcacgcgggacgccagcgtgctggccgcagacagcttcctctccatcctgctgagcaagctggacggctgcttcgacagcgtggccatcctcactgggggcttcgccaccttctcctcctgcttccccggcctctgcgagggcaagcctgctgccctgctacccatgagcctctcccagccctgcctgcctgtgcccagcgtgggcctgacccgcatcctgcctcacctctacctgggctcgcagaaggacgtcctaaacaaggatctgatgacgcaaaatggaataagctacgtcctcaacgccagcaactcctgccccaagcctgacttcatctgcgagagccgcttcatgcgggtccccatcaacgacaactactgtgaaaaactgctgccctggctggacaagtccatcgagttcatcgataaagccaagctctccagctgccaagtcatcgtccactgtctggctggcatctcccgctctgccaccatcgccatcgcctacatcatgaagaccatgggcatgtcctccgacgacgcctacaggttcgtgaaggacaggcgcccgtccatctcgcccaacttcaacttcctgggccagctgctggagtacgagcgcagcctgaagctgctggccgccctgcagggcgacccgggcaccccctcagggacgccggagcctccgcccagtcctgccgccggggccccgctgccacggctgccaccacctacctcagagagcgctgccacagggaatgcggctgccagggagggcggcctgagcgcgggcggggagccccccgcgccccccacgcccccggcgaccagcgcactgcagcagggcctgcgcggcctgcacctctcctcggaccgcctgcaggacactaaccgcctcaagcgctccttctccctggacatcaagtctgcctacgcccctagcaggcggcccgacggccccgggccccccgaccccggcgaggccccgaagctctgcaagctggacagcccgtcgggggccgcgctgggcctgtcctcgcccagcccggacagcccggacgccgcgcctgaggcgcgcccacggccccgccggcggccccggccccccgccggctcccccgcgcgctcccccgcgcacagcctcggcctgaacttcggcgatgcggcccggcagactccgcggcacggcctctcggccctgtcggcgcccgggctgcccggccctggccagccggccggccccggggcctgggcaccgccgctcgactccccaggcacgccgtcgcccgacgggccctggtgcttcagccccgagggcgcacagggggcgggcggggtgctgtttgcgcccttcggccgggcgggcgccccgggaccaggcggcggcagcgacctgcggcggcgggaggcagcgagggctgagccccgggacgcgcggaccggctggcccgaggagccggccccggagacgcagttcaagcgccgcagctgccagatggagttcgaggagggcatggtggaggggcgcgcgcgcggcgaggagctggccgccctgggcaagcaggcgagcttctcgggcagcgtggaggtcatcgaggtgtcctgacccctccgctgccctcggccccgccgcccgcagccaggcccgttataaatgtatattatatataatgcaaagaaaggtaaatggttttactgggatttttatcgagaagtaaatatttcgattttttatttatttaagctgttcattctggcaatgatttggcaacagtgcgggtggtcctcgagctctatttttactgtctggtatttaaactgaaacatacgtttctaagcaatacgaggccaccttcagtcgcaagctgggtgccaggcctggggcccctcccagttcccccgccccaggaaacactgctgacctttgcaaaggctgccgagctttcgtgcactttttacataacaaaaaggtgaaaaaaaggaaaaaaaaacttctttgccacaaactgagccgcagaaccccccttctccccccacccacctcccctgctccctcccttctctgcgccggcctagggctctgcaccaaagccataggatggaggagcaggagctggtgtgccccggagaggtgcggccagccctccatcagctccaggcaccaaatcttggtggcaaggagggcaccccgctgcccgttgccccagagctgttctctggcaggggaggacaggcattgggcttcatggtgccagggtgttcagaggggctgagaaatagaacagtgtgtgtaggggcttcgggcagggggttctggaacgtcagatgaggtgcagcccaggggaggacagaggtgttagtgcccccaactcctgccagagccccagtccagccacagagtggctcagaaaggccattcctagagggctgcggccctcccttctcccttgcccatgcccccagagctgcctgccgggcagggtggcaccattgcaggagaggagcttggcctccgggggtcaggcaggaggcgcctggctagccagtgctggctccactgggcaggaagccctggacccccaggtatgaggagggggtggtcttagggttctgttccaggtctgccccgcccccctcccagccatgccccaggcagaacttggaattcaggtgtgcacctgcaggctgaggggctctgtgagcaggtgctgctcacacagggagttcaggcgccagccaagcccctgtgctgctgggataggcctgcttcacttagggagcactgcctcaagacaggtaaagccccctcgtttgcccccacccccatggggccgctcaggagagaaactcccattcacccctttcccagggtgctctctctctaggtggcatgccagcccccaaacacaagtggcttttgggcccaggtgggtcagcctgctgcccctgccccataccccctcgggccattgggacccctgcccttcagatgtcctagggtctaggagtggggccagtcactgtgggaagaggccaggggcttggccggagaggcagcccagggcaggacccagtcctgagtcctggagcagggccagggaggcgcccatcccgccccagccagccgccctctctgctgtttcttctatttgttcttcttttcacccacagctctgtgttcctgtcatccctcctttcagcaaaagtcctgttcccgttccctctgtccccacccactcctgttcccccaagaaaataagctatcgttgtatttgcaatctatggattagaggtttaagtatttattattattggttaattattattaattatgtaaatttgcctcccatatgtctgttgcgttgggtttctgaggagaccctgggtgaggaggatgcactggcttcccgcttctcgccccccacccctgtgctgtccgggagacagtggtctggggccactggttgggcccccttctcccttcccccttccccttgtcccttctgcaggccgttgaggggggctgtctgtctcagtctgtctctgctcccactcttgaggcactggttaccgcaaagtgagcagccagcaggggggcgaaggtcctgtgttggccactgcctcctccagtgctgcaggaggcgggctgaggccccacctggtggctttcacctgacccagccctgagtcctctccaagcctctctccggcccctcccacctggccactgcctcctccagtgctgcgggaggcgggccagggccccacctggtggctttcacctgacccagccctgagtcctctccaagcctctctccggcccctcccacctggccactgcctggcattgggatcgccccaaaatggacccggcccctcctgttatttgctgggaagtccagcggaggagagggtgcaggtcccccgctgagcctccagtctctgtagactgggctgccggcccttcagccccccttggagcccctcccgccacagccgcaccttctgctcccggcccctccctttgtatttggagacaatgtgttgtaataaagcttaaagtggatgttttccccacga

SEQ ID NO: 128272 - DNA, 4455 bp, Homo sapiens; identical to SEQ ID NO: 128270
  Payload ID: 5119
  Gene Symbol: DUSP8
  Gene Name: dual specificity phosphatase 8
  Uniprot ID: Q13202
  ENST ID: ENST00000610856
  CDS Start-End: 111-1988

SEQ ID NO: 128273 - DNA, 4455 bp, Homo sapiens
  Payload ID: 5119
  Gene Symbol: DUSP8
  Gene Name: dual specificity phosphatase 8
  Uniprot ID: Q13202
  ENST ID: ENST00000617829
  CDS Start-End: 111-1988
aggtccagcaccatgtgctaggtcactcccagcgcgaggccacacctgggccgtcggagcagcccctcctcacttcaggggtcaccctccccagcacccattgccccaccatggctggggaccggctcccgaggaaggtgatggatgccaagaagctggccagcctgctgcggggcgggcctggggggccgctggtcatcgacagccgctccttcgtggagtacaacagctggcatgtgctcagctccgtcaacatctgctgctccaagctggtgaagcggcggctgcagcagggcaaggtgaccattgcggagctcatccagccggctgcacgcagccaggtggaggctacggagccacaggacgtggtggtctatgaccagagcacgcgggacgccagcgtgctggccgcagacagcttcctctccatcctgctgagcaagctggacggctgcttcgacagcgtggccatcctcactgggggcttcgccaccttctcctcctgcttccccggcctctgcgagggcaagcctgctgccctgctacccatgagcctctcccagccctgcctgcctgtgcccagcgtgggcctgacccgcatcctgcctcacctctacctgggctcgcagaaggacgtcctaaacaaggatctgatgacgcaaaatggaataagctacgtcctcaacgccagcaactcctgccccaagcctgacttcatctgcgagagccgcttcatgcgggtccccatcaacgacaactactgtgaaaaactgctgccctggctggacaagtccatcgagttcatcgataaagccaagctctccagctgccaagtcatcgtccactgtctggctggcatctcccgctctgccaccatcgccatcgcctacatcatgaagaccatgggcatgtcctccgacgacgcctacaggttcgtgaaggacaggcgcccgtccatctcgcccaacttcaacttcctgggccagctgctggagtacgagcgcagcctgaagctgctggccgccctgcagggcgacccgggcaccccctcagggacgccggagcctccgcccagtcctgccgccggggccccgctgccacggctgccaccacctacctcagagagcgctgccacagggaatgcggctgccagggagggcggcctgagcgcgggcggggagccccccgcgccccccacgcccccggcgaccagcgcactgcagcagggcctgcgcggcctgcacctctcctcggaccgcctgcaggacactaaccgcctcaagcgctccttctccctggacatcaagtctgcctacgcccctagcaggcggcccgacggccccgggccccccgaccccggcgaggccccgaagctctgcaagctggacagcccgtcgggggccgcgctgggcctgtcctcgcccagcccggacagcccggacgccgcgcctgaggcgcgcccacggccccgccggcggccccggccccccgccggctcccccgcgcgctcccccgcgcacagcctcggcctgaacttcggcgatgcggcccggcagactccgcggcacggcctctcggccctgtcggcgcccgggctgcccggccctggccagccggccggccccggggcctgggcaccgccgctcgactccccaggcacgccgtcgcccgacgggccctggtgcttcagccccgagggcgcacagggggcgggcggggtgctgtttgcgcccttcggccgggcgggcgccccgggaccaggcggcggcagcgacctgcggcggcgggaggcagcgagggctgagccccgggacgcgcggaccggctggcccgaggagccggccccggagacgcagttcaagcgccgcagctgccagatggagttcgaggagggcatggtggaggggcgcgcgcgcggcgaggagctggccgccctgggcaagcaggcgagcttctcgggcagcgtggaggtcatcgaggtgtcctgacccctccgctgccctcggccccgccgcccgcagccaggcccgttataaatgtatattatatataatgcaaagaaaggtaaatggttttactgggatttttatcgagaagtaaatatttcgattttttatttatttaagctgttcattctggcaatgatttggcaacagtgcgggtggtcctcgagctctatttttactgtctggtatttaaactgaaacatacgtttctaagcaatacgaggccaccttcagtcgcaagctgggtgccaggcctggggcccctcccagttcccccgccccaggaaacactgctgacctttgcaaaggctgccgagctttcgtgcactttttacataacaaaaaggtgaaaaaaaggaaaaaaaaacttctttgccacaaactgagccgcagaaccccccttctccccccacccacctcccctgctccctcccttctctgcgccggcctagggctctgcaccaaagccataggatggaggagcaggagctggtgtgccccggagaggtgcggccagccctccatcagctccaggcaccaaatcttggtggcaaggagggcaccccgctgcccgttgccccagagctgttctctggcaggggaggacaggcattgggcttcatggtgccagggtgttcagaggggctgagaaatagaacagtgtgtgtaggggcttcgggcagggggttctggaacgtcagatgaggtgcagcccaggggaggacagaggtgttagtgcccccaactcctgccagagccccagtccagccacagagtggctcagaaaggccattcctagagggctgcggccctcccttctcccttgcccatgcccccagagctgcctgccgggcagggtggcaccattgcaggagaggagcttggcctccgggggtcaggcaggaggcgcctggctagccagtgctggctccactgggcaggaagccctggacccccaggtatgaggagggggtggtcttagggttctgttccaggtctgccccgcccccctcccagccatgccccaggcagaacttggaattcaggtgtgcacctgcaggctgaggggctctgtgagcaggtgctgctcacacagggagttcaggcgccagccaagcccctgtgctgctgggataggcctgcttcacttagggagcactgcctcaagacaggtaaagccccctcgtttgcccccacccccatggggccgctcaggagagaaactcccattcacccctttcccagggtgctctctctctaggtggcatgccagcccccaaacacaagtggcttttgggcccaggtgggtcagcctgctgcccctgccccataccccctcgggccattgggacccctgcccttcagatgtcctagggtctaggagtggggccagtcactgtgggaagaggccaggggcttggccggagaggcagcccagggcaggacccagtcctgagtcctggagcagggccagggaggcgcccatcccgccccggccagccgccctctctgctgtttcttctatttgttcttcttttcacccacagctctgtgttcctgtcatccctcctttcagcaaaagtcctgttcccgttccctctgtccccacccactcctgttcccccaagaaaataagctatcgttgtatttgcaatctatggattagaggtttaagtatttattattattggttaattattattaattatgtaaatttgcctcccatatgtctgttgcgttgggtttctgaggagaccctgggtgaggaggatgcactggcttcccgcttctcgccccccacccctgtgctgtccgggagacagtggtctggggccactggttgggcccccttctcccttcccccttccccttgtcccttctgcaggccgttgaggggggctgtctgtctcagtctgtctctgctcccactcttgaggcactggttaccgcaaagtgagcagccagcaggggggcgaaggtcctgtgttggccactgcctcctccagtgctgcaggaggcgggctgaggccccacctggtggctttcacctgacccagccctgagtcctctccaagcctctctccggcccctcccacctggccactgcctcctccagtgctgcgggaggcgggccagggccccacctggtggctttcacctgacccagccctgagtcctctccaagcctctctccggcccctcccacctggccactgcctggcattgggatcgccccaaaatggacccggcccctcctgttatttgctgggaagtccagcggaggagagggtgcaggtcccccgctgagcctccagtctctgtagactgggctgccggcccttcagccccccttggagcccctcccgccacagccgcaccttctgctcccggcccctccctttgtatttggagacaatgtgttgtaataaagcttaaagtggatgttttc

SEQ ID NO: 128274 - DNA, 4480 bp, Homo sapiens
  Payload ID: 5119
  Gene Symbol: DUSP8
  Gene Name: dual specificity phosphatase 8
  Uniprot ID: Q13202
  ENST ID: ENST00000625578
  CDS Start-End: 129-2006
ccgaggcgagcgcgagcgaggtccagcaccatgtgctaggtcactcccagcgcgaggccacacctgggccgtcggagcagcccctcctcacttcaggggtcaccctccccagcacccattgccccaccatggctggggaccggctcccgaggaaggtgatggatgccaagaagctggccagcctgctgcggggcgggcctggggggccgctggtcatcgacagccgctccttcgtggagtacaacagctggcatgtgctcagctccgtcaacatctgctgctccaagctggtgaagcggcggctgcagcagggcaaggtgaccattgcggagctcatccagccggctgcacgcagccaggtggaggctacggagccacaggacgtggtggtctatgaccagagcacgcgggacgccagcgtgctggccgcagacagcttcctctccatcctgctgagcaagctggacggctgcttcgacagcgtggccatcctcactgggggcttcgccaccttctcctcctgcttccccggcctctgcgagggcaagcctgctgccctgctacccatgagcctctcccagccctgcctgcctgtgcccagcgtgggcctgacccgcatcctgcctcacctctacctgggctcgcagaaggacgtcctaaacaaggatctgatgacgcaaaatggaataagctacgtcctcaacgccagcaactcctgccccaagcctgacttcatctgcgagagccgcttcatgcgggtccccatcaacgacaactactgtgaaaaactgctgccctggctggacaagtccatcgagttcatcgataaagccaagctctccagctgccaagtcatcgtccactgtctggctggcatctcccgctctgccaccatcgccatcgcctacatcatgaagaccatgggcatgtcctccgacgacgcctacaggttcgtgaaggacaggcgcccgtccatctcgcccaacttcaacttcctgggccagctgctggagtacgagcgcagcctgaagctgctggccgccctgcagggcgacccgggcaccccctcagggacgccggagcctccgcccagtcctgccgccggggccccgctgccacggctgccaccacctacctcagagagcgctgccacagggaatgcggctgccagggagggcggcctgagcgcgggcggggagccccccgcgccccccacgcccccggcgaccagcgcactgcagcagggcctgcgcggcctgcacctctcctcggaccgcctgcaggacactaaccgcctcaagcgctccttctccctggacatcaagtctgcctacgcccctagcaggcggcccgacggccccgggccccccgaccccggcgaggccccgaagctctgcaagctggacagcccgtcgggggccgcgctgggcctgtcctcgcccagcccggacagcccggacgccgcgcctgaggcgcgcccacggccccgccggcggccccggccccccgccggctcccccgcgcgctcccccgcgcacagcctcggcctgaacttcggcgatgcggcccggcagactccgcggcacggcctctcggccctgtcggcgcccgggctgcccggccctggccagccggccggccccggggcctgggcaccgccgctcgactccccaggcacgccgtcgcccgacgggccctggtgcttcagccccgagggcgcacagggggcgggcggggtgctgtttgcgcccttcggccgggcgggcgccccgggaccaggcggcggcagcgacctgcggcggcgggaggcagcgagggctgagccccgggacgcgcggaccggctggcccgaggagccggccccggagacgcagttcaagcgccgcagctgccagatggagttcgaggagggcatggtggaggggcgcgcgcgcggcgaggagctggccgccctgggcaagcaggcgagcttctcgggcagcgtggaggtcatcgaggtgtcctgacccctccgctgccctcggccccgccgcccgcagccaggcccgttataaatgtatattatatataatgcaaagaaaggtaaatggttttactgggatttttatcgagaagtaaatatttcgattttttatttatttaagctgttcattctggcaatgatttggcaacagtgcgggtggtcctcgagctctatttttactgtctggtatttaaactgaaacatacgtttctaagcaatacgaggccaccttcagtcgcaagctgggtgccaggcctggggcccctcccagttcccccgccccaggaaacactgctgacctttgcaaaggctgccgagctttcgtgcactttttacataacaaaaaggtgaaaaaaaggaaaaaaaaacttctttgccacaaactgagccgcagaaccccccttctccccccacccacctcccctgctccctcccttctctgcgccggcctagggctctgcaccaaagccataggatggaggagcaggagctggtgtgccccggagaggtgcggccagccctccatcagctccaggcaccaaatcttggtggcaaggagggcaccccgctgcccgttgccccagagctgttctctggcaggggaggacaggcattgggcttcatggtgccagggtgttcagaggggctgagaaatagaacagtgtgtgtaggggcttcgggcagggggttctggaacgtcagatgaggtgcagcccaggggaggacagaggtgttagtgcccccaactcctgccagagccccagtccagccacagagtggctcagaaaggccattcctagagggctgcggccctcccttctcccttgcccatgcccccagagctgcctgccgggcagggtggcaccattgcaggagaggagcttggcctccgggggtcaggcaggaggcgcctggctagccagtgctggctccactgggcaggaagccctggacccccaggtatgaggagggggtggtcttagggttctgttccaggtctgccccgcccccctcccagccatgccccaggcagaacttggaattcaggtgtgcacctgcaggctgaggggctctgtgagcaggtgctgctcacacagggagttcaggcgccagccaagcccctgtgctgctgggataggcctgcttcacttagggagcactgcctcaagacaggtaaagccccctcgtttgcccccacccccatggggccgctcaggagagaaactcccattcacccctttcccagggtgctctctctctaggtggcatgccagcccccaaacacaagtggcttttgggcccaggtgggtcagcctgctgcccctgccccataccccctcgggccattgggacccctgcccttcagatgtcctagggtctaggagtggggccagtcactgtgggaagaggccaggggcttggccggagaggcagcccagggcaggacccagtcctgagtcctggagcagggccagggaggcgcccatcccgccccggccagccgccctctctgctgtttcttctatttgttcttcttttcacccacagctctgtgttcctgtcatccctcctttcagcaaaagtcctgttcccgttccctctgtccccacccactcctgttcccccaagaaaataagctatcgttgtatttgcaatctatggattagaggtttaagtatttattattattggttaattattattaattatgtaaatttgcctcccatatgtctgttgcgttgggtttctgaggagaccctgggtgaggaggatgcactggcttcccgcttctcgccccccacccctgtgctgtccgggagacagtggtctggggccactggttgggcccccttctcccttcccccttccccttgtcccttctgcaggccgttgaggggggctgtctgtctcagtctgtctctgctcccactcttgaggcactggttaccgcaaagtgagcagccagcaggggggcgaaggtcctgtgttggccactgcctcctccagtgctgcaggaggcgggctgaggccccacctggtggctttcacctgacccagccctgagtcctctccaagcctctctccggcccctcccacctggccactgcctcctccagtgctgcgggaggcgggccagggccccacctggtggctttcacctgacccagccctgagtcctctccaagcctctctccggcccctcccacctggccactgcctggcattgggatcgccccaaaatggacccggcccctcctgttatttgctgggaagtccagcggaggagagggtgcaggtcccccgctgagcctccagtctctgtagactgggctgccggcccttcagccccccttggagcccctcccgccacagccgcaccttctgctcccggcccctccctttgtatttggagacaatgtgttgtaataaagcttaaagtggatgttttccccacga

SEQ ID NO: 128275 - DNA, 4480 bp, Homo sapiens; identical to SEQ ID NO: 128271
  Payload ID: 5119
  Gene Symbol: DUSP8
  Gene Name: dual specificity phosphatase 8
  Uniprot ID: Q13202
  ENST ID: ENST00000629053
  CDS Start-End: 129-2006

SEQ ID NO: 128276 - DNA, 2433 bp, Homo sapiens
  Payload ID: 5120
  Gene Symbol: DUSP9
  Gene Name: dual specificity phosphatase 9
  Uniprot ID: Q99956
  ENST ID: ENST00000342782
  CDS Start-End: 266-1420
agtttccaaggtggaagctgggtccggctgccaggaagcggccggtgcgcgggctgcgcgggctgcgcggggctcggcttccacgtgcgagcctgcaccgccgccccgccctctcctggcggccaggcctggggactctctgccgcgggacggcgcctcgcgttccgccgtggcagtggccgtggccagaacgtccacgcgcggtcgtccaccgccggatctcgctccagcgcccgtggtccagcgtgtagggagccgatcgcccatggagggtctgggccgctcgtgcctgtggctgcgtcgggagctgtcgcccccgcggccgcggctcctgctcctggactgccgcagccgcgagctgtacgagtcggcgcgcatcggtggggcgctgagcgtggccctgccggcgctcctgctgcgccgcctgcggaggggcagcctgtcggtgcgcgcgctcctgcctgggccgccgctgcagccgcccccgcctgcccccgtgctcctgtacgaccagggcgggggccggcgccggcgcggggaggccgaggccgaggccgaggagtgggaggccgagtcggtgctgggcaccctgctgcagaagctgcgagaggaaggctacctggcctactacctccagggaggcttcagcagattccaggccgagtgccctcacctgtgtgagaccagccttgctggccgtgccggctccagcatggcgccggtgcccggtccagtgcccgtggtggggttgggcagcctgtgcctgggctccgactgctctgatgcggaatccgaggctgaccgcgactccatgagctgtggcctggattcggagggtgccacacccccaccagtggggctgcgggcatccttccctgtccagatcctgcccaacctctatctgggcagtgcccgggattccgccaatttggagagcctggccaaactgggcatccgctacatcctcaatgtcacccccaacctcccaaacttcttcgagaagaatggtgactttcactacaagcagatccccatctccgaccactggagccagaacctgtcgcggttctttccggaggccattgagttcattgatgaggccttgtcccagaactgcggggtgctcgtccactgcttggcgggggtcagccgttctgtcaccgtcactgtggcctacctcatgcagaagctccacctctctctcaacgatgcctatgacctggtcaagaggaagaagtctaacatctcccccaacttcaacttcatggggcagttgctggactttgagcgcagcttgcggctggaggagcgccactcgcaggagcagggcagtggggggcaggcatctgcggcctccaacccgccctccttcttcaccacccccaccagtgatggcgccttcgagctggcccccacctagggccccgtggccggcaggccggcccctgccccacccccacccacgggtgtccctgcccactcgtgtggcaagggaggggagggcaggagggctcggcctgagcagggtgctggggggagagcgcaatacctcacgcgggctgccgtcctaatcaacgtgcctatggcgggaccacgctcggagcctgcctcttctgcgactgttactttttctttgcgggatgggggtgggggttccctctccaggtggttgtccaggcccaggtcccggccctgggtgctcagccagctcggctaggccctgcgcctccctgcgcttcccccttcaggaagggtgtgtgccacctcgttgcactggatcccagtggctgcttgggggagaggcgtttgccatcactggtgttgtcacctccctgtttctccaccaagggcttgggcctctcggggctggggcctcccaggggatggggacccagagtgcagtggccgcccacatccatggcctaggagctactgggcaggttcccggccacacatctggtgggctgttttgttttttttttttcctcttcccccagatgtcttgacgggatcactggggctctttgtgagtgagggtggccaaactaccgccggaggagatggggtctcagagcgagagctgcggagggggaggggaagaagaaggcctcacttttgctgctgcggggcccacacagccgctgctactttggggggtggggaaggggccaagctgcagacacacacagtcattcatttctgtccacacccctgtgggtggcgggtgtgcgtgtgtgtgcttgtgtgtgcgcacgtgtcggcgctcacacacacatgctagcccactgatgcacccagcccagggctggcagtctttgcagcgtggggccgtctcaccctggagcctggagaggatctatgcttgtttgtttttgtaatccatatcatagttgctttctttaattgttccttctgaataaacagtttatttaa

SEQ ID NO: 128277 - DNA, 2289 bp, Homo sapiens
  Payload ID: 5120
  Gene Symbol: DUSP9
  Gene Name: dual specificity phosphatase 9
  Uniprot ID: Q99956
  ENST ID: ENST00000370167
  CDS Start-End: 114-1268
cgcttcccgccgcccgagcttcggaaacttcccggccgcgacgcagggaaccggcgcggagaaccgagcagagcggagcgcccgtggtccagcgtgtagggagccgatcgcccatggagggtctgggccgctcgtgcctgtggctgcgtcgggagctgtcgcccccgcggccgcggctcctgctcctggactgccgcagccgcgagctgtacgagtcggcgcgcatcggtggggcgctgagcgtggccctgccggcgctcctgctgcgccgcctgcggaggggcagcctgtcggtgcgcgcgctcctgcctgggccgccgctgcagccgcccccgcctgcccccgtgctcctgtacgaccagggcgggggccggcgccggcgcggggaggccgaggccgaggccgaggagtgggaggccgagtcggtgctgggcaccctgctgcagaagctgcgagaggaaggctacctggcctactacctccagggaggcttcagcagattccaggccgagtgccctcacctgtgtgagaccagccttgctggccgtgccggctccagcatggcgccggtgcccggtccagtgcccgtggtggggttgggcagcctgtgcctgggctccgactgctctgatgcggaatccgaggctgaccgcgactccatgagctgtggcctggattcggagggtgccacacccccaccagtggggctgcgggcatccttccctgtccagatcctgcccaacctctatctgggcagtgcccgggattccgccaatttggagagcctggccaaactgggcatccgctacatcctcaatgtcacccccaacctcccaaacttcttcgagaagaatggtgactttcactacaagcagatccccatctccgaccactggagccagaacctgtcgcggttctttccggaggccattgagttcattgatgaggccttgtcccagaactgcggggtgctcgtccactgcttggcgggggtcagccgttctgtcaccgtcactgtggcctacctcatgcagaagctccacctctctctcaacgatgcctatgacctggtcaagaggaagaagtctaacatctcccccaacttcaacttcatggggcagttgctggactttgagcgcagcttgcggctggaggagcgccactcgcaggagcagggcagtggggggcaggcatctgcggcctccaacccgccctccttcttcaccacccccaccagtgatggcgccttcgagctggcccccacctagggccccgtggccggcaggccggcccctgccccacccccacccacgggtgtccctgcccactcgtgtggcaagggaggggagggcaggagggctcggcctgagcagggtgctggggggagagcgcaatacctcacgcgggctgccgtcctaatcaacgtgcctatggcgggaccacgctcggagcctgcctcttctgcgactgttactttttctttgcgggatgggggtgggggttccctctccaggtggttgtccaggcccaggtcccggccctgggtgctcagccagctcggctaggccctgcgcctccctgcgcttcccccttcaggaagggtgtgtgccacctcgttgcactggatcccagtggctgcttgggggagaggcgtttgccatcactggtgttgtcacctccctgtttctccaccaagggcttgggcctctcggggctggggcctcccaggggatggggacccagagtgcagtggccgcccacatccatggcctaggagctactgggcaggttcccggccacacatctggtgggctgttttgttttttttttttcctcttcccccagatgtcttgacgggatcactggggctctttgtgagtgagggtggccaaactaccgccggaggagatggggtctcagagcgagagctgcggagggggaggggaagaagaaggcctcacttttgctgctgcggggcccacacagccgctgctactttggggggtggggaaggggccaagctgcagacacacacagtcattcatttctgtccacacccctgtgggtggcgggtgtgcgtgtgtgtgcttgtgtgtgcgcacgtgtcggcgctcacacacacatgctagcccactgatgcacccagcccagggctggcagtctttgcagcgtggggccgtctcaccctggagcctggagaggatctatgcttgtttgtttttgtaatccatatcatagttgctttctttaattgttccttctgaataaacagtttatttaagatactga

SEQ ID NO: 128278 - DNA, 663 bp, Homo sapiens
  Payload ID: 5121
  Gene Symbol: DUPD1
  Gene Name: dual specificity phosphatase and pro isomerase domain containing 1
  Uniprot ID: Q68J44
  ENST ID: ENST00000338487
  CDS Start-End: 1-663
atgacatctggagaagtgaagacaagcctcaagaatgcctactcatctgccaagaggctgtcgccgaagatggaggaggaaggggaggaggaggactactgcacccctggagcctttgagctggagcggctcttctggaagggcagtccccagtacacccacgtcaacgaggtctggcccaagctctacattggcgatgaggcgacggcgctggaccgctataggctgcagaaggcggggttcacgcacgtgctgaacgcggcccacggccgctggaacgtggacactgggcccgactactaccgcgacatggacatccagtaccacggcgtggaggccgacgacctgcccaccttcgacctcagtgtcttcttctacccggcggcagccttcatcgacagagcgctaagcgacgaccacagtaagatcctggttcactgcgtcatgggccgcagccggtcagccaccctggtcctggcctacctgatgatccacaaggacatgaccctggtggacgccatccagcaagtggccaagaaccgctgcgtcctcccgaaccggggctttttgaagcagctccgggagctggacaagcagctggtgcagcagaggcgacggtcccagcgccaggacggtgaggaggaggatggcagggagctgtag

SEQ ID NO: 128279 - DNA, 663 bp, Homo sapiens; identical to SEQ ID NO: 128278
  Payload ID: 5121
  Gene Symbol: DUPD1
  Gene Name: Dual specificity phosphatase and pro isomerase domain containing 1
  ENST ID: ENST00000625469
  CDS Start-End: 1-663

SEQ ID NO: 128280 - DNA, 8654 bp, Homo sapiens
  Payload ID: 5122
  Gene Symbol: DYRK1A
  Gene Name: dual-specificity tyrosine-(Y)-phosphorylation regulated kinase 1A
  Uniprot ID: Q13627
  ENST ID: ENST00000339659
  CDS Start-End: 1471-3735
aaaaataactcatattgtctctgaggttcttttccagtgaagtgtttagtattgctgctatttggagtacaaagttggagcttttaaagaacctgggagttcaaaagtataaggagaaataaatgaaaagcagaaatattttgaggcaataagtatagactcaaatctatattatgacccacttgtagcaccacttggaattctaccaataagagatttatttgggcaaactataatggttgttggaaattgcaaatcttagtgtgaattattttagtccagttggtttctttctttctcttacctgaaatgaactatactgaggcaataggagctttgtatagtaatttaggagtgtaaaacaacttagggaaaaggattattaagcaggatgattgggatgacatcatgtgaaatttaggaattggaggcattgggaattgagagggtgctaacaaaggaaaacagcttattttagaatttgtctggaggatgtagaattgaagaagttttggtatttcttctgcagcggccccagtgcccttgaccaggaacatctcttggagtcagtagttttcatgaggctgacctaggaacttggccaacatatgcaacattgttctatttaaaatattccttgaattaaattcgatagtatcaatttaaaacataaagttttcactcaactcctttagaagttagattttagcttgtacttgtctttacctcttctgctgattatcagttgacaacactgagattactttcattttcctgtaagtcattatgaatttttctggtcaaccatgagttatcagtggaagcaataagtaggaagtactgtaaaagaattacaataaaataagagaaaccacttggagagcaagagggcttgtggacttgggggagcggttgtgagaaatgtctcagaacttaatttacaaataacattggtagattgacatgttgtctttcctataaagtaactttacctctgtcttaatagtaaactactatgaaagtgaattcgtgttcctcttgatttgtgaactgatgaaaattacaaaatgtggagttttttccccagataaagtaaatggtggaatattcaggtttatttgatacctagaaaatacctgaaattttccgtggtaataggcacattttgaaactgttttttttttctctgacaattgaatatattttatatatagttgattttgattattgaagactaaggaaaatttaagtttgaatgttagaaaatgaattttgcaaatttgaagtaattttattctttatgttttgggattgtagttatgttagatattcctcagttggggtaattgtcttgcatcattatctcttatcataatctgtttttcttcacacagtgttatagttttgccgctggactcttccctcccttcccccaccccatcaggatgatatgagacttgaaagaagacgatgcatacaggaggagagacttcagcatgcaaaccttcatctgttcggcttgcaccgtcattttcattccatgctgctggccttcagatggctggacagatgccccattcacatcagtacagtgaccgtcgccagccaaacataagtgaccaacaggtttctgccttatcatattctgaccagattcagcaacctctaactaaccagaggcggatgccccaaaccttccgtgacccagcaactgctcccctgagaaaactttctgttgacttgatcaaaacatacaagcatattaatgaggtttactatgcaaaaaagaagcgaagacaccaacagggccagggagacgattctagtcataagaaggaacggaaggtttacaatgatggttatgatgatgataactatgattatattgtaaaaaacggagaaaagtggatggatcgttacgaaattgactccttgataggcaaaggttcctttggacaggttgtaaaggcatatgatcgtgtggagcaagaatgggttgccattaaaataataaagaacaagaaggcttttctgaatcaagcacagatagaagtgcgacttcttgagctcatgaacaaacatgacactgaaatgaaatactacatagtgcatttgaaacgccactttatgtttcgaaaccatctctgtttagtttttgaaatgctgtcctacaacctctatgacttgctgagaaacaccaatttccgaggggtctctttgaacctaacacgaaagtttgcgcaacagatgtgcactgcactgcttttccttgcgactccagaacttagtatcattcactgtgatctaaaacctgaaaatatccttctttgtaaccccaaacgcagtgcaatcaagatagttgactttggcagttcttgtcagttggggcagaggatataccagtatattcagagtcgcttttatcggtctccagaggtgctactgggaatgccttatgaccttgccattgatatgtggtccctcgggtgtattttggttgaaatgcacactggagaacctctgttcagtggtgccaatgaggtagatcagatgaataaaatagtggaagttctgggtattccacctgctcatattcttgaccaagcaccaaaagcaagaaagttctttgagaagttgccagatggcacttggaacttaaagaagaccaaagatggaaaacgggagtacaaaccaccaggaacccgtaaacttcataacattcttggagtggaaacaggaggacctggtgggcgacgtgctggggagtcaggtcatacggtcgctgactacttgaagttcaaagacctcattttaaggatgcttgattatgaccccaaaactcgaattcaaccttattatgctctgcagcacagtttcttcaagaaaacagctgatgaaggtacaaatacaagtaatagtgtatctacaagccccgccatggagcagtctcagtcttcgggcaccacctccagtacatcgtcaagctcaggtggctcatcggggacaagcaacagtgggagagcccggtcggatccgacgcaccagcatcggcacagtggtgggcacttcacagctgccgtgcaggccatggactgcgagacacacagtccccaggtgcgtcagcaatttcctgctcctcttggttggtcaggcactgaagctcctacacaggtcactgttgaaactcatcctgttcaagaaacaacctttcatgtagcccctcaacagaatgcattgcatcatcaccatggtaacagttcccatcaccatcaccaccaccaccaccatcaccaccaccatggacaacaagccttgggtaaccggaccaggccaagggtctacaattctccaacgaatagctcctctacccaagattctatggaggttggccacagtcaccactccatgacatccctgtcttcctcaacgacttcttcctcgacatcttcctcctctactggtaaccaaggcaatcaggcctaccagaatcgcccagtggctgctaataccttggactttggacagaatggagctatggacgttaatttgaccgtctactccaatccccgccaagagactggcatagctggacatccaacataccaattttctgctaatacaggtcctgcacattacatgactgaaggacatctgacaatgaggcaaggggctgatagagaagagtcccccatgacaggagtttgtgtgcaacagagtcctgtagctagctcgtgactacattgaaacttgagtttgtttcttgtgtgtttttatagaagtggtgttttttttccaaaaacaaagtgcaaagctgcttgaatcaggaggagattaacacactgaaccgctacaagagggcaaagctgattttttttttaacttgaaaagattgcaaagggacattgaagtgtttaaaagagccatgtccaaacccatcttcatggatagctcagaggtatcctctttttgctcccccattttaacttgccacatcccagtcacagtggggtttttttgtctttctattcagcaaaagttaatattcagatgttggtcttggtcatttgccaactaattttaaagtaaaaggcactgcacataatttgcataaagggccccatgagggtgttttttttttttctttttgtcccccccatccccctttttttttgttttgttctgttttgttttgggtgggagggtgggaaatttgggtttttaagtcctctaaacacacttgggcacggaaatgcagtactgtaaggaagagggacctccagcttccacaaacaccatcttcagctgtatgaaagggacggttgtggtgaagtttgtcaggcacagtaagcatgctgagtggcggggatcagaactctcctatctgaacctactgaggagcaaagcagcaattacatgggatcctgtggctctcccgttgcagaggccacaggaagataggatggaacgtgactggtctcctaaccaaggtgcactgagaagcaatcaacgggtcggtcgtggccagtcctggggaggtctgagtggtggtctttgggataacctttggccttatggatttggactcgaaattagaagagcctaccatttcagatgcaatcacttttggacatgcttttgcagacagtccttaatgctgaaaacacagagaatgggtaattcaagaggcctttcttttaaaatagacttttgtgacccactaattgtaaggtattgcaaggtcactttgcgtgtgtcataaagttgacttccttattggttgaaggtcacagaagtagtggtttgctttgatggaaatagctacagctgtgtcccttcctgctttttactttttcttttgctttttctcggcacgtggtatctccaccatttcttctgcacaaagatgtcttctgttcatcctgaacatttttaaaaaatgcagaattttatgtgactgcttttttgcctcacaattatgctgtgaattttacaaaaatttattttcttttttgataatttattgtaccaaagctgtttttatagcacatagatgtctgtaaccaataatgtagcagttctgcactttgacacaaggtgtaactagaccatttttaaatgtcagttgaaaattatggctgtactattgcttaaacaaaactggaactgttgttgaatccatagccaatacatttacagcaatctgtgtactgaacatagtagattgacatctaattcaagattacaacatctgttacattctaagtgtgttcaggcttctgaaggtaaagggacactggatccagaagctatggaaccagcagttgattcttgtattcctgattaacctacttgtaaacttgaaagcaagaccttgattgcaccaacaggtccagagtatgagtgcaagcaaagcagaactctcatgcgtgacctgagcagacaggctggtatttaacaggtgcctcgtgttgagattacgctgccttaatgtaacacagtctggcagttgctaaatttgtgttcccattttaaattgaccaattttggggtgtgacacttttgagcggttgaattgggagaatgaagataagtaatttacctgtccaggatcaaaagaagcctagaaaagaagcagtaatctacctctgccgataacctgtttaagatgactcagcagaacaccgcgtttcattctattggtcaattccatgtggctgactaggtcaattttttttctgaacaaaagcaggtttttatatgtaaacagtgagaaaagaaaggctaaacactatgtaaatgtgaatggaaacttggaaatactcgtttttataaactacaaaaactttttgttgtttatcaggaaatccatatttattttgtaattaactgtcaagcctgtggatgatttttttgaacttggtagttcataaaggtttacagtgaataaaaggatatcatcttgagtatagcaatatcaaaaggaattcagtagttactgctgtttaggaatataaggttaagatatcatatgggtcaggtcattttttttttctgtgctggttgccacatcttagcaagcaccaaaaaactaaagcagtttttaaaccgatatttacgtaaagaaaatcataaaatccaatgcttctgcatactgtgttatgttacagtccagttttgtgtgctttactacacagtttggttacaggacttctgtgcattgtaaacataaacagcatggaaaaggttaaatacctgtgttcagattgtaagatctagtccggacttgctgtgtatattgtaacgttaaatgaaaaaagaacccccctttgtattatagtcatgcggtcttatgtatgataaacagttgaataatttgtcctcagactctttactatgcttttttaaaaattaatttaagaaaaatgtaaacatagtaaaaatcttcctatgcaattaaactggtccaggtctggtaggtatagtatcaaagttgagttaaatgtgtaaaaaggaaactatttgagatacattgacataggcatcagcaatctctgaaagtaaaaattggaggtttaacagatcattttgatttttcacattgatttttttatttgaatgtttacataattttgtgattcaaaatgctcatattttagttggtagcatttcgactggatgtgagggtctgatggttttctctgatatgctttgacgtgcttggatgaaggaaggaatacgaatactcattcttccttccctaactcctcgtacggggccatatcagaattctagaattcttgccactgtgattcaattgctaacctaaagtcttctctttttacaaattcacctgcttcagtatatattaaggtggctttcgagaggcaagatgcttatttaaaagttaagcgtgaatctgtaaaattaaggttggttgcgtaaagttgaagttaaccacatgtaagaaaggaaaacttccattagttttcttcttagggtgtgagaattttacctaggcacatggatattgggctgaaaaaaaaaaaccgacatttttatttaaaactacatgtaaaaaatcatgaaagattcagtaattatgttaggctcacaagtgaccattgagtttgcccctgtactgcttcccagcttttgtggtgttgaacttttctgttcttccaatagggagatacataatcaaaatacacacgaagacgagatagcaggcactcagttctaggccagtttctcagtttcctttgggcctgcctttattttgatagtcgcagaatgcaggttcagatgcgatccggtgcattctgggtggtatccccatagacagaatacaagttcaagactcatttttatgtccatttttatagtggtagactgtatgtaatagaccagatggttcattccaaatacatgacttggtcttactgctatatatgaaggaagtttgaaaatgtaatggggacaaaagccgtgcgtgacttcggtatacccagacttcattcagatttcttaaaaatctgctagggatgtctgttgaccagacgttggaaaacctttggtgtcagggagagtagaggagaagttctgattttcataaccctggtttcttatctaggcctgtttccttgcgtgaaaacatacatcaccaagtaatttgtagtacaaagaacaagagaagaaaccctaagaagatagcttatttgttatcctcccttttaatgactaaccttaatccaaatgaatccactgagaaccagcctgtggatgcctactgggctttcaccctggaccaggaatttttgacgtatgcctgtgttgaaggcactggatgcttgttttgtggaagacatgttcattgaggtaagtggctcatcgcttggtgtgtttggctctctttggcattatgcatagccaaggtcccagattttggctgctctcagtgggtgttcttgcatcagaactttaaaaaaaataacactaccttaacactgagactgtcaggtatttgtcagtatttatttctaatttcctactttaaatcttaggagacaaagtgtttctccaactggacgctgatttgaaacacaactagaatgctacaggtctctcttccagtatgcagctgctgtacctgaaaatttttccccataatttcccatctttagggtatgtccctgttatcaggtgtggaattaatgtgggtaaatttccatttcagttgaatttcctgtcatccccagcaaaacctgtgaatccttcttcaaagcatagaggaggcagagacaagtcttaaaccggcttcccttcgcttttaccaggtagcctggttcagtcccagctgggtcctgaaggagcacagtactagagcctgagtcatgttgactattaataaagtgcattaagtttgggtcaggcaaagtggtggcaaaagttcatgatgcaggacagaggaaacaagtggacaagacaagtggagcccagctctgttcgcatgggaggccgggcgatgctggcatgggtgtggttggccgagttctcatagctagagaaaggccgtgtaggtataagtgcttaatgtttcatctgtctgaaagaccagctatttgataatcttcccgattaaatttctaaaattgcta

SEQ ID NO: 128281 - DNA, 5498 bp, Homo sapiens
  Payload ID: 5122
  Gene Symbol: DYRK1A
  Gene Name: dual-specificity tyrosine-(Y)-phosphorylation regulated kinase 1A
  Uniprot ID: Q13627
  ENST ID: ENST00000338785
  CDS Start-End: 230-1984
cgaggctgagactcaccggaggaagcggcgcgagcgccccgccatcgtcccggctgaagtgcagtggcacgatcataggtggtcactacagtctcagattcctgggcttaagcagtcttcccacctcagcctccccagtagctgggattacagtgttatagttttgccgctggactcttccctcccttcccccaccccatcaggatgatatgagacttgaaagaagacgatgcatacaggaggagagacttcagcatgcaaaccttcatctgttcggcttgcaccgtcattttcattccatgctgctggccttcagatggctggacagatgccccattcacatcagtacagtgaccgtcgccagccaaacataagtgaccaacaggtttctgccttatcatattctgaccagattcagcaacctctaactaaccaggtgatgcctgatattgtcatgttacagaggcggatgccccaaaccttccgtgacccagcaactgctcccctgagaaaactttctgttgacttgatcaaaacatacaagcatattaatgaggtttactatgcaaaaaagaagcgaagacaccaacagggccagggagacgattctagtcataagaaggaacggaaggtttacaatgatggttatgatgatgataactatgattatattgtaaaaaacggagaaaagtggatggatcgttacgaaattgactccttgataggcaaaggttcctttggacaggttgtaaaggcatatgatcgtgtggagcaagaatgggttgccattaaaataataaagaacaagaaggcttttctgaatcaagcacagatagaagtgcgacttcttgagctcatgaacaaacatgacactgaaatgaaatactacatagtgcatttgaaacgccactttatgtttcgaaaccatctctgtttagtttttgaaatgctgtcctacaacctctatgacttgctgagaaacaccaatttccgaggggtctctttgaacctaacacgaaagtttgcgcaacagatgtgcactgcactgcttttccttgcgactccagaacttagtatcattcactgtgatctaaaacctgaaaatatccttctttgtaaccccaaacgcagtgcaatcaagatagttgactttggcagttcttgtcagttggggcagaggatataccagtatattcagagtcgcttttatcggtctccagaggtgctactgggaatgccttatgaccttgccattgatatgtggtccctcgggtgtattttggttgaaatgcacactggagaacctctgttcagtggtgccaatgaggtagatcagatgaataaaatagtggaagttctgggtattccacctgctcatattcttgaccaagcaccaaaagcaagaaagttctttgagaagttgccagatggcacttggaacttaaagaagaccaaagatggaaaacgggagtacaaaccaccaggaacccgtaaacttcataacattcttggagtggaaacaggaggacctggtgggcgacgtgctggggagtcaggtcatacggtcgctgactacttgaagttcaaagacctcattttaaggatgcttgattatgaccccaaaactcgaattcaaccttattatgctctgcagcacagtttcttcaagaaaacagctgatgaaggtacaaatacaagtaatagtgtatctacaagccccgccatggagcagtctcagtcttcgggcaccacctccagtacatcgtcaagctcaggtggctcatcggggacaagcaacagtgggagagcccggtcggatccgacgcaccagcatcggcacagtggtgggcacttcacagctgccgtgcaggccatggactgcgagacacacagtccccaggtgagctcgcacgtggttcatttgcttgtgtcacctgccattctcaggtggagcagcactggatgccaggtgcctttagaatgaccgtatcatttaccctagaggttcatgacgttcctgtctaaggaaatgtgcgtcagcaatttcctgctcctcttggttggtcaggcactgaagctcctacacaggtcactgttgaaactcatcctgttcaagaaacaacctttcatgtagcccctcaacagaatgcattgcatcatcaccatggtaacagttcccatcaccatcaccaccaccaccaccatcaccaccaccatggacaacaagccttgggtaaccggaccaggccaagggtctacaattctccaacgaatagctcctctacccaagattctatggaggttggccacagtcaccactccatgacatccctgtcttcctcaacgacttcttcctcgacatcttcctcctctactggtaaccaaggcaatcaggcctaccagaatcgcccagtggctgctaataccttggactttggacagaatggagctatggacgttaatttgaccgtctactccaatccccgccaagagactggcatagctggacatccaacataccaattttctgctaatacaggtcctgcacattacatgactgaaggacatctgacaatgaggcaaggggctgatagagaagagtcccccatgacaggagtttgtgtgcaacagagtcctgtagctagctcgtgactacattgaaacttgagtttgtttcttgtgtgtttttatagaagtggtgttttttttccaaaaacaaagtgcaaagctgcttgaatcaggaggagattaacacactgaaccgctacaagagggcaaagctgattttttttttaacttgaaaagattgcaaagggacattgaagtgtttaaaagagccatgtccaaacccatcttcatggatagctcagaggtatcctctttttgctcccccattttaacttgccacatcccagtcacagtggggtttttttgtctttctattcagcaaaagttaatattcagatgttggtcttggtcatttgccaactaattttaaagtaaaaggcactgcacataatttgcataaagggccccatgagggtgttttttttttttctttttgtcccccccatccccctttttttttgttttgttctgttttgttttgggtgggagggtgggaaatttgggtttttaagtcctctaaacacacttgggcacggaaatgcagtactgtaaggaagagggacctccagcttccacaaacaccatcttcagctgtatgaaagggacggttgtggtgaagtttgtcaggcacagtaagcatgctgagtggcggggatcagaactctcctatctgaacctactgaggagcaaagcagcaattacatgggatcctgtggctctcccgttgcagaggccacaggaagataggatggaacgtgactggtctcctaaccaaggtgcactgagaagcaatcaacgggtcggtcgtggccagtcctggggaggtctgagtggtggtctttgggataacctttggccttatggatttggactcgaaattagaagagcctaccatttcagatgcaatcacttttggacatgcttttgcagacagtccttaatgctgaaaacacagagaatgggtaattcaagaggcctttcttttaaaatagacttttgtgacccactaattgtaaggtattgcaaggtcactttgcgtgtgtcataaagttgacttccttattggttgaaggtcacagaagtagtggtttgctttgatggaaatagctacagctgtgtcccttcctgctttttactttttcttttgctttttctcggcacgtggtatctccaccatttcttctgcacaaagatgtcttctgttcatcctgaacatttttaaaaaatgcagaattttatgtgactgcttttttgcctcacaattatgctgtgaattttacaaaaatttattttcttttttgataatttattgtaccaaagctgtttttatagcacatagatgtctgtaaccaataatgtagcagttctgcactttgacacaaggtgtaactagaccatttttaaatgtcagttgaaaattatggctgtactattgcttaaacaaaactggaactgttgttgaatccatagccaatacatttacagcaatctgtgtactgaacatagtagattgacatctaattcaagattacaacatctgttacattctaagtgtgttcaggcttctgaaggtaaagggacactggatccagaagctatggaaccagcagttgattcttgtattcctgattaacctacttgtaaacttgaaagcaagaccttgattgcaccaacaggtccagagtatgagtgcaagcaaagcagaactctcatgcgtgacctgagcagacaggctggtatttaacaggtgcctcgtgttgagattacgctgccttaatgtaacacagtctggcagttgctaaatttgtgttcccattttaaattgaccaattttggggtgtgacacttttgagcggttgaattgggagaatgaagataagtaatttacctgtccaggatcaaaagaagcctagaaaagaagcagtaatctacctctgccgataacctgtttaagatgactcagcagaacaccgcgtttcattctattggtcaattccatgtggctgactaggtcaattttttttctgaacaaaagcaggtttttatatgtaaacagtgagaaaagaaaggctaaacactatgtaaatgtgaatggaaacttggaaatactcgtttttataaactacaaaaactttttgttgtttatcaggaaatccatatttattttgtaattaactgtcaagcctgtggatgatttttttgaacttggtagttcataaaggtttacagtgaataaaaggatatcatcttgagtatagcaatatcaaaaggaattcagtagttactgctgtttaggaatataaggttaagatatcatatgggtcaggtcattttttttttctgtgctggttgccacatcttagcaagcaccaaaaaactaaagcagtttttaaaccgatatttacgtaaagaaaatcataaaatccaatgcttctgcatactgtgttatgttacagtccagttttgtgtgctttactacacagtttggttacaggacttctgtgcattgtaaacataaacagcatggaaaaggttaaatacctgtgttcagattgtaagatctagtccggacttgctgtgtatattgtaacgttaaatgaaaaaagaacccccctttgtattatagtcatgcggtcttatgtatgataaacagttgaataatttgtcctcagactctttactatgcttttttaaaaattaatttaagaaaaatgtaaacatagtaaaaatcttcctatgcaattaaactggtccaggtctggtaggtatagtatcaaagttgagttaaatgtgtaaaaaggaaactatttgagatacattgacataggcatcagcaatctctgaaagtaaaaattggaggtttaacagat

SEQ ID NO: 128282 - DNA, 1590 bp, Homo sapiens
  Payload ID: 5122
  Gene Symbol: DYRK1A
  Gene Name: dual-specificity tyrosine-(Y)-phosphorylation regulated kinase 1A
  Uniprot ID: Q13627
  ENST ID: ENST00000398956
  CDS Start-End: 1-1590
atgcatacaggaggagagacttcagcatgcaaaccttcatctgttcggcttgcaccgtcattttcattccatgctgctggccttcagatggctggacagatgccccattcacatcagtacagtgaccgtcgccagccaaacataagtgaccaacaggtttctgccttatcatattctgaccagattcagcaacctctaactaaccaggtgatgcctgatattgtcatgttacagaggcggatgccccaaaccttccgtgacccagcaactgctcccctgagaaaactttctgttgacttgatcaaaacatacaagcatattaatgaggtttactatgcaaaaaagaagcgaagacaccaacagggccagggagacgattctagtcataagaaggaacggaaggtttacaatgatggttatgatgatgataactatgattatattgtaaaaaacggagaaaagtggatggatcgttacgaaattgactccttgataggcaaaggttcctttggacaggttgtaaaggcatatgatcgtgtggagcaagaatgggttgccattaaaataataaagaacaagaaggcttttctgaatcaagcacagatagaagtgcgacttcttgagctcatgaacaaacatgacactgaaatgaaatactacatagtgcatttgaaacgccactttatgtttcgaaaccatctctgtttagtttttgaaatgctgtcctacaacctctatgacttgctgagaaacaccaatttccgaggggtctctttgaacctaacacgaaagtttgcgcaacagatgtgcactgcactgcttttccttgcgactccagaacttagtatcattcactgtgatctaaaacctgaaaatatccttctttgtaaccccaaacgcagtgcaatcaagatagttgactttggcagttcttgtcagttggggcagaggatataccagtatattcagagtcgcttttatcggtctccagaggtgctactgggaatgccttatgaccttgccattgatatgtggtccctcgggtgtattttggttgaaatgcacactggagaacctctgttcagtggtgccaatgaggtagatcagatgaataaaatagtggaagttctgggtattccacctgctcatattcttgaccaagcaccaaaagcaagaaagttctttgagaagttgccagatggcacttggaacttaaagaagaccaaagatggaaaacgggagtacaaaccaccaggaacccgtaaacttcataacattcttggagtggaaacaggaggacctggtgggcgacgtgctggggagtcaggtcatacggtcgctgactacttgaagttcaaagacctcattttaaggatgcttgattatgaccccaaaactcgaattcaaccttattatgctctgcagcacagtttcttcaagaaaacagctgatgaaggtacaaatacaagtaatagtgtatctacaagccccgccatggagcagtctcagtcttcgggcaccacctccagtacatcgtcaagctcaggtgcgtcagcaatttcctgctcctcttggttggtcaggcactga

SEQ ID NO: 128283 - DNA, 2422 bp, Homo sapiens
  Payload ID: 5122
  Gene Symbol: DYRK1A
  Gene Name: dual-specificity tyrosine-(Y)-phosphorylation regulated kinase 1A
  Uniprot ID: Q13627
  ENST ID: ENST00000398960
  CDS Start-End: 76-2367
gttatagttttgccgctggactcttccctcccttcccccaccccatcaggatgatatgagacttgaaagaagacgatgcatacaggaggagagacttcagcatgcaaaccttcatctgttcggcttgcaccgtcattttcattccatgctgctggccttcagatggctggacagatgccccattcacatcagtacagtgaccgtcgccagccaaacataagtgaccaacaggtttctgccttatcatattctgaccagattcagcaacctctaactaaccaggtgatgcctgatattgtcatgttacagaggcggatgccccaaaccttccgtgacccagcaactgctcccctgagaaaactttctgttgacttgatcaaaacatacaagcatattaatgaggtttactatgcaaaaaagaagcgaagacaccaacagggccagggagacgattctagtcataagaaggaacggaaggtttacaatgatggttatgatgatgataactatgattatattgtaaaaaacggagaaaagtggatggatcgttacgaaattgactccttgataggcaaaggttcctttggacaggttgtaaaggcatatgatcgtgtggagcaagaatgggttgccattaaaataataaagaacaagaaggcttttctgaatcaagcacagatagaagtgcgacttcttgagctcatgaacaaacatgacactgaaatgaaatactacatagtgcatttgaaacgccactttatgtttcgaaaccatctctgtttagtttttgaaatgctgtcctacaacctctatgacttgctgagaaacaccaatttccgaggggtctctttgaacctaacacgaaagtttgcgcaacagatgtgcactgcactgcttttccttgcgactccagaacttagtatcattcactgtgatctaaaacctgaaaatatccttctttgtaaccccaaacgcagtgcaatcaagatagttgactttggcagttcttgtcagttggggcagaggatataccagtatattcagagtcgcttttatcggtctccagaggtgctactgggaatgccttatgaccttgccattgatatgtggtccctcgggtgtattttggttgaaatgcacactggagaacctctgttcagtggtgccaatgaggtagatcagatgaataaaatagtggaagttctgggtattccacctgctcatattcttgaccaagcaccaaaagcaagaaagttctttgagaagttgccagatggcacttggaacttaaagaagaccaaagatggaaaacgggagtacaaaccaccaggaacccgtaaacttcataacattcttggagtggaaacaggaggacctggtgggcgacgtgctggggagtcaggtcatacggtcgctgactacttgaagttcaaagacctcattttaaggatgcttgattatgaccccaaaactcgaattcaaccttattatgctctgcagcacagtttcttcaagaaaacagctgatgaaggtacaaatacaagtaatagtgtatctacaagccccgccatggagcagtctcagtcttcgggcaccacctccagtacatcgtcaagctcaggtggctcatcggggacaagcaacagtgggagagcccggtcggatccgacgcaccagcatcggcacagtggtgggcacttcacagctgccgtgcaggccatggactgcgagacacacagtccccaggtgcgtcagcaatttcctgctcctcttggttggtcaggcactgaagctcctacacaggtcactgttgaaactcatcctgttcaagaaacaacctttcatgtagcccctcaacagaatgcattgcatcatcaccatggtaacagttcccatcaccatcaccaccaccaccaccatcaccaccaccatggacaacaagccttgggtaaccggaccaggccaagggtctacaattctccaacgaatagctcctctacccaagattctatggaggttggccacagtcaccactccatgacatccctgtcttcctcaacgacttcttcctcgacatcttcctcctctactggtaaccaaggcaatcaggcctaccagaatcgcccagtggctgctaataccttggactttggacagaatggagctatggacgttaatttgaccgtctactccaatccccgccaagagactggcatagctggacatccaacataccaattttctgctaatacaggtcctgcacattacatgactgaaggacatctgacaatgaggcaaggggctgatagagaagagtcccccatgacaggagtttgtgtgcaacagagtcctgtagctagctcgtgactacattgaaacttgagtttgtttcttgtgtgtttttatagaagtggtgtttttt

SEQ ID NO: 128284 - DNA, 338 bp, Homo sapiens
  Payload ID: 5122
  Gene Symbol: DYRK1A
  Gene Name: dual-specificity tyrosine-(Y)-phosphorylation regulated kinase 1A
  ENST ID: ENST00000455097
  CDS Start-End: 201-338
gctgagactcaccggaggaagcggcgcgagcgccccgccatcgtcccggatctcaccctgttgcccaggctggagtgcagtggcatgatcagggctcactgcagccttgacttcctggaatcagtgttatagttttgccgctggactcttccctcccttcccccaccccatcaggatgatatgagacttgaaagaagacgatgcatacaggaggagagacttcagcatgcaaaccttcatctgttcggcttgcaccgtcattttcattccatgctgctggccttcagatggctggacagatgccccattcacatcagtacagtgaccgtcgccagcca

SEQ ID NO: 128285 - DNA, 519 bp, Homo sapiens
  Payload ID: 5122
  Gene Symbol: DYRK1A
  Gene Name: dual-specificity tyrosine-(Y)-phosphorylation regulated kinase 1A
  ENST ID: ENST00000426672
  CDS Start-End: 125-519
gctgagactcaccggaggaagcggcgcgagcgccccgccatcgtcccgtgttatagttttgccgctggactcttccctcccttcccccaccccatcaggatgatatgagacttgaaagaagacgatgcatacaggaggagagacttcagcatgcaaaccttcatctgttcggcttgcaccgtcattttcattccatgctgctggccttcagatggctggacagatgccccattcacatcagtacagtgaccgtcgccagccaaacataagtgaccaacaggtttctgccttatcatattctgaccagattcagcaacctctaactaaccaggtgatgcctgatattgtcatgttacagaggcggatgccccaaaccttccgtgacccagcaactgctcccctgagaaaactttctgttgacttgatcaaaacatacaagcatattaatgaggtttactatgcaaaaaagaagcgaagacaccaacagggccagggagacgattctagtcataagaagga

SEQ ID NO: 128286 - DNA, 2448 bp, Homo sapiens
  Payload ID: 5123
  Gene Symbol: DYRK1B
  Gene Name: dual-specificity tyrosine-(Y)-phosphorylation regulated kinase 1B
  Uniprot ID: Q9Y463
  ENST ID: ENST00000348817
  CDS Start-End: 281-2086
gggatgggggcggagtccagggcgtgggggggccggtttgttgtggtcgccattttgctggttgcattactgggtaatcggggccctggcttgccgcgtccgccggataccctcagccagtgggcaggtctgagctcgggctccccgagcagtttgagtccccttgcccgctccttcaggtctcagcggcggtggcagccgaggtgcaggatgcaagaaggcgccccccggccgggctcccgctccaggcctcgctcccctgcggccctctgagcccaccatggccgtcccaccgggccatggtcccttctctggcttcccagggccccaggagcacacgcaggtattgcctgatgtgcggctactgcctcggaggctgcccctggccttccgggatgcaacctcagccccgctgcgtaagctctctgtggacctcatcaagacctacaagcacatcaatgaggtatactatgcgaagaagaagcggcgggcccagcaggcgccaccccaggattcgagcaacaagaaggagaagaaggtcctgaaccatggttatgatgacgacaaccatgactacatcgtgcgcagtggcgagcgctggctggagcgctacgaaattgactcgctcattggcaaaggctcctttggccaggtggtgaaagcctatgatcatcagacccaggagcttgtggccatcaagatcatcaagaacaaaaaggctttcctgaaccaggcccagattgagctgcggctgctggagctgatgaaccagcatgacacggagatgaagtactatatagtacacctgaagcggcacttcatgttccggaaccacctgtgcctggtatttgagctgctgtcctacaacctgtacgacctcctgcgcaacacccacttccgcggcgtctcgctgaacctgacccggaagctggcgcagcagctctgcacggcactgctctttctggccacgcctgagctcagcatcattcactgcgacctcaagcccgaaaacatcttgctgtgcaaccccaagcgcagcgccatcaagattgtggacttcggcagctcctgccagcttggccagaggatctaccagtatatccagagccgcttctaccgctcacctgaggtgctcctgggcacaccctacgacctggccattgacatgtggtccctgggctgcatccttgtggagatgcacaccggagagcccctcttcagtggctccaatgaggtcgaccagatgaaccgcattgtggaggtgctgggcatcccaccggccgccatgctggaccaggcgcccaaggctcgcaagtactttgaacggctgcctgggggtggctggaccctacgaaggacgaaagaactcaggaaggattaccagggccccgggacacggcggctgcaggaggacctggtgctgcgcatgctggagtatgagcccgccgcccgcatcagccccctgggggctctgcagcacggcttcttccgccgcacggccgacgaggccaccaacacgggcccggcaggcagcagtgcctccacctcgcccgcgcccctcgacacctgcccctcttccagcaccgccagctccatctccagttctggaggctccagtggctcctccagtgacaaccggacctaccgctacagcaaccgatattgtgggggccctgggccccctatcacagactgtgagatgaacagcccccaggtcccaccctcccagccgctgcggccctgggcagggggtgatgtgccccacaagacacatcaagcccctgcctctgcctcgtcactgcctgggaccggggcccagttacccccccagccccgataccttggtcgtcccccatcaccaacctcaccaccacccccggagctgatggatgtgagcctggtgggcggccctgctgactgctccccacctcacccagcgcctgccccccagcacccggctgcctcagccctccggactcggatgactggaggtcgtccacccctcccgcctcctgatgaccctgccactctggggcctcacctgggcctccgtggtgtaccccagagcacagcagccagctcgtgaccctgccccctccctggggcccctcctgaagccataccctcccccatctgggggccctgggctcccatcctcatctctctccttgactggaattgctgctacccagctggggtgggtgaggcctgcactgattggggcctggggcaggggggtcaaggagagggttttggccgctccctccccactaaggactggacccttgggcccctctccccctttttttctatttattgtaccaaagacagtggtggtccggtggagggaagaccccccctcaccccaggaccctaggagggggtgggggcaggtagggggagatggccttgctcctcctcgctgtacccccagtaaagagctttctc

SEQ ID NO: 128287 - DNA, 2535 bp, Homo sapiens
  Payload ID: 5123
  Gene Symbol: DYRK1B
  Gene Name: dual-specificity tyrosine-(Y)-phosphorylation regulated kinase 1B
  Uniprot ID: Q9Y463
  ENST ID: ENST00000323039
  CDS Start-End: 281-2170
gggatgggggcggagtccagggcgtgggggggccggtttgttgtggtcgccattttgctggttgcattactgggtaatcggggccctggcttgccgcgtccgccggataccctcagccagtgggcaggtctgagctcgggctccccgagcagtttgagtccccttgcccgctccttcaggtctcagcggcggtggcagccgaggtgcaggatgcaagaaggcgccccccggccgggctcccgctccaggcctcgctcccctgcggccctctgagcccaccatggccgtcccaccgggccatggtcccttctctggcttcccagggccccaggagcacacgcaggtattgcctgatgtgcggctactgcctcggaggctgcccctggccttccgggatgcaacctcagccccgctgcgtaagctctctgtggacctcatcaagacctacaagcacatcaatgaggtatactatgcgaagaagaagcggcgggcccagcaggcgccaccccaggattcgagcaacaagaaggagaagaaggtcctgaaccatggttatgatgacgacaaccatgactacatcgtgcgcagtggcgagcgctggctggagcgctacgaaattgactcgctcattggcaaaggctcctttggccaggtggtgaaagcctatgatcatcagacccaggagcttgtggccatcaagatcatcaagaacaaaaaggctttcctgaaccaggcccagattgagctgcggctgctggagctgatgaaccagcatgacacggagatgaagtactatatagtacacctgaagcggcacttcatgttccggaaccacctgtgcctggtatttgagctgctgtcctacaacctgtacgacctcctgcgcaacacccacttccgcggcgtctcgctgaacctgacccggaagctggcgcagcagctctgcacggcactgctctttctggccacgcctgagctcagcatcattcactgcgacctcaagcccgaaaacatcttgctgtgcaaccccaagcgcagcgccatcaagattgtggacttcggcagctcctgccagcttggccagaggatctaccagtatatccagagccgcttctaccgctcacctgaggtgctcctgggcacaccctacgacctggccattgacatgtggtccctgggctgcatccttgtggagatgcacaccggagagcccctcttcagtggctccaatgaggtcgaccagatgaaccgcattgtggaggtgctgggcatcccaccggccgccatgctggaccaggcgcccaaggctcgcaagtactttgaacggctgcctgggggtggctggaccctacgaaggacgaaagaactcaggaaggattaccagggccccgggacacggcggctgcaggaggtgctgggcgtgcagacgggcgggcccgggggccggcgggcgggggagccgggccacagccccgccgactacctccgcttccaggacctggtgctgcgcatgctggagtatgagcccgccgcccgcatcagccccctgggggctctgcagcacggcttcttccgccgcacggccgacgaggccaccaacacgggcccggcaggcagcagtgcctccacctcgcccgcgcccctcgacacctgcccctcttccagcaccgccagctccatctccagttctggaggctccagtggctcctccagtgacaaccggacctaccgctacagcaaccgatattgtgggggccctgggccccctatcacagactgtgagatgaacagcccccaggtcccaccctcccagccgctgcggccctgggcagggggtgatgtgccccacaagacacatcaagcccctgcctctgcctcgtcactgcctgggaccggggcccagttacccccccagccccgataccttggtcgtcccccatcaccaacctcaccaccacccccggagctgatggatgtgagcctggtgggcggccctgctgactgctccccacctcacccagcgcctgccccccagcacccggctgcctcagccctccggactcggatgactggaggtcgtccacccctcccgcctcctgatgaccctgccactctggggcctcacctgggcctccgtggtgtaccccagagcacagcagccagctcgtgaccctgccccctccctggggcccctcctgaagccataccctcccccatctgggggccctgggctcccatcctcatctctctccttgactggaattgctgctacccagctggggtgggtgaggcctgcactgattggggcctggggcaggggggtcaaggagagggttttggccgctccctccccactaaggactggacccttgggcccctctccccctttttttctatttattgtaccaaagacagtggtggtccggtggagggaagaccccccctcaccccaggaccctaggagggggtgggggcaggtagggggagatggccttgctcctcctcgctgtacccccagtaaagagctttctcaca

SEQ ID NO: 128288 - DNA, 2007 bp, Homo sapiens
  Payload ID: 5123
  Gene Symbol: DYRK1B
  Gene Name: dual-specificity tyrosine-(Y)-phosphorylation regulated kinase 1B
  Uniprot ID: Q9Y463
  ENST ID: ENST00000430012
  CDS Start-End: 238-2007
tggtcgccattttgctggttgcattactgggtaatcggggccctggcttgccgcgtccgccggataccctcagccagtgggcaggtctgagctcgggctccccgagcagtttgagtccccttgcccgctccttcaggtctcagcggcggtggcagccgaggtgcaggatgcaagaaggcgccccccggccgggctcccgctccaggcctcgctcccctgcggccctctgagcccaccatggccgtcccaccgggccatggtcccttctctggcttcccagggccccaggagcacacgcaggtattgcctgatgtgcggctactgcctcggaggctgcccctggccttccgggatgcaacctcagccccgctgcgtaagctctctgtggacctcatcaagacctacaagcacatcaatgaggtatactatgcgaagaagaagcggcgggcccagcaggcgccaccccaggattcgagcaacaagaaggagaagaaggtcctgaaccatggttatgatgacgacaaccatgactacatcgtgcgcagtggcgagcgctggctggagcgctacgaaattgactcgctcattggcaaaggctcctttggccaggtggtgaaagcctatgatcatcagacccaggagcttgtggccatcaagatcatcaagaacaaaaaggctttcctgaaccaggcccagattgagctgcggctgctggagctgatgaaccagcatgacacggagatgaagtactatatagtacacctgaagcggcacttcatgttccggaaccacctgtgcctggtatttgagctgctgtcctacaacctgtacgacctcctgcgcaacacccacttccgcggcgtctcgctgaacctgacccggaagctggcgcagcagctctgcacggcactgctctttctggccacgcctgagctcagcatcattcactgcgacctcaagcccgaaaacatcttgctgtgcaaccccaagcgcagcgccatcaagattgtggacttcggcagctcctgccagcttggccagaggatctaccagtatatccagagccgcttctaccgctcacctgaggtgctcctgggcacaccctacgacctggccattgacatgtggtccctgggctgcatccttgtggagatgcacaccggagagcccctcttcagtggctccaatgaggtcgaccagatgaaccgcattgtggaggtgctgggcatcccaccggccgccatgctggaccaggcgcccaaggctcgcaagtactttgaacggctgcctgggggtggctggaccctacgaaggacgaaagaactcaggaaggacctggtgctgcgcatgctggagtatgagcccgccgcccgcatcagccccctgggggctctgcagcacggcttcttccgccgcacggccgacgaggccaccaacacgggcccggcaggcagcagtgcctccacctcgcccgcgcccctcgacacctgcccctcttccagcaccgccagctccatctccagttctggaggctccagtggctcctccagtgacaaccggacctaccgctacagcaaccgatattgtgggggccctgggccccctatcacagactgtgagatgaacagcccccaggtcccaccctcccagccgctgcggccctgggcagggggtgatgtgccccacaagacacatcaagcccctgcctctgcctcgtcactgcctgggaccggggcccagttacccccccagccccgataccttggtcgtcccccatcaccaacctcaccaccacccccggagctgatggatgtgagcctggtgggcggccctgctgactgctccccacctcacccagcgcctgccccccagcacccggctgcctcagccctccggactcggatgactggaggtcgtccacccctcccgcctcctgatgaccctgccactctggggcctcacctgggcctccgtggtgtaccccagagcacagcagccagctcgtga

SEQ ID NO: 128289 - DNA, 2724 bp, Homo sapiens
  Payload ID: 5123
  Gene Symbol: DYRK1B
  Gene Name: dual-specificity tyrosine-(Y)-phosphorylation regulated kinase 1B
  Uniprot ID: Q9Y463
  ENST ID: ENST00000593685
  CDS Start-End: 470-2359
ttccggtctcagcaggcccaggagggcctcctgggtggggggcgggacgccgggtccctaggggctggtggtcactcagggtggggcgtgtcgcccctcccccgtccacctgctctactcttcccccgcgtgccctgggctgacccttgtcccctcctctccccgcccccggtggcagtggcggctgctgttgtcacccaccgggcctcctgtcccgcttgccctccccgccgcggggccggccgggccagagacaggcggtcgccttttcagcgccgccaccgccgccatgctggccgctcgcccaccccactgggggccccaccgcgccccagccccccgtgggccccgcgccagccctgacccgggtctcagcggcggtggcagccgaggtgcaggatgcaagaaggcgccccccggccgggctcccgctccaggcctcgctcccctgcggccctctgagcccaccatggccgtcccaccgggccatggtcccttctctggcttcccagggccccaggagcacacgcaggtattgcctgatgtgcggctactgcctcggaggctgcccctggccttccgggatgcaacctcagccccgctgcgtaagctctctgtggacctcatcaagacctacaagcacatcaatgaggtatactatgcgaagaagaagcggcgggcccagcaggcgccaccccaggattcgagcaacaagaaggagaagaaggtcctgaaccatggttatgatgacgacaaccatgactacatcgtgcgcagtggcgagcgctggctggagcgctacgaaattgactcgctcattggcaaaggctcctttggccaggtggtgaaagcctatgatcatcagacccaggagcttgtggccatcaagatcatcaagaacaaaaaggctttcctgaaccaggcccagattgagctgcggctgctggagctgatgaaccagcatgacacggagatgaagtactatatagtacacctgaagcggcacttcatgttccggaaccacctgtgcctggtatttgagctgctgtcctacaacctgtacgacctcctgcgcaacacccacttccgcggcgtctcgctgaacctgacccggaagctggcgcagcagctctgcacggcactgctctttctggccacgcctgagctcagcatcattcactgcgacctcaagcccgaaaacatcttgctgtgcaaccccaagcgcagcgccatcaagattgtggacttcggcagctcctgccagcttggccagaggatctaccagtatatccagagccgcttctaccgctcacctgaggtgctcctgggcacaccctacgacctggccattgacatgtggtccctgggctgcatccttgtggagatgcacaccggagagcccctcttcagtggctccaatgaggtcgaccagatgaaccgcattgtggaggtgctgggcatcccaccggccgccatgctggaccaggcgcccaaggctcgcaagtactttgaacggctgcctgggggtggctggaccctacgaaggacgaaagaactcaggaaggattaccagggccccgggacacggcggctgcaggaggtgctgggcgtgcagacgggcgggcccgggggccggcgggcgggggagccgggccacagccccgccgactacctccgcttccaggacctggtgctgcgcatgctggagtatgagcccgccgcccgcatcagccccctgggggctctgcagcacggcttcttccgccgcacggccgacgaggccaccaacacgggcccggcaggcagcagtgcctccacctcgcccgcgcccctcgacacctgcccctcttccagcaccgccagctccatctccagttctggaggctccagtggctcctccagtgacaaccggacctaccgctacagcaaccgatattgtgggggccctgggccccctatcacagactgtgagatgaacagcccccaggtcccaccctcccagccgctgcggccctgggcagggggtgatgtgccccacaagacacatcaagcccctgcctctgcctcgtcactgcctgggaccggggcccagttacccccccagccccgataccttggtcgtcccccatcaccaacctcaccaccacccccggagctgatggatgtgagcctggtgggcggccctgctgactgctccccacctcacccagcgcctgccccccagcacccggctgcctcagccctccggactcggatgactggaggtcgtccacccctcccgcctcctgatgaccctgccactctggggcctcacctgggcctccgtggtgtaccccagagcacagcagccagctcgtgaccctgccccctccctggggcccctcctgaagccataccctcccccatctgggggccctgggctcccatcctcatctctctccttgactggaattgctgctacccagctggggtgggtgaggcctgcactgattggggcctggggcaggggggtcaaggagagggttttggccgctccctccccactaaggactggacccttgggcccctctccccctttttttctatttattgtaccaaagacagtggtggtccggtggagggaagaccccccctcaccccaggaccctaggagggggtgggggcaggtagggggagatggccttgctcctcctcgctgtacccccagtaaagagctttctcaca

SEQ ID NO: 128290 - DNA, 657 bp, Homo sapiens
  Payload ID: 5123
  Gene Symbol: DYRK1B
  Gene Name: dual-specificity tyrosine-(Y)-phosphorylation regulated kinase 1B
  ENST ID: ENST00000600611
  CDS Start-End: 140-657
cgccttccggtctcagcaggcccaggagggcctcctgggtctcagcggcggtggcagccgaggtgcaggatgcaagaaggcgccccccggccgggctcccgctccaggcctcgctcccctgcggccctctgagcccaccatggccgtcccaccgggccatggtcccttctctggcttcccagggccccaggagcacacgcaggtattgcctgatgtgcggctactgcctcggaggctgcccctggccttccgggatgcaacctcagccccgctgcgtaagctctctgtggacctcatcaagacctacaagcacatcaatgaggtatactatgcgaagaagaagcggcgggcccagcaggcgccaccccaggattcgagcaacaagaaggagaagaaggtcctgaaccatggttatgatgacgacaaccatgactacatcgtgcgcagtggcgagcgctggctggagcgctacgaaattgactcgctcattggcaaaggctcctttggccaggtggtgaaagcctatgatcatcagacccaggagcttgtggccatcaagatcatcaagaacaaaaaggctttcctgaaccaggcccagattgagctgcggctgctggagctgatgaaccagcatgacacggagatgaagtactatat

SEQ ID NO: 128291 - DNA, 772 bp, Homo sapiens
  Payload ID: 5123
  Gene Symbol: DYRK1B
  Gene Name: dual-specificity tyrosine-(Y)-phosphorylation regulated kinase 1B
  ENST ID: ENST00000601972
  CDS Start-End: 232-645
ccattttgctggttgcattactgggtaatcggggccctggcttgccgcgtccgccggataccctcagccagtgggcaggtctgagctcgggctccccgagcagtttgagtccccttgcccgctccttcaggtctcagcggcggtggcagccgaggtgcaggatgcaagaaggcgccccccggccgggctcccgctccaggcctcgctcccctgcggccctctgagcccaccatggccgtcccaccgggccatggtcccttctctggcttcccagggccccaggagcacacgcaggtattgcctgatgtgcggctactgcctcggaggctgcccctggccttccgggatgcaacctcagccccgctgcgtaagctctctgtggacctcatcaagacctacaagcacatcaatgaggtatactatgcgaagaagaagcggcgggcccagcaggcgccaccccaggattcgagcaacaagaaggagaagaaggtcctgaaccatggttatgatgacgacaaccatgactacatcgtgcgcagtggcgagcgctggctggagcgctacgaaattgactcgctcattggcaaaggctcctttggccaggtgtgggacaccccccaccaccctgatccaaggccccactaacattgatcacacacccagtggttcagtggcttcaagtcccatgctgggccactcaccctagcccacttagtttccctgtgcctcagtcgccttttctgtaaaacagtttaaataacaagactcaaca

SEQ ID NO: 128292 - DNA, 1806 bp, Homo sapiens
  Payload ID: 5123
  Gene Symbol: DYRK1B
  Gene Name: dual-specificity tyrosine-(Y)-phosphorylation regulated kinase 1B
  Uniprot ID: Q9Y463
  ENST ID: ENST00000597639
  CDS Start-End: 1-1806
atggccgtcccaccgggccatggtcccttctctggcttcccagggccccaggagcacacgcaggtattgcctgatgtgcggctactgcctcggaggctgcccctggccttccgggatgcaacctcagccccgctgcgtaagctctctgtggacctcatcaagacctacaagcacatcaatgaggtatactatgcgaagaagaagcggcgggcccagcaggcgccaccccaggattcgagcaacaagaaggagaagaaggtcctgaaccatggttatgatgacgacaaccatgactacatcgtgcgcagtggcgagcgctggctggagcgctacgaaattgactcgctcattggcaaaggctcctttggccaggtggtgaaagcctatgatcatcagacccaggagcttgtggccatcaagatcatcaagaacaaaaaggctttcctgaaccaggcccagattgagctgcggctgctggagctgatgaaccagcatgacacggagatgaagtactatatagtacacctgaagcggcacttcatgttccggaaccacctgtgcctggtatttgagctgctgtcctacaacctgtacgacctcctgcgcaacacccacttccgcggcgtctcgctgaacctgacccggaagctggcgcagcagctctgcacggcactgctctttctggccacgcctgagctcagcatcattcactgcgacctcaagcccgaaaacatcttgctgtgcaaccccaagcgcagcgccatcaagattgtggacttcggcagctcctgccagcttggccagaggatctaccagtatatccagagccgcttctaccgctcacctgaggtgctcctgggcacaccctacgacctggccattgacatgtggtccctgggctgcatccttgtggagatgcacaccggagagcccctcttcagtggctccaatgaggtcgaccagatgaaccgcattgtggaggtgctgggcatcccaccggccgccatgctggaccaggcgcccaaggctcgcaagtactttgaacggctgcctgggggtggctggaccctacgaaggacgaaagaactcaggaaggattaccagggccccgggacacggcggctgcaggaggacctggtgctgcgcatgctggagtatgagcccgccgcccgcatcagccccctgggggctctgcagcacggcttcttccgccgcacggccgacgaggccaccaacacgggcccggcaggcagcagtgcctccacctcgcccgcgcccctcgacacctgcccctcttccagcaccgccagctccatctccagttctggaggctccagtggctcctccagtgacaaccggacctaccgctacagcaaccgatattgtgggggccctgggccccctatcacagactgtgagatgaacagcccccaggtcccaccctcccagccgctgcggccctgggcagggggtgatgtgccccacaagacacatcaagcccctgcctctgcctcgtcactgcctgggaccggggcccagttacccccccagccccgataccttggtcgtcccccatcaccaacctcaccaccacccccggagctgatggatgtgagcctggtgggcggccctgctgactgctccccacctcacccagcgcctgccccccagcacccggctgcctcagccctccggactcggatgactggaggtcgtccacccctcccgcctcctgatgaccctgccactctggggcctcacctgggcctccgtggtgtaccccagagcacagcagccagctcgtga

SEQ ID NO: 128293 - DNA, 2535 bp, Homo sapiens; identical to SEQ ID NO: 128287
  Payload ID: 5123
  Gene Symbol: DYRK1B
  Gene Name: dual-specificity tyrosine-(Y)-phosphorylation regulated kinase 1B
  Uniprot ID: Q9Y463
  ENST ID: ENST00000625757
  CDS Start-End: 281-2170

SEQ ID NO: 128294 - DNA, 772 bp, Homo sapiens; identical to SEQ ID NO: 128291
  Payload ID: 5123
  Gene Symbol: DYRK1B
  Gene Name: dual-specificity tyrosine-(Y)-phosphorylation regulated kinase 1B
  ENST ID: ENST00000630714
  CDS Start-End: 232-645

SEQ ID NO: 128295 - DNA, 2724 bp, Homo sapiens; identical to SEQ ID NO: 128289
  Payload ID: 5123
  Gene Symbol: DYRK1B
  Gene Name: dual-specificity tyrosine-(Y)-phosphorylation regulated kinase 1B
  Uniprot ID: Q9Y463
  ENST ID: ENST00000631090
  CDS Start-End: 470-2359

SEQ ID NO: 128296 - DNA, 2448 bp, Homo sapiens; identical to SEQ ID NO: 128286
  Payload ID: 5123
  Gene Symbol: DYRK1B
  Gene Name: dual-specificity tyrosine-(Y)-phosphorylation regulated kinase 1B
  Uniprot ID: Q9Y463
  ENST ID: ENST00000625388
  CDS Start-End: 281-2086

SEQ ID NO: 128297 - DNA, 657 bp, Homo sapiens; identical to SEQ ID NO: 128290
  Payload ID: 5123
  Gene Symbol: DYRK1B
  Gene Name: dual-specificity tyrosine-(Y)-phosphorylation regulated kinase 1B
  ENST ID: ENST00000626964
  CDS Start-End: 140-657

SEQ ID NO: 128298 - DNA, 1806 bp, Homo sapiens; identical to SEQ ID NO: 128292
  Payload ID: 5123
  Gene Symbol: DYRK1B
  Gene Name: dual-specificity tyrosine-(Y)-phosphorylation regulated kinase 1B
  Uniprot ID: Q9Y463
  ENST ID: ENST00000625438
  CDS Start-End: 1-1806

SEQ ID NO: 128299 - DNA, 2007 bp, Homo sapiens; identical to SEQ ID NO: 128288
  Payload ID: 5123
  Gene Symbol: DYRK1B
  Gene Name: dual-specificity tyrosine-(Y)-phosphorylation regulated kinase 1B
  Uniprot ID: Q9Y463
  ENST ID: ENST00000627034
  CDS Start-End: 238-2007

SEQ ID NO: 128300 - DNA, 566 bp, Homo sapiens
  Payload ID: 5124
  Gene Symbol: DYRK2
  Gene Name: dual-specificity tyrosine-(Y)-phosphorylation regulated kinase 2
  ENST ID: ENST00000319833
  CDS Start-End: 286-566
ttcctccgtctttctttggaagagggttgtcgctgcccagcggggttggagggggggtctgggtgactttctcccccctgaccctcttttgtctcctcccgcacgtggcttccaggccgaggtggggacagcgccgttcgtcagcttcaggcttccccggggctcggtgcaggggccacccggagcggagtggggactggcccgccctcccccatcgccctgccgcctctccgggccagcaacgctgccgccgcagcccacacgattggcggcagtaagcacacaatgaatgatcacctgcatgtcggcagccacgctcacggacagatccaggttcaacagttgtttgaggataacagtaacaagcggacagtgctcacgacacaaccaaatgggcttacaacagtgggcaaaacgggcttgccagtggtgccagagcggcagctggacagcattcatagacggcaggggagctccacctctctaaagtccatggaaggcatggggaaggtgaaagccacccccatgacacctgaacaagcaatgaagcaatacatgcaaaaact

SEQ ID NO: 128301 - DNA, 8912 bp, Homo sapiens
  Payload ID: 5124
  Gene Symbol: DYRK2
  Gene Name: dual-specificity tyrosine-(Y)-phosphorylation regulated kinase 2
  Uniprot ID: Q92630
  ENST ID: ENST00000344096
  CDS Start-End: 414-2219
gtgtgtgagtgcgcgggggcgcgcgcgcgcgggcccgggagaggctcccgagccaggcggtcttcggtcctcgcagcgcttccagctccccgcgcccctatgtgagggagacggggaggcccgcggcgcgcaggggagggcgaggcatgtgcacgggccggagggtgctgcagccgcccgaggaagaggaggacggcggcgaggaggagagcggggggctcgcggcggcgggccccggccgaggggatgcagtggactgtgtgtgtctggctgtagcagacgcgaggcggcgacgaggcgccggggacccgcgcgaggggcggccgggaggcggcggcggcggccgccagaagtagcagcaggaccggcggcggcgacggcagccctgaaatgcattttcctctccagcggccatgttaaccaggaaaccttcggccgccgctcccgccgcctacccgaccggccgaggtggggacagcgccgttcgtcagcttcaggcttccccggggctcggtgcaggggccacccggagcggagtggggactggcccgccctcccccatcgccctgccgcctctccgggccagcaacgctgccgccgcagcccacacgattggcggcagtaagcacacaatgaatgatcacctgcatgtcggcagccacgctcacggacagatccaggttcaacagttgtttgaggataacagtaacaagcggacagtgctcacgacacaaccaaatgggcttacaacagtgggcaaaacgggcttgccagtggtgccagagcggcagctggacagcattcatagacggcaggggagctccacctctctaaagtccatggaaggcatggggaaggtgaaagccacccccatgacacctgaacaagcaatgaagcaatacatgcaaaaactcacagccttcgaacaccatgagattttcagctaccctgaaatatatttcttgggtctaaatgctaagaagcgccagggcatgacaggtgggcccaacaatggtggctatgatgatgaccagggatcatatgtgcaggtgccccacgatcacgtggcttacaggtatgaggtcctcaaggtcattgggaaggggagctttgggcaggtggtcaaggcctacgatcacaaagtccaccagcacgtggccctaaagatggtgcggaatgagaagcgcttccaccggcaagcagcggaggagatccgaatcctggaacacctgcggaagcaggacaaggataacacaatgaatgtcatccatatgctggagaatttcaccttccgcaaccacatctgcatgacgtttgagctgctgagcatgaacctctatgagctcatcaagaagaataaattccagggcttcagtctgcctttggttcgcaagtttgcccactcgattctgcagtgcttggatgctttgcacaaaaacagaataattcactgtgaccttaagcccgagaacattttgttaaagcagcagggtagaagcggtattaaagtaattgattttggctccagttgttacgagcatcagcgtgtctacacgtacatccagtcgcgtttttaccgggctccagaagtgatccttggggccaggtatggcatgcccattgatatgtggagcctgggctgcattttagcagagctcctgacgggttaccccctcttgcctggggaagatgaaggggaccagctggcctgtatgattgaactgttgggcatgccctcacagaaactgctggatgcatccaaacgagccaaaaattttgtgagctccaagggttatccccgttactgcactgtcacgactctctcagatggctctgtggtcctaaacggaggccgttcccggagggggaaactgaggggcccaccggagagcagagagtgggggaacgcgctgaaggggtgtgatgatccccttttccttgacttcttaaaacagtgtttagagtgggatcctgcagtgcgcatgaccccaggccaggctttgcggcacccctggctgaggaggcggttgccaaagcctcccaccggggagaaaacgtcagtgaaaaggataactgagagcaccggtgctatcacatctatatccaagttacctccaccttctagctcagcttccaaactgaggactaatttggcgcagatgacagatgccaatgggaatattcagcagaggacagtgttgccaaaacttgttagctgagctcacgtcccctgatgctggtaacctgaaagatacgacattgctgagccttactgggttgaaaaggagtagctcagacctgtttttatttgctcaataactctactcatttgtatcttttcagcacttaattttaatgtaagaaagttgttcattttgtttttataaaatacatgaggacaatgctttaagtttttatactttcagaaactttttgtgttctaaaagtacaatgagccttactgtatttagtgtggcagaataataacatcagtggcaggccactgattacttcatgactgccacgcatttacagattggtgtcaaagacattcactatgtttttatggttcatgttatatcctccccagggtgacagccccttaaggccctccttttccctccatgctccaggtccatgcacaggtgtagcatgtcctgcttccgtttttcataaattaatctgggtgttgggggtagtgggaggagaacggtcagaatcaaagtgacattctaagaaaaactgtaccttagagattttcctctagtgctcaaacaaatacaaaataagatccccaaggtttaaactgcccagttagcattctgacattctaaaagccggcaaagcagcttttagtggataaatgggaatggaaacgtgtgtgttcctccaaattttctagtatgatcggtgagctgttttgtaaagaagcctcatattacagagttgcttttgcacctaaatttagaattgtattccatgaactgttcctcccttttctctgcttttctcctctctgttcctcttttaataccacacgtctgttgcttgcatttagtttgtcttcttccttcagctgtgtatcccagactgttaatacagaaaagagacatttcagctgtgattatgaccattgtttcatattccaattaaaaaaagaacagcagcctagctacttaaggtggggatttccatagttccaaagaagatttagcagattagagtgagttcacacttttcaggtgccactgtaaggttctctcagcctgggaaactatcaactctttctttaaaaagaaagagggttgaaaatcctctggacgaacagaagtcactttggctgttcagtaaggccaatgttaacaacacgtttagaggaggaaaagttcaacctcaagttaaatggtttgacttattcttcgtatcattagaagaaccccagagatagcattcctctattttattttactttcttttggattgcactgattgtttttgtgggaatgacactttatctggcaaagtaactgagagtttggtaaaagaatattttcttctctgaataataattattttcacagtgaaaatttcagtattttatcactaatgtatgagcaatgatctatatcaatttcaaggcacgtgaaaaaaattttttagtatgtgcaatttaatatagaaagatttctgcctgtttggacaataggttttgggtagtacagattaggataagtaagcttatatatgcacagagattattgtattacctgtaaattgatttacaagtacttaaaagcgtggtccccagtgaggccaagaaagtttccggttaagttctttaataataatcctacagtttatcttaagaaaaaaaaaaaggtttgaaaaaaacactttaatttaggcttcgttggttgatggtggaaaaaaatgctcaggaaatatttcagatatttgccaaaaaaccagtaataaggttaccttattaaaatagtgatatttgctttactatttaaggtgtcactgataaattaatttgtacttctgtgtttagaaattatagcttcttttcccttagtcaaattttttagcatattatacacatttctgtgtaatctgtggaagtgcaataatatgttagtaagttacattttaaataatgctcatgtgacaatactcccaatcaatggcttatagaatttaaagatctgtatattagattttggcttaaaggcatgagaagtataagacttggtttggtggctttgtaagaccaccagcctcttaatgatggttagcttctttaggtcattaaatcaataaaaacatataatgctgttttgctcttctaatgctcctcttccatttccagttatcttcacatttacatttaaatatacaaacctgagcctgccattattaatttccctataaaatgacgatacatgtgaacatttataaatggactaatactgcttgtctttcccccaccgcacaaaactggttcttaagatgccagcaatgaatttgagactatctttatttataaatggaaaccggaaacttttataccaaactataataatgtgcagcactgtagggcttttttttttttccctccaaatacagtgaaatttttttattcacaagagctgccacatctcagcatttagtaatagagctgctttaataaaattctagtttgattgtcatgtcaaaaaaagaaaaatgttgcatctttgtgattttaaaacataaattaatgaaggctctgataggctattaggagttggcttggaaacagtttttggtctcacaggttaccattgtttggggatgtctgagctgttttcagatctaggaatagcacagtgttgtcttgtctttggcagtctcatttggctctgtttcttgcaccaccagcgtgttcattaccacttaaatatattgctacagcagtggaacaacagagtggtgcaagacactgtagattaacggtagaggagaaattgtgcccttagtgttaacaatgtgccttttgttctgaatgccatgttgtagggcatgcattttttggcctctttaactcttcgaattctagtcagtaagaatggaacccatctctgcaaagatacatctgtcttaaatatctagttacaggccttaatagaaaccataaggcatgactcatcttcaggcactgaaaaaagataaccatcaggtagtgttacacaaggacttcctatatttaaggggttaaagatggtctttgttgtatcttaacatcagactgatttttacattttttttttgttatgctaacactagacaaaaatcaactgtatttgtaaaaatttacctcaaaccatttaattttatagtgtgattaatcccagggcatttggtatgaaccaaagtgcattccttttatatgtgcctggctctagtaaggatggccagggatttttacaatttgggtgcaaggcacttaagccacttttaaacttaatgggtggtttggggtcgtgttaaatgactccatcagaatgttagaaaacactttaggcatcagtagcattgggccatattggaatcctaaagtgtgaattattttaaggagagcattcatttttgtaatttttttcatcaaaaatatttctggtaagcagaagactttttaaaaaaactgatctggtctcggtaaaggttttaatattgcccaacataatgctgtaatagcattaaaaaaagtatttgtgaactctgtttcttaggggcttgtacatctctctgctatggacatacataaaattaattgtaattatactcagctcaactgctacagttctgtctaggcagtggcttgggtttttatcgagcaacaacttagacacgtgactgtaatatgctgcaactgtgtgtactgaaaatatgtgaaaatggttgaatgtggactgtgtatatatgtatgtaaaaatttctgtgagatgctgctgtcgccacttaacattaaatatgttctagtggattttaatcctagtggccagttctatgatactgtatgtattatacagctgatgacaggagtaagactgtttagtgaatatctgttaaattttattgttgtggccagagataatttcagaataaaattttaatgtcctaccttacttctctcccctttctaactataatttaactcctgatctatttctggtattatcctttgtcaattagcctggagagggtttagaatgcaaaatggatagctctatatcagggtcttgagaagttaaaataattcattctactagtttgttcatagcaatactttattagttcaatataagtatgcagattccaagtggaaaaacaaaggttttagtaagtagttcttgcttttcccaggatattctattccttcacctgtcagatttttatgttaacttttttatatatagcctctgctgtgttctttattatgctagagcttcatatcttcttttattttaaccttcacaatgatagttaagctgggggagcagaacctgtcaattattccccaccagtcttcattcttttctctgcacaagttctggtaaattattctaatgtgctctaaccagttccacccaatgttttttaatgcttatgagtttgcagtttttgtacttggtggtctctgtggttcacatttttttgtgttgtagtgtctcctgcctcggttggctcagaaaataaggcctaggaactgcaattagctcatgatttgtcaagttcagttagtaccaagctaagagtttacttacagatgacagcaagcagatgctctagtaattcgtcagacattgcagggatattgtgtagtcagatattaccctcttgtggaaagaactacctcacatcattatttatttcccttctgttaccaacagccaaggaattacttagtgtggctccctgcatcaatactgggatatgcttaaacaagggaatgccataagagttcccaattgcctcgtcatagcctgggccatagatttttgttactgctaatcttgcttcttaaagttcacacccagtgcaaaaaacccaatcagcaaactaaccccaaaatccaatatatttagaaatgtaagtgttaagagatgtgcattatgtacaaaattgaaaattggtgctaaagtggcaatgtcaatttaaaatttcttgtccagatctgactgactgactcaggagattatagttcctactcattctctttccttttatcagatctttcaaaagcgctttttaaaattgatcaatgtgcaattctgtttgagtctctacagtcctatcccttttggaatgaacagctacacaaataaatattcttggaacttcgaagttgtcttcaaactagctctagaaaatgtccctagttgacattagtgttggtctgttagaaggggaaattgatttgactgcttcatgttttgaaaagagcattaagagggatttgaggaaggtatatgtggctttctttttttttcttaagtttgaattacacttgatttcctttgggttattaggcagataaacccttgtcattagtaatacttagcactgtccaaaatgaaaaatgactgccagtgtgttgcacatacataagaaaattacatcttactgcgaagtctttggtttgtttccttatttggtttgactttgacttactattttgctatggtcatatccttaatatctgcggtacatttcatatatatatatggggtgggagcataattgccattcccatgtgtctcaaggaagcttaatgaggaaactaatgagttaatattaactcttctgaagaaagctgacattttaggagtattaagtcatctgtcgttaaggagcagcaagaatatattatgattgtatcacatgttccagaagagcattaccccttacatagaaagctccttggagatttcatgatgttggatgaacatcagtttatccttatacatccctatgagctataattatcctcatttgatacttgaggaaactgaagtgacttgctccaaagttgactacaaaaacattgcagtttgaggcttaggttgtaatcaggtaattttggtcttggacagtaagggaaaatccataatacataaaacacaaaagtttagaaagggggggaagttgagctagcaatgggcatttctattatttaagttacatatcagtttccaggaatatttttcaaatgggacaaactaaaaagttgaggactagagcatcgtagtgtctaagtgcacctaataacttaatgcatgtgcacacaccctcagttaatttgtaagagagtgacttctcattgttatttgtggagaggctaattatagtagcttcattctttattttctgtgttcttaaatttttttttacatttgaaagtatgaaaatactatttttgacactttactgatactcagggattaaaagttaaattttactgactgtagcagcaggtaaatctcttaaatttactcaggtttcctatcctttgcctccatatttaagaaaatatagaatgcctgccagggaaatatataaaaataaaaatttcaaatacaattttaaaataccaatttgtaaataaaccaattttacaaactaaaatattgtgtctttccttgctttttatcccaatttatctcccctcctaagtttgaggagttttatatattaaggctatttcttcatttgtaaaaatgaagtatgctatttgcaaagcaaaagcccatgaaaagccccaaatcatttaagtaaagcttactgaattgttttcaattgttttgggagaaatgtaactaattataagcaatttatgtggaccagcagcaaataaatgtatgagtaca

SEQ ID NO: 128302 - DNA, 2209 bp, Homo sapiens
  Payload ID: 5124
  Gene Symbol: DYRK2
  Gene Name: dual-specificity tyrosine-(Y)-phosphorylation regulated kinase 2
  Uniprot ID: Q92630
  ENST ID: ENST00000393555
  CDS Start-End: 427-2013
cggtcttcggtcctcgcagcgcttccagctccccgcgcccctatgtgagggagacggggaggcccgcggcgcgcaggggagggcgaggcatgtgcacgggccggagggtgctgcagccgcccgaggaagaggaggacggcggcgaggaggagagcggggggctcgcggcggcgggccccggccgaggggatgcagtggactgtgtgtgtctggctgtagcagacgcgaggcggcgacgaggcgccggggacccgcgcgaggggcggccgggaggcggcggcggcggccgccagaagtagcagcaggaccggcggcggcgacggcagccctgaaatgcattttcctctccagcggccatgttaaccaggaaaccttcggccgccgctcccgccgcctacccgaccgattggcggcagtaagcacacaatgaatgatcacctgcatgtcggcagccacgctcacggacagatccaggttcaacagttgtttgaggataacagtaacaagcggacagtgctcacgacacaaccaaatgggcttacaacagtgggcaaaacgggcttgccagtggtgccagagcggcagctggacagcattcatagacggcaggggagctccacctctctaaagtccatggaaggcatggggaaggtgaaagccacccccatgacacctgaacaagcaatgaagcaatacatgcaaaaactcacagccttcgaacaccatgagattttcagctaccctgaaatatatttcttgggtctaaatgctaagaagcgccagggcatgacaggtgggcccaacaatggtggctatgatgatgaccagggatcatatgtgcaggtgccccacgatcacgtggcttacaggtatgaggtcctcaaggtcattgggaaggggagctttgggcaggtggtcaaggcctacgatcacaaagtccaccagcacgtggccctaaagatggtgcggaatgagaagcgcttccaccggcaagcagcggaggagatccgaatcctggaacacctgcggaagcaggacaaggataacacaatgaatgtcatccatatgctggagaatttcaccttccgcaaccacatctgcatgacgtttgagctgctgagcatgaacctctatgagctcatcaagaagaataaattccagggcttcagtctgcctttggttcgcaagtttgcccactcgattctgcagtgcttggatgctttgcacaaaaacagaataattcactgtgaccttaagcccgagaacattttgttaaagcagcagggtagaagcggtattaaagtaattgattttggctccagttgttacgagcatcagcgtgtctacacgtacatccagtcgcgtttttaccgggctccagaagtgatccttggggccaggtatggcatgcccattgatatgtggagcctgggctgcattttagcagagctcctgacgggttaccccctcttgcctggggaagatgaaggggaccagctggcctgtatgattgaactgttgggcatgccctcacagaaactgctggatgcatccaaacgagccaaaaattttgtgagctccaagggttatccccgttactgcactgtcacgactctctcagatggctctgtggtcctaaacggaggccgttcccggagggggaaactgaggggcccaccggagagcagagagtgggggaacgcgctgaaggggtgtgatgatccccttttccttgacttcttaaaacagtgtttagagtgggatcctgcagtgcgcatgaccccaggccaggctttgcggcacccctggctgaggaggcggttgccaaagcctcccaccggggagaaaacgtcagtgaaaaggataactgagagcaccggtgctatcacatctatatccaagttacctccaccttctagctcagcttccaaactgaggactaatttggcgcagatgacagatgccaatgggaatattcagcagaggacagtgttgccaaaacttgttagctgagctcacgtcccctgatgctggtaacctgaaagatacgacattgctgagccttactgggttgaaaaggagtagctcagacctgtttttatttgctcaataactctactcatttgtatcttttcagcacttaattttaatgtaagaaagttgttcattttgtttttataaaatacatgaggacaatgctttaagtttt

SEQ ID NO: 128303 - DNA, 568 bp, Homo sapiens
  Payload ID: 5124
  Gene Symbol: DYRK2
  Gene Name: dual-specificity tyrosine-(Y)-phosphorylation regulated kinase 2
  ENST ID: ENST00000543747
  CDS Start-End: 99-568
gaaaatgcatttatgtttaggggtgcgcatggcaggggaggggtctctgcggcgctttcggccggagggcagcagcgattggcggcagtaagcacacaatgaatgatcacctgcatgtcggcagccacgctcacggacagatccaggttcaacagttgtttgaggataacagtaacaagcggacagtgctcacgacacaaccaaatgggcttacaacagtgggcaaaacgggcttgccagtggtgccagagcggcagctggacagcattcatagacggcaggggagctccacctctctaaagtccatggaaggcatggggaaggtgaaagccacccccatgacacctgaacaagcaatgaagcaatacatgcaaaaactcacagccttcgaacaccatgagattttcagctaccctgaaatatatttcttgggtctaaatgctaagaagcgccagggcatgacaggtgggcccaacaatggtggctatgatgatgaccagggatcatatgtgcaggtgccccacgatcacgtggcttacaggtatgaggtcctcaaggtcattgggaa

SEQ ID NO: 128304 - DNA, 560 bp, Homo sapiens
  Payload ID: 5124
  Gene Symbol: DYRK2
  Gene Name: dual-specificity tyrosine-(Y)-phosphorylation regulated kinase 2
  ENST ID: ENST00000542503
  CDS Start-End: 59-560
agatgaaacgacaagtctccactggagggagagcctgtggtgcaccagaaaaggaaggatgcgaatgtgcttctcagtactcctcataatggaggcctgtattttgctgtggcatatgccagatttacttgtttttaacgtgtgtgtaaacttcggtatgctgttaattattagatgcttgactttgaagattggcggcagtaagcacacaatgaatgatcacctgcatgtcggcagccacgctcacggacagatccaggttcaacagttgtttgaggataacagtaacaagcggacagtgctcacgacacaaccaaatgggcttacaacagtgggcaaaacgggcttgccagtggtgccagagcggcagctggacagcattcatagacggcaggggagctccacctctctaaagtccatggaaggcatggggaaggtgaaagccacccccatgacacctgaacaagcaatgaagcaatacatgcaaaaactcacagccttcgaacaccatgagattttcagctaccctgaaatatatttcttgggtctaaatgctaaga

SEQ ID NO: 128305 - DNA, 2329 bp, Homo sapiens
  Payload ID: 5125
  Gene Symbol: DYRK3
  Gene Name: dual-specificity tyrosine-(Y)-phosphorylation regulated kinase 3
  Uniprot ID: O43781
  ENST ID: ENST00000367106
  CDS Start-End: 474-2180
ggcgctggcaagcgaagcttgggggtggggaggaggtagagtgagccctcagtaggagggacgagggcaggggtctgactgcctccccgggaccgcccccacctcctctctatcagggccccctccccccatccctgtctcaccgggcgcgggggacggggctagagcggagttagagcaagaagaatttccacccctggattccctctgaaaccctagatcggggtatatgttaagggattacgaaaatctaggactttttgtggggctttttattaaagggggggagcccgggagcaataccttggaaagaagccctgttgcttagagcggataaccaacggctgaactcttggggtttgctgtgaggggtgcggtctagcttcgaatgtacagtggtggagccacagtgttaaagaacagagaagtgatccttaatcatttagaattttgcctccaccatccaccagaaaatgaagtggaaagagaagttgggggatggtgtctatgacaccttcatgatgatagatgaaaccaaatgtcccccctgttcaaatgtactctgcaatccttctgaaccacctccacccagaagactaaatatgaccactgagcagtttacaggagatcatactcagcactttttggatggaggtgagatgaaggtagaacagctgtttcaagaatttggcaacagaaaatccaatactattcagtcagatggcatcagtgactctgaaaaatgctctcctactgtttctcagggtaaaagttcagattgcttgaatacagtaaaatccaacagttcatccaaggcacccaaagtggtgcctctgactccagaacaagccctgaagcaatataaacaccacctcactgcctatgagaaactggaaataattaattatccagaaatttactttgtaggtccaaatgccaagaaaagacatggagttattggtggtcccaataatggagggtatgatgatgcagatggggcctatattcatgtacctcgagaccatctagcttatcgatatgaggtgctgaaaattattggcaaggggagttttgggcaggtggccagggtctatgatcacaaacttcgacagtacgtggccctaaaaatggtgcgcaatgagaagcgctttcatcgtcaagcagctgaggagatccggattttggagcatcttaagaaacaggataaaactggtagtatgaacgttatccacatgctggaaagtttcacattccggaaccatgtttgcatggcctttgaattgctgagcatagacctttatgagctgattaaaaaaaataagtttcagggttttagcgtccagttggtacgcaagtttgcccagtccatcttgcaatctttggatgccctccacaaaaataagattattcactgcgatctgaagccagaaaacattctcctgaaacaccacgggcgcagttcaaccaaggtcattgactttgggtccagctgtttcgagtaccagaagctctacacatatatccagtctcggttctacagagctccagaaatcatcttaggaagccgctacagcacaccaattgacatatggagttttggctgcatccttgcagaacttttaacaggacagcctctcttccctggagaggatgaaggagaccagttggcctgcatgatggagcttctagggatgccaccaccaaaacttctggagcaatccaaacgtgccaagtactttattaattccaagggcataccccgctactgctctgtgactacccaggcagatgggagggttgtgcttgtggggggtcgctcacgtaggggtaaaaagcggggtcccccaggcagcaaagactgggggacagcactgaaagggtgtgatgactacttgtttatagagttcttgaaaaggtgtcttcactgggacccctctgcccgcttgaccccagctcaagcattaagacacccttggattagcaagtctgtccccagacctctcaccaccatagacaaggtgtcagggaaacgggtagttaatcctgcaagtgctttccagggattgggttctaagctgcctccagttgttggaatagccaataagcttaaagctaacttaatgtcagaaaccaatggtagtatacccctatgcagtgtattgccaaaactgattagctagtggacagagatatgcccagagatgcatatgtgtatatttttatgatcttacaaacctgcaaatggaaaaaatgcaagcccattggtggatgtttttgttagagtagactttttttaaacaagacaaaacatttttatatgattataaaa

SEQ ID NO: 128306 - DNA, 2218 bp, Homo sapiens
  Payload ID: 5125
  Gene Symbol: DYRK3
  Gene Name: dual-specificity tyrosine-(Y)-phosphorylation regulated kinase 3
  Uniprot ID: O43781
  ENST ID: ENST00000367108
  CDS Start-End: 280-1986
gcagtgtctggtcgagagtacccgtgggagcgtcgcgccgcggaggcagccgtcccggcgtaggtggcgtggccgaccggacccccaactggcgcctctccccgcgcggggtcccgagctaggagatgggaggcacagctcgtgggcctgggcggaaggatgcggggccgcctggggccgggctcccgccccagcagcggagtggtggagccacagtgttaaagaacagagaagtgatccttaatcatttagaattttgcctccaccatccaccagaaaatgaagtggaaagagaagttgggggatggtgtctatgacaccttcatgatgatagatgaaaccaaatgtcccccctgttcaaatgtactctgcaatccttctgaaccacctccacccagaagactaaatatgaccactgagcagtttacaggagatcatactcagcactttttggatggaggtgagatgaaggtagaacagctgtttcaagaatttggcaacagaaaatccaatactattcagtcagatggcatcagtgactctgaaaaatgctctcctactgtttctcagggtaaaagttcagattgcttgaatacagtaaaatccaacagttcatccaaggcacccaaagtggtgcctctgactccagaacaagccctgaagcaatataaacaccacctcactgcctatgagaaactggaaataattaattatccagaaatttactttgtaggtccaaatgccaagaaaagacatggagttattggtggtcccaataatggagggtatgatgatgcagatggggcctatattcatgtacctcgagaccatctagcttatcgatatgaggtgctgaaaattattggcaaggggagttttgggcaggtggccagggtctatgatcacaaacttcgacagtacgtggccctaaaaatggtgcgcaatgagaagcgctttcatcgtcaagcagctgaggagatccggattttggagcatcttaagaaacaggataaaactggtagtatgaacgttatccacatgctggaaagtttcacattccggaaccatgtttgcatggcctttgaattgctgagcatagacctttatgagctgattaaaaaaaataagtttcagggttttagcgtccagttggtacgcaagtttgcccagtccatcttgcaatctttggatgccctccacaaaaataagattattcactgcgatctgaagccagaaaacattctcctgaaacaccacgggcgcagttcaaccaaggtcattgactttgggtccagctgtttcgagtaccagaagctctacacatatatccagtctcggttctacagagctccagaaatcatcttaggaagccgctacagcacaccaattgacatatggagttttggctgcatccttgcagaacttttaacaggacagcctctcttccctggagaggatgaaggagaccagttggcctgcatgatggagcttctagggatgccaccaccaaaacttctggagcaatccaaacgtgccaagtactttattaattccaagggcataccccgctactgctctgtgactacccaggcagatgggagggttgtgcttgtggggggtcgctcacgtaggggtaaaaagcggggtcccccaggcagcaaagactgggggacagcactgaaagggtgtgatgactacttgtttatagagttcttgaaaaggtgtcttcactgggacccctctgcccgcttgaccccagctcaagcattaagacacccttggattagcaagtctgtccccagacctctcaccaccatagacaaggtgtcagggaaacgggtagttaatcctgcaagtgctttccagggattgggttctaagctgcctccagttgttggaatagccaataagcttaaagctaacttaatgtcagaaaccaatggtagtatacccctatgcagtgtattgccaaaactgattagctagtggacagagatatgcccagagatgcatatgtgtatatttttatgatcttacaaacctgcaaatggaaaaaatgcaagcccattggtggatgtttttgttagagtagactttttttaaacaagacaaaacatttttatatgattataaaagaattcttcaagggctaattacctaaccagcttgtattggccatctggaatatgcattaaatgactttttataggtcaatgca

SEQ ID NO: 128307 - DNA, 2163 bp, Homo sapiens
  Payload ID: 5125
  Gene Symbol: DYRK3
  Gene Name: dual-specificity tyrosine-(Y)-phosphorylation regulated kinase 3
  Uniprot ID: O43781
  ENST ID: ENST00000367109
  CDS Start-End: 169-1935
acttcccagccggggccagtcgggagcgaaagtgcgctgagctgcagtgtctggtcgagagtacccgtgggagcgtcgcgccgcggaggcagccgtcccggcgtaggtggcgtggccgaccggacccccaactggcgcctctccccgcgcggggtcccgagctaggagatgggaggcacagctcgtgggcctgggcggaaggatgcggggccgcctggggccgggctcccgccccagcagcggaggttgggggatggtgtctatgacaccttcatgatgatagatgaaaccaaatgtcccccctgttcaaatgtactctgcaatccttctgaaccacctccacccagaagactaaatatgaccactgagcagtttacaggagatcatactcagcactttttggatggaggtgagatgaaggtagaacagctgtttcaagaatttggcaacagaaaatccaatactattcagtcagatggcatcagtgactctgaaaaatgctctcctactgtttctcagggtaaaagttcagattgcttgaatacagtaaaatccaacagttcatccaaggcacccaaagtggtgcctctgactccagaacaagccctgaagcaatataaacaccacctcactgcctatgagaaactggaaataattaattatccagaaatttactttgtaggtccaaatgccaagaaaagacatggagttattggtggtcccaataatggagggtatgatgatgcagatggggcctatattcatgtacctcgagaccatctagcttatcgatatgaggtgctgaaaattattggcaaggggagttttgggcaggtggccagggtctatgatcacaaacttcgacagtacgtggccctaaaaatggtgcgcaatgagaagcgctttcatcgtcaagcagctgaggagatccggattttggagcatcttaagaaacaggataaaactggtagtatgaacgttatccacatgctggaaagtttcacattccggaaccatgtttgcatggcctttgaattgctgagcatagacctttatgagctgattaaaaaaaataagtttcagggttttagcgtccagttggtacgcaagtttgcccagtccatcttgcaatctttggatgccctccacaaaaataagattattcactgcgatctgaagccagaaaacattctcctgaaacaccacgggcgcagttcaaccaaggtcattgactttgggtccagctgtttcgagtaccagaagctctacacatatatccagtctcggttctacagagctccagaaatcatcttaggaagccgctacagcacaccaattgacatatggagttttggctgcatccttgcagaacttttaacaggacagcctctcttccctggagaggatgaaggagaccagttggcctgcatgatggagcttctagggatgccaccaccaaaacttctggagcaatccaaacgtgccaagtactttattaattccaagggcataccccgctactgctctgtgactacccaggcagatgggagggttgtgcttgtggggggtcgctcacgtaggggtaaaaagcggggtcccccaggcagcaaagactgggggacagcactgaaagggtgtgatgactacttgtttatagagttcttgaaaaggtgtcttcactgggacccctctgcccgcttgaccccagctcaagcattaagacacccttggattagcaagtctgtccccagacctctcaccaccatagacaaggtgtcagggaaacgggtagttaatcctgcaagtgctttccagggattgggttctaagctgcctccagttgttggaatagccaataagcttaaagctaacttaatgtcagaaaccaatggtagtatacccctatgcagtgtattgccaaaactgattagctagtggacagagatatgcccagagatgcatatgtgtatatttttatgatcttacaaacctgcaaatggaaaaaatgcaagcccattggtggatgtttttgttagagtagactttttttaaacaagacaaaacatttttatatgattataaaagaattcttcaagggctaattacctaaccagcttgtattggccatctggaatatgcattaaatgactttttataggtcaa

SEQ ID NO: 128308 - DNA, 870 bp, Homo sapiens
  Payload ID: 5125
  Gene Symbol: DYRK3
  Gene Name: dual-specificity tyrosine-(Y)-phosphorylation regulated kinase 3
  ENST ID: ENST00000441486
  CDS Start-End: 140-870
agcggaggtaacggcgccacggggtaacgggctggaggcgccacagggagcggctggcgctgtggtggagccacagtgttaaagaacagagaagtgatccttaatcatttagaattttgcctccaccatccaccagaaaatgaagtggaaagagaagttgggggatggtgtctatgacaccttcatgatgatagatgaaaccaaatgtcccccctgttcaaatgtactctgcaatccttctgaaccacctccacccagaagactaaatatgaccactgagcagtttacaggagatcatactcagcactttttggatggaggtgagatgaaggtagaacagctgtttcaagaatttggcaacagaaaatccaatactattcagtcagatggcatcagtgactctgaaaaatgctctcctactgtttctcagggtaaaagttcagattgcttgaatacagtaaaatccaacagttcatccaaggcacccaaagtggtgcctctgactccagaacaagccctgaagcaatataaacaccacctcactgcctatgagaaactggaaataattaattatccagaaatttactttgtaggtccaaatgccaagaaaagacatggagttattggtggtcccaataatggagggtatgatgatgcagatggggcctatattcatgtacctcgagaccatctagcttatcgatatgaggtgctgaaaattattggcaaggggagttttgggcaggtggccagggtctatgatcacaaacttcgacagtacgtggccctaaaaatggtgcgcaatgagaagcgctttcatcgtcaagcagctgaggagatccggattttggagcatcttaagaaacagga

SEQ ID NO: 128309 - DNA, 1840 bp, Homo sapiens
  Payload ID: 5126
  Gene Symbol: DYRK4
  Gene Name: dual-specificity tyrosine-(Y)-phosphorylation regulated kinase 4
  Uniprot ID: Q9NR20
  ENST ID: ENST00000010132
  CDS Start-End: 143-1705
ccttctacagaacaccagtgttacttcactcccctttgtggacaccaaggggaagaagaatacggtaagcttcccacacattagcaagaaagtcctgctgaagtcatccctgctgtatcaggagaatcaagctcacaatcagatgccggcctcagagctcaaggcttcagaaatacctttccaccctagcattaaaacccaggatcccaaggcagaggagaagtcaccaaagaagcaaaaggtgactctgacagcggcagaggccctaaagctttttaagaaccagctgtctccatatgaacaaagtgaaatcctgggctacgcggagctgtggttcctgggtcttgaagccaagaagctcgacacggctcctgagaaatttagcaagacgagttttgatgatgagcatggcttctatctgaaggtcctgcatgatcacattgcctaccgctatgaagttctggagacaatcgggaaggggtcctttggacaggtggccaagtgcttggatcacaaaaacaatgagctggtggccctgaaaatcatcaggaacaagaagaggtttcaccagcaggccctgatggagctgaagatcctggaagctctcagaaagaaggacaaagacaacacctacaatgtggtgcatatgaaggactttttctactttcgcaatcacttctgcatcacctttgagctcctgggaatcaacttgtatgagttgatgaagaataacaactttcaaggcttcagtctgtccatagttcggcgcttcactctctctgttttgaagtgcttgcagatgctttcggtagagaaaatcattcactgtgatctcaagcccgaaaatatagtgctataccaaaagggccaagcctctgttaaagtcattgactttggatcaagctgttatgaacaccagaaagtatacacgtacatccaaagccggttctaccgatccccagaagtgatcctgggccacccctacgacgtggccattgacatgtggagcctgggctgcatcacggcggagttgtacacgggctaccccctgttccccggggagaatgaggtggagcagctggcctgcatcatggaggtgctgggtctgccgccagccggcttcattcagacagcctccaggagacagacattctttgattccaaaggttttcctaaaaatataaccaacaacagggggaaaaaaagatacccagattccaaggacctcacgatggtgctgaaaacctatgacaccagcttcctggactttctcagaaggtgtttggtatgggaaccttctcttcgcatgaccccggaccaggccctcaagcatgcttggattcatcagtctcggaacctcaagccacagcccaggccccagaccctgaggaaatccaattcctttttcccctctgagacaaggaaggacaaggttcaaggctgtcatcactcgagcagaaaagcagatgagatcaccaaagagactacagagaaaacaaaagatagccccacgaagcatgttcagcattcaggtgatcagcaggactgtctccagcacggagctgacactgttcagctgcctcaactggtagacgctcccaagaagtcagaggcagctgtcggggcggaggtgtccatgacctccccaggacagagcaaaaacttctccctcaagaacacaaacgttttaccccctattgtatgacctttgctgagggtatgtcctgctcctttccaccagtgatttgtattaagacagcacttatattgtacaatacttcagactgttttttttaaatacataaaactttatgttaaaaaactctattaacatggccaa

SEQ ID NO: 128310 - DNA, 470 bp, Homo sapiens
  Payload ID: 5126
  Gene Symbol: DYRK4
  Gene Name: dual-specificity tyrosine-(Y)-phosphorylation regulated kinase 4
  ENST ID: ENST00000544671
  CDS Start-End: 1-361
ttccaaaggttttcctaaaaatataaccaacaacagggggaaaaaaagatacccagattccaaggacctcacgatggtgctgaaaacctatgacaccagcttcctggactttctcagaaggtgtttggtatgggaaccttctcttcgcatgaccccggaccaggccctcaagcatgcttggattcatcagtctcggaacctcaagccacagcccaggccccagaccctgaggaaatccaattcctttttcccctctgagacaaggaaggacaaggttcaaggctgtcatcactcgagcagaaaaggtacagcctgtcaaataaccagtcctagtcccacagtccgggaattaatattctagaattctgtaaatctccttgtgatatttttgaagccccagttctgtagtctggaaattaaaatctttgtttttaatattctgtttaatatgctgtttaagcatttctgaa

SEQ ID NO: 128311 - DNA, 989 bp, Homo sapiens
  Payload ID: 5126
  Gene Symbol: DYRK4
  Gene Name: dual-specificity tyrosine-(Y)-phosphorylation regulated kinase 4
  ENST ID: ENST00000539309
  CDS Start-End: 24-155
ggcgggcggtcagcgccggcctcatgcagctcctcccgccgcctatccgcaccggaacaaagcttaagtggagactcggcaaaagcaggaggccatttagtggaaaagttcaaaccgtggaaacaacaaatgaaaatgtcctttgtcttgcttgagcgatttgatcacctacatgtggtcgaatgcaaacggaatccctgcaaaccctgcactgccatactttctgccccaaagacagcccccagggcataaagatcaagctactggcaattgcagtagaaatcctaaaatcataacaggactcaaatggatgctaaaaagccaaggaaatgtgatttgactcccttcctggttttgaaagcaagaaagaaacaaaagttcacctctgcgaaggttggaagtaaactttcggttcagatccagaagccaccttccaatatcaagaactccagaatgacccaagtctttcataagaacaccagtgttacttcactcccctttgtggacaccaaggggaagaagaatacggtaagcttcccacacattagcaagaaagtcctgctgaagtcatccctgctgtatcagggaccaaataagataataggtgcgaaggtgccaactgaaagaggcgtcacacacacataagtccatgtgctcctgggcaagtcactttgtcttgttgggagctcaccttcttaagagcagcagtgaaaaactgttcccatctcttcccatagtgagatgttgctggggttgtcagcagcatacggtaaggtacaggggtctccccaggaatagtgtcagtcagacagatgcttcctttgggagagaggtagggagaaccttctgtctcttaatcgctgttttctccctggagaggtaggtaaagagcctggctgaaggtgggtgtctttggttaaataaatggtttatggcccccaggagagtcctaagtagttatttattgcaaacctcttttcctggacagg

SEQ ID NO: 128312 - DNA, 2068 bp, Homo sapiens
  Payload ID: 5126
  Gene Symbol: DYRK4
  Gene Name: dual-specificity tyrosine-(Y)-phosphorylation regulated kinase 4
  ENST ID: ENST00000543431
  CDS Start-End: 43-1947
tctcacagcctcccgcagcggcgggcggtcagcgccggcctcatgcagctcctcccgccgcctatccgcaccggaacaaagactcaaatggatgctaaaaagccaaggaaatgtgatttgactcccttcctggttttgaaagcaagaaagaaacaaaagttcacctctgcgaaggttggaagtaaactttcggttcagatccagaagccaccttccaatatcaagaactccagaatgacccaagtctttcataagaacaccagtgttacttcactcccctttgtggacaccaaggggaagaagaatacggtaagcttcccacacattagcaagaaagtcctgctgaagtcatccctgctgtatcaggagaatcaagctcacaatcagatgccggcctcagagctcaaggcttcagaaatacctttccaccctagcattaaaacccaggatcccaaggcagaggagaagtcaccaaagaagcaaaaggtgactctgacagcggcagaggccctaaagctttttaagaaccagctgtctccatatgaacaaagtgaaatcctgggctacgcggagctgtggttcctgggtcttgaagccaagaagctcgacacggctcctgagaaatttagcaagacgagttttgatgatgagcatggcttctatctgaaggtcctgcatgatcacattgcctaccgctatgaagttctggagacaatcgggaaggggtcctttggacaggtggccaagtgcttggatcacaaaaacaatgagctggtggccctgaaaatcatcaggaacaagaagaggtttcaccagcaggccctgatggagctgaagatcctggaagctctcagaaagaaggacaaagacaacacctacaatgtggtgcatatgaaggactttttctactttcgcaatcacttctgcatcacctttgagctcctgggaatcaacttgtatgagttgatgaagaataacaactttcaaggcttcagtctgtccatagttcggcgcttcactctctctgttttgaagtgcttgcagatgctttcggtagagaaaatcattcactgtgatctcaagcccgaaaatatagtgctataccaaaagggccaagcctctgttaaagtcattgactttggatcaagctgttatgaacaccagaaagtatacacgtacatccaaagccggttctaccgatccccagaagtgatcctgggccacccctacgacgtggccattgacatgtggagcctgggctgcatcacggcggagttgtacacgggctaccccctgttccccggggagaatgaggtggagcagctggcctgcatcatggaggtgctgggtctgccgccagccggcttcattcagacagcctccaggagacagacattctttgattccaaaggttttcctaaaaatataaccaacaacagggggaaaaaaagatacccagattccaaggacctcacgatggtgctgaaaacctatgacaccagcttcctggactttctcagaaggtgtttggtatgggaaccttctcttcgcatgaccccggaccaggccctcaagcatgcttggattcatcagtctcggaacctcaagccacagcccaggccccagaccctgaggaaatccaattcctttttcccctctgagacaaggaaggacaaggttcaaggctgtcatcactcgagcagaaaagatgagatcaccaaagagactacagagaaaacaaaagatagccccacgaagcatgttcagcattcaggtgatcagcaggactgtctccagcacggagctgacactgttcagctgcctcaactggtagacgctcccaagaagtcagaggcagctgtcggggcggaggtgtccatgacctccccaggacagagcaaaaacttctccctcaagaacacaaacgttttaccccctattgtatgacctttgctgagggtatgtcctgctcctttccaccagtgatttgtattaagacagcacttatattgtacaatacttcagactgttttttttaaatacataaaactttatgttaaaaaactct

SEQ ID NO: 128313 - DNA, 3272 bp, Homo sapiens
  Payload ID: 5126
  Gene Symbol: DYRK4
  Gene Name: dual-specificity tyrosine-(Y)-phosphorylation regulated kinase 4
  Uniprot ID: Q9NR20
  ENST ID: ENST00000540757
  CDS Start-End: 161-1723
agtgtgagctgttgaaagcctgcagctaaacaccagtgttacttcactcccctttgtggacaccaaggggaagaagaatacggtaagcttcccacacattagcaagaaagtcctgctgaagtcatccctgctgtatcaggagaatcaagctcacaatcagatgccggcctcagagctcaaggcttcagaaatacctttccaccctagcattaaaacccaggatcccaaggcagaggagaagtcaccaaagaagcaaaaggtgactctgacagcggcagaggccctaaagctttttaagaaccagctgtctccatatgaacaaagtgaaatcctgggctacgcggagctgtggttcctgggtcttgaagccaagaagctcgacacggctcctgagaaatttagcaagacgagttttgatgatgagcatggcttctatctgaaggtcctgcatgatcacattgcctaccgctatgaagttctggagacaatcgggaaggggtcctttggacaggtggccaagtgcttggatcacaaaaacaatgagctggtggccctgaaaatcatcaggaacaagaagaggtttcaccagcaggccctgatggagctgaagatcctggaagctctcagaaagaaggacaaagacaacacctacaatgtggtgcatatgaaggactttttctactttcgcaatcacttctgcatcacctttgagctcctgggaatcaacttgtatgagttgatgaagaataacaactttcaaggcttcagtctgtccatagttcggcgcttcactctctctgttttgaagtgcttgcagatgctttcggtagagaaaatcattcactgtgatctcaagcccgaaaatatagtgctataccaaaagggccaagcctctgttaaagtcattgactttggatcaagctgttatgaacaccagaaagtatacacgtacatccaaagccggttctaccgatccccagaagtgatcctgggccacccctacgacgtggccattgacatgtggagcctgggctgcatcacggcggagttgtacacgggctaccccctgttccccggggagaatgaggtggagcagctggcctgcatcatggaggtgctgggtctgccgccagccggcttcattcagacagcctccaggagacagacattctttgattccaaaggttttcctaaaaatataaccaacaacagggggaaaaaaagatacccagattccaaggacctcacgatggtgctgaaaacctatgacaccagcttcctggactttctcagaaggtgtttggtatgggaaccttctcttcgcatgaccccggaccaggccctcaagcatgcttggattcatcagtctcggaacctcaagccacagcccaggccccagaccctgaggaaatccaattcctttttcccctctgagacaaggaaggacaaggttcaaggctgtcatcactcgagcagaaaagcagatgagatcaccaaagagactacagagaaaacaaaagatagccccacgaagcatgttcagcattcaggtgatcagcaggactgtctccagcacggagctgacactgttcagctgcctcaactggtagacgctcccaagaagtcagaggcagctgtcggggcggaggtgtccatgacctccccaggacagagcaaaaacttctccctcaagaacacaaacgttttaccccctattgtatgacctttgctgagggtatgtcctgctcctttccaccagtgatttgtattaagacagcacttatattgtacaatacttcagactgttttttttaaatacataaaactttatgttaaaaaactctattaacatggccaattggcatgactcctcttatgagggatgggggaggatgtccttgcacttaaactcattccatatgcatctgtgtgtgtagagggggcgggtagttttgaactctcagtgttacagcatcattaatggaactccaaacaaaagaaattttttttcttcttgcccatgactgccaacctatgtcaggatttttgtttgaaaatgatagaagctgaattcaaaagcagtttaaacaacggaagacacttattgacttacataattggggcatcagaaaaggtagatgtagtttcaggcgcagcaggatccaggaattcaaatgaggttgtagggctcagactccctcttcatctattagccttgcttctcactatggttaacttcatcctgatgtcaggccctgctcagaagttaaccgccaacatccagtcaaaaagatacaggcttccttgctaacagggagtctccaaaatgattgtgacacagaaattgtgactgggatactgggatgcttggccagtctgggccccaagcccacagtgatggtgaaggcactgtgactgatgcttctctagactagagcaagggatggaaggtttcccaaaggaagggaagctaagtaaacaagcaggacatgttcactcatctaccatacgccaaatctaagtatgtcttcttacttccctttctaatcctcatctacacaaatacataatttttatgtggttgtcataggacagatagaattttacgtgaaacttaagatcataacatcagaaacaacatagagtatataaaaatagttttcttttttgcttgccatttggaataacctccccccagtacagttttcattttaattgttgcataatattttatgaagggggacaccaggtcattgaagcaatggatttggatgtaatctcccaggaaaaatcttgagttagaatagcagagggttgagagaaagtcccaggaaagacaaatatataaggagttgccagagttgaggaggtcctccaagagacccagagatacagaaagaaaattagaagccaatggagaagtttctagacagaaagaggagtcaagatagaaaattccacagaaaatccagggtaagaacagaaaatatttcttaagtggggtgatatggacattaagtcagagcagtgttagaacaggtaacttatcccagtttctatagccagaaagccacaaaaccagcaatagaactcagatccttgggaacattcttgaaacgatcttcaaccatggatgaagttggaggtggacactgttctgcagctctacagagaataagaagccaggtcttcaacattgtaatcaggatgattttgattgaataattcaaaagtatcttctgattttcatggttataaaaggttaaaatgaa

SEQ ID NO: 128314 - DNA, 945 bp, Homo sapiens
  Payload ID: 5126
  Gene Symbol: DYRK4
  Gene Name: dual-specificity tyrosine-(Y)-phosphorylation regulated kinase 4
  ENST ID: ENST00000539701
  CDS Start-End: 37-243
agcctcccgcagcggcgggcggtcagcgccggcctcatgcagctcctcccgccgcctatccgcaccggaacaaagactcaaatggatgctaaaaagccaaggaaatgtgatttgactcccttcctggttttgaaagcaagaaagaaacaaaagttcacctctgcgaagggccccactctttctgagatctacatggaagagacaaggaggagtcagctgagaaaacaggaaaatcgcctgtgaagtatgactgaggcgggatggtgtgatggaggtgtgcctttccgaaaaggctgggtggcctgaggcctgcagagagtccagttgctatcttccctgaacagtccaggttggaagtaaactttcggttcagatccagaagccaccttccaatatcaagaactccagaatgacccaagtctttcataagaacaccagtgttacttcactcccctttgtggacaccaaggggaagaagaatacggtaagcttcccacacattagcaagaaagtcctgctgaagtcatccctgctgtatcagggaccaaataagataataggtgcgaaggtgccaactgaaagaggcgtcacacacacataagtccatgtgctcctgggcaagtcactttgtcttgttgggagctcaccttcttaagagcagcagtgaaaaactgttcccatctcttcccatagtgagatgttgctggggttgtcagcagcatacggtaaggtacaggggtctccccaggaatagtgtcagtcagacagatgcttcctttgggagagaggtagggagaaccttctgtctcttaatcgctgttttctccctggagaggtaggtaaagagcctggctgaaggtgggtgtctttggttaaataaatggtttatggcccccaggagagtcctaagtagttatttattgcaaacctcttttcctggacagg

SEQ ID NO: 128315 - DNA, 454 bp, Homo sapiens
  Payload ID: 5126
  Gene Symbol: DYRK4
  Gene Name: dual-specificity tyrosine-(Y)-phosphorylation regulated kinase 4
  ENST ID: ENST00000537719
  CDS Start-End: 33-212
tcccgcagcggcgggcggtcagcgccggcctcatgcagctcctcccgccgcctatccgcaccggaacaaagactcaaatggatgctaaaaagccaaggaaatgtgatttgactcccttcctggttttgaaagcaagaaagaaacaaaagttcacctctgcgaaggaagagacaaggaggagtcagctgagaaaacaggaaaatcgcctgtgaagtatgactgaggcgggatggtgtgatggaggtgtgcctttccgaaaaggctgggtggcctgaggcctgcagagagtccagttgctatcttccctgaacagtccaggttggaagtaaactttcggttcagatccagaagccaccttccaatatcaagaactccagaatgacccaagtctttcataagaacaccagtgttacttcactcccctttgtggacaccaaggggaagaagaatacgg

SEQ ID NO: 128316 - DNA, 5049 bp, Homo sapiens
  Payload ID: 5127
  Gene Symbol: DYM
  Gene Name: dymeclin
  Uniprot ID: Q7RTS9
  ENST ID: ENST00000269445
  CDS Start-End: 459-2468
gctttgcggtagcccaggaggtactaggagggcggaggcacgaataacacccaaaggactacagtttccagaagcccgcgcgcgccgcgtgccacgtgaccacctggctggcgcgcgcgcctgggggtctggtccctagccgcgttctcggtcgcttccctcttctctcgccgcctcctggcctccgcaccgacgcggcccgggctggagccgagccggggccgagctgcaggccggaccggagccggatctgtacccgctgagacgtggaaacatggaggcctgagccggtgtgcgccacctgggctgcggcggcgacagcgacttctcctgacccctctgccaccctcccatccgtccgcgggtccgtggagctggagcagatcccccagccggctgagacaggttgtcttttggaaatgcaggtttaaggacaaattatctgcttaagctagaagatgggatcgaatagcagcagaatcggcgatcttcctaaaaatgagtacttgaaaaagttatcaggcacggaatctatctctgagaatgacccgttctggaatcagcttctctcattttctttccctgcaccaactagcagtagtgagttgaaactcttggaggaagcaaccatttcagtctgcaggtcattagttgaaaacaatcctcgaacaggaaatcttggtgcactaattaaggtcttcctttctagaaccaaagaactaaaactttcagcagaatgtcagaaccacatcttcatttggcagacacacaatgctttgtttattatttgctgtttgctgaaagtgttcatctgtcagatgtcagaggaggaattacaacttcattttacttatgaagaaaaatctcctggcaattacagttctgactcagaagatcttttggaagaattgctgtgctgtttgatgcagttgatcactgatattccactcttagatattacatatgaaatatcagtagaagctatatcaacaatggttgttttcctttcctgccaactcttccacaaagaagttttgcgacagagcatcagccacaagtatttgatgcgaggtccatgtcttccatacaccagcaaacttgtgaagaccttattatataactttatcagacaagaaaagccacctcctccaggggcccatgttttccctcagcagtcggatgggggaggactgctttatggacttgcatcaggagtagcaacaggactctggactgtcttcacactaggtggtgtgggcagcaaagcggctgcctctccagagctttcttcccctctggccaaccagagtctcctgcttctgctggtgttggccaatctgacagatgcctcagatgcgccaaacccctacagacaagccattatgtccttcaagaacacacaagatagcagtcctttcccctcatcaattccacatgccttccagatcaactttaatagtttgtacacagctctttgtgaacagcagacatctgatcaagcaactctcctcttgtataccttgctccatcaaaatagtaatattagaacatacatgttggctcgcacagatatggaaaatcttgttttaccaattcttgagattctgtatcatgttgaagaaaggaattcacaccatgtgtatatggcccttataatattgttgatccttacggaagatgatggcttcaacagatccattcatgaagtgatactaaaaaatattacttggtattcagaacgagttttaactgaaatctccttggggagtctcctgatcctggtggtaataagaaccattcaatacaacatgactaggacacgagacaagtaccttcacacaaattgtttggcagctttagcaaatatgtcggcacagtttcgttctctccatcagtatgctgcccagaggatcatcagtttattttctttgctgtctaaaaaacacaacaaagttctggaacaagccacacagtccttgagaggttcgctgagttctaatgatgttcctctaccagattatgcacaagacctaaatgtcattgaagaagtgattcgaatgatgttagagatcatcaactcctgcctgacaaattcccttcaccacaacccaaacttggtatacgccctgctttacaaacgcgatctctttgaacaatttcgaactcatccttcatttcaggatataatgcaaaatattgatctggtgatctccttctttagctcaaggttgctgcaagctggagctgagctgtcagtggaacgggtcctggaaatcattaagcaaggcgtcgttgcgctgcccaaagacagactgaagaaatttccagaattgaaattcaaatatgtggaagaggagcagcccgaggagttttttatcccctatgtctggtctcttgtctacaactcagcagtcggcctgtactggaatccacaggacatccagctgttcaccatggattccgactgagggcaggatgctctcccacccggacccctccagccaagcagcccttcaagttcttttatttctgggtaacagaagtagacagacaggttacttggtgtatcttctgttaaagaggattgcacgagtgtgttttcctcacacactttgatttggagaattggtgctagttggcaatagataactcagcgtagatagtattgcaaaaaggggaggaaatacacaacaataataaatgtaaaaacctgctattcaacatgcagttttatttcgaagccaaaaatctagagctttcccaagatcctgttgccttaggcacatcacacttcaacagtgcacactatccaacagtgcacactattcaacagtgcacactattcaaaagcgtagactatttttttgcatgttcaagatatttgttttggtcttatgtgtgtgtgagagagagagattcctttgacattaaggagcatcaatgagaaaagatgatgaggcaggaattaataaagaaatgaagtcgtgtgtgtttggttgcctgtcagagggcacacaatttcataaacaccatgcctggacaatttgatattaatatttaacacctctgcatcttttcttaaaaaagaatatgggccagatacagtggctcacatttgtaatcccagcactttggggagccaagttagcagaatcccttgagcacaggaatctgaaaccagcttgggcaacatagtgagatcccatctctacaaaaaacttaaaaattagccaggcatgatggcacattcctgtagtcctagctactcaggaggctaaggtaggaggattgcctgagcccaggagttcaaggctgcagtgagctaagaacgtgccagtacactccagcctgagccacaaagtgagaccctgtctcgcaaaaaaaaaaaaagaaagaaaagaaaaagaaaatggctacttctcatgaagcccagattaacttttctgtgaatatggcctgtgaactgttgctggaattaaattggagtctagcacaaattaagttaatctactctgtattaatcattgggaaaaagaaaagcttcatttgaaaacagtctttttccttcacccacactaatagaaaaaggagagtaatttgttcatactgtattccacgtgggatgaaaagcatgttttgctctttgtttctgggccggtgtgatccgtgtgttggtgcctgagctggaggaaggagcttcttgcagggaaacagccactggggccacattgagggccagttgggaccttcctttccagtcacactctgtgtcctcacgggccccttcacagtctagataaggagcctagtttcattctcaaagaaaaagtatttggtcttcaacatagaaagcacaaaagcccagacgagactgagcacactgttcgaatccactgccagctcatctgtgtcagggctggcttctcctgtcctgtgtcccagggctgcaggcccgtgttatttgagtccatcaaatcttccgagggcctcggaggaaccattctcagtcaccccaagctctgtaaaaggtcaaaacactggcagcctctcagtgcaccactgtgtgggctccacacgggaaggcctggccaagctgtgctcttagaggctgtcgaggtagggcaggaagcttccctatcctcgtctggatggaatgaaacagaggttccctaaggccaagggactcgtggagcgcccatcccgggtggggtcccagaggtgagtgcagcttgcctcctgtccccaaggggcttgttctgtcaggcctcctccagtcactgctggagtggggactctgactcctgtgttcacctcagagcccatgtacaggctagaggtgaggcttggcaacaacttctactaatacttagctttgtggcagagccagtctgaaggaggagaagcgctctcagccagcagggggagtgatgattatcatttcaggtagcaaggatatgtatttactatgtggggaaataatttgcaactttaatttgtttccaaagcattttgattggcttccttttcctttaaaccaaaaaattgtttaaatgtttaagggtcatgtggaacagctgagcttctggcaggaccacagaactgtcctctgagtctgagggctgggcagtgccacaggacagtccctgggctgcaggactgtcagtgcttgttgtgtgaggaaatgaggcccttcaaaaacccagtcatcttgacagagggcacactcccaaggaaggcctgactggggaatcatacagcctctcctccaggcctctgggctcactgaggtgcccccagaaccctgattgccctcccctctttcccttttctcattcatcacacagtagaagcactcactagctaacagctcagctggggcagcagcctccatggaggcctgcaagtgatgctcccagtcctggttcccgctcaggagggaggccccaccacgtgcatcactgcctcagctctgcaaagtcaccagaggcttcttcctgatttttgtgaaagatttattatatggcaataaatctgaatgataaactttca

SEQ ID NO: 128317 - DNA, 2147 bp, Homo sapiens
  Payload ID: 5127
  Gene Symbol: DYM
  Gene Name: dymeclin
  Uniprot ID: Q7RTS9
  ENST ID: ENST00000442713
  CDS Start-End: 322-1761
agccgcgttctcggtcgcttccctcttctctcgccgcctcctggcctccgcaccgacgcggcccgggctggagccgagccggggccgagctgcaggccggaccggagccggatctgtacccgctgagacgtggaaacatggaggcctgagccggtgtgcgccacctgggctgcggcggcgacagcgacttctcctgacccctctgccaccctcccatccgtccgcgggtccgtggagctggagcagatcccccagccggctgagacaggttgtcttttggaaatgcaggtttaaggacaaattatctgcttaagctagaagatgggatcgaatagcagcagaatcggcgatcttcctaaaaatgagtacttgaaaaagttatcaggcacggaatctatctctgagaatgacccgttctggaatcagcttctctcattttctttccctgcaccaactagcagtagtgagttgaaactcttggaggaagcaaccatttcagtctgcaggtcattagcaggactctggactgtcttcacactaggtggtgtgggcagcaaagcggctgcctctccagagctttcttcccctctggccaaccagagtctcctgcttctgctggtgttggccaatctgacagatgcctcagatgcgccaaacccctacagacaagccattatgtccttcaagaacacacaagatagcagtcctttcccctcatcaattccacatgccttccagatcaactttaatagtttgtacacagctctttgtgaacagcagacatctgatcaagcaactctcctcttgtataccttgctccatcaaaatagtaatattagaacatacatgttggctcgcacagatatggaaaatcttgttttaccaattcttgagattctgtatcatgttgaagaaaggaattcacaccatgtgtatatggcccttataatattgttgatccttacggaagatgatggcttcaacagatccattcatgaagtgatactaaaaaatattacttggtattcagaacgagttttaactgaaatctccttggggagtctcctgatcctggtggtaataagaaccattcaatacaacatgactaggacacgagacaagtaccttcacacaaattgtttggcagctttagcaaatatgtcggcacagtttcgttctctccatcagtatgctgcccagaggatcatcagtttattttctttgctgtctaaaaaacacaacaaagttctggaacaagccacacagtccttgagaggttcgctgagttctaatgatgttcctctaccagattatgcacaagacctaaatgtcattgaagaagtgattcgaatgatgttagagatcatcaactcctgcctgacaaattcccttcaccacaacccaaacttggtatacgccctgctttacaaacgcgatctctttgaacaatttcgaactcatccttcatttcaggatataatgcaaaatattgatctggtgatctccttctttagctcaaggttgctgcaagctggagctgagctgtcagtggaacgggtcctggaaatcattaagcaaggcgtcgttgcgctgcccaaagacagactgaagaaatttccagaattgaaattcaaatatgtggaagaggagcagcccgaggagttttttatcccctatgtctggtctcttgtctacaactcagcagtcggcctgtactggaatccacaggacatccagctgttcaccatggattccgactgagggcaggatgctctcccacccggacccctccagccaagcagcccttcaagttcttttatttctgggtaacagaagtagacagacaggttacttggtgtatcttctgttaaagaggattgcacgagtgtgttttcctcacacactttgatttggagaattggtgctagttggcaatagataactcagcgtagatagtattgcaaaaaggggaggaaatacacaacaataataaatgtaaaaacctgctattcaacatgcagttttatttcgaagccaaaaatctagagctttcccaagatcctgttgccttaggcacatcacacttcaacagtgcacactatccaacagtgcacactattcaacagtgcacactattcaaaagcgta

SEQ ID NO: 128318 - DNA, 961 bp, Homo sapiens
  Payload ID: 5127
  Gene Symbol: DYM
  Gene Name: dymeclin
  ENST ID: ENST00000418472
  CDS Start-End: 176-295
agttttgtgaatgatttctgtaattctctttgctaagtagtgagttgaaactcttggaggaagcaaccatttcagtctgcaggtcattagttgaaaacaatcctcgaacaggaaatcttggtgcactaattaaggtcttcctttctagaaccaaagaactaaaactttcagcagaatgtcagaaccacatcttcatttggcagacacacaatgctttgtttattatttgctgtttgctgaaagtgttcatctgtcagatgtcagaggaggaattacaacttcattttacttatgaagaaaaatctcctggcaattacagttctgactcagaagatcttttggaagaattgctgtgctgtttgatgcagttgatcactgatattccactcttagatattacatatgaaatatcagtagaagctatatcaacaatggttgttttcctttcctgccaactcttccacaaagaagttttgcgacagagcatcagccacaagtatttgatgcgaggtccatgtcttccatacaccagcaaacttgtgaagaccttattatataactttatcagacaagaaaagccacctcctccaggggcccatgttttccctcagcagtcggatgggggaggactgctttatggacttgcatcaggagtagcaaagtgccttgttgtagaaaaccttacagttccggagtgaaatttgttgtcactgacagggcaggaggagaatccttgtactggaactgcggctggatgagtagtgaaccacttgcttggaccctcctatgagtcaggactctggactgtcttcacactaggtggtgtgggcagcaaagcggctgcctctccagagctttcttcccctctggccaaccagagtctcctgcttctgctggtgttggccaatctgacagatgcctcagatgcgccaaacccctacagacaagccattatgtcctt

SEQ ID NO: 128319 - DNA, 568 bp, Homo sapiens
  Payload ID: 5127
  Gene Symbol: DYM
  Gene Name: dymeclin
  ENST ID: ENST00000584983
  CDS Start-End: 80-568
agatggctcaggtgcttcggctgccacggcagcaggttctgactcagaagatcttttggaagaattgctgtgctgtttgatgcagttgatcactgatattccactcttagatattacatatgaaatatcagtagaagctatatcaacaatggttgttttcctttcctgccaactcttccacaaagaagttttgcgacagagcatcagccacaagtatttgatgcgaggtccatgtcttccatacaccagcaaacttgtgaagaccttattatataactttatcagacaagaaaagccacctcctccaggggcccatgttttccctcagcagtcggatgggggaggactgctttatggacttgcatcaggagtagcaacaggactctggactgtcttcacactaggtggtgtgggcagcaaagcggctgcctctccagagctttcttcccctctggccaaccagagtctcctgcttctgctggtgttggccaatctgacagatgcctcagatgcgccaaacccctacagacaagccattatgtccttcaagaacacacaagatagcagt

SEQ ID NO: 128320 - DNA, 568 bp, Homo sapiens
  Payload ID: 5127
  Gene Symbol: DYM
  Gene Name: dymeclin
  ENST ID: ENST00000583280
  CDS Start-End: 151-568
cagatggctcaggtgcttcggctgccacggcagcaggttctctgctctcttttctctgctggaactgggccctagagactggggcaggcggtaggtagctcaggaggttctgactcagaagatcttttggaagaattgctgtgctgtttgatgcagttgatcactgatattccactcttagatattacatatgaaatatcagtagaagctatatcaacaatggttgttttcctttcctgccaactcttccacaaagaagttttgcgacagagcatcagccacaagtatttgatgcgaggtccatgtcttccatacaccagcaaacttgtgaagaccttattatataactttatcagacaagaaaagccacctcctccaggggcccatgttttccctcagcagtcggatgggggaggactgctttatggacttgcatcaggagtagcaacaggactctggactgtcttcacactaggtggtgtgggcagcaaagcggctgcctctccagagctttcttcccctctggccaaccagagtctcctgcttctgctggtgttggccaatctga

SEQ ID NO: 128321 - DNA, 366 bp, Homo sapiens
  Payload ID: 5127
  Gene Symbol: DYM
  Gene Name: dymeclin
  ENST ID: ENST00000582399
  CDS Start-End: 1-366
ccattcaatacaacatgactaggacacgagacaagtaccttcacacaaattgtttggcagctttagcaaatatgtcggcacagtttcgttctctccatcagtatgctgcccagaggatcatcagttatacctgccgccacttgcggagatatgtttatgtgttggacaaactgtatttcccccactctcactgttctacgcttcagcattgcttctcgaccctcagtgacaatggagaggaactcttgtctttaacttgctctcacattctcagatcctatgcttccagtttattttctttgctgtctaaaaaacacaacaaagttctggaacaagccacacagtccttgagaggttcgctgagtt

SEQ ID NO: 128322 - DNA, 869 bp, Homo sapiens
  Payload ID: 5127
  Gene Symbol: DYM
  Gene Name: dymeclin
  ENST ID: ENST00000579058
  CDS Start-End: 284-508
tcctggcctccgcaccgacgcggcccgggctggagccgagccggggccgagctgcaggccggaccggagccggatctgtacccgctgagacgtggaaacatggaggcctgagccggtgtgcgccacctgggctgcggcggcgacagcgacttctcctgacccctctgccaccctcccatccgtccgcgggtccgtggagctggagcagatcccccagccggctgagacaggttgtcttttggaaatgcaggtttaaggacaaattatctgcttaagctagaagatgggatcgaatagcagcagaatcggcgatcttcctaaaaatgagtacttgaaaaagttatcaggcacggaatctatctctgagaatgacccgttctggaatcagcttctctcattttctttccctgcaccaactagcagacagagtttcactcttgttgcccaggctggagtgcaatggcatgatctcggctcaccacaacctctgcctcccgggattaagtgattctcctgcctcagcctccccagtagctgggattacaggctggagtgcaatggtgccatctcagctcaccgcaatctctgcctcctgcattcaagtgattctcctgcctcagcctcccgagtagctgaaattacagtagtgagttgaaactcttggaggaagcaaccatttcagtctgcaggtcattagttgaaaacaatcctcgaacaggaaatcttggtgcactaattaaggtcttcctttctagaaccaaagaactaaaactttcagcagaatgtcagaaccacatcttcatttggcagacacacaatgctttgtttattatttgctgtttgctgaaagtgttcatctgtcagatgtc

SEQ ID NO: 128323 - DNA, 755 bp, Homo sapiens
  Payload ID: 5127
  Gene Symbol: DYM
  Gene Name: dymeclin
  ENST ID: ENST00000578396
  CDS Start-End: 205-555
gctgaaagtgttcatctgtcagatgtcagaggaggaattacaacttcattttacttatgaagaaaaatctcctggcaattacaacacatccaggaacagtactttgcatctttcaatccgatcaagttgacactcgatattaaccatcacagtatctcaggttctgactcagaagatcttttggaagaattgctgtgctgtttgatgcagttgatcactgatattccactcttagatattacatatgaaatatcagtagaagctatatcaacaatggttgttttcctttcctgccaactcttccacaaagaagttttgcgacagagcatcagccacaagtatttgatgcgaggtccatgtcttccatacaccagcaaacttgtgaagaccttattatataactttatcagacaagaaaagccacctcctccaggggcccatgttttccctcagcagtcggatgggggaggactgctttatggacttgcatcaggagtagcaaatttgaagggaagactgatggcctctttcatgctacaaatagttgaagaatgaattagtttgtatttacaaggaggaatatagaataaagcaatcaattgcagatgaaatcctgggataagtttctgagacttgctacaagtgccatttatttggtgctaatgatttaatctatttttgagactgagttgtaaattgtagaatttaaaaatatttaaaagtgagaatattaaaattgaaattatggaattcta

SEQ ID NO: 128324 - DNA, 554 bp, Homo sapiens
  Payload ID: 5127
  Gene Symbol: DYM
  Gene Name: dymeclin
  ENST ID: ENST00000583353
  CDS Start-End: 226-554
ttttgctatttctcaattctccagaatcccacacaatattgcttgactttgggatggttattcagctgcaattaacagaggccttaataaggttaagccgccagaacgagcggtgtagcatgagcgaggactctagcacctggcaggtgaggttgactctagcacccggcaggttgtcttttggaaatgcaggtttaaggacaaattatctgcttaagctagaagatgggatcgaatagcagcagaatcggcgatcttcctaaaaatgagtacttgaaaaagttatcaggcacggaatctatctctgagaatgacccgttctggaatcagcttctctcattttctttccctgcaccaactagcagtagtgagttgaaactcttggaggaagcaaccatttcagtctgcaggtcattagttgaaaacaatcctcgaacaggaaatcttggtgcactaattaaggtcttcctttctagaaccaaagaactaaaactttcagcagaatgtcagaaccacatcttcatttggcagacacacaatgctttgtttattat

SEQ ID NO: 128325 - DNA, 588 bp, Homo sapiens
  Payload ID: 5127
  Gene Symbol: DYM
  Gene Name: dymeclin
  ENST ID: ENST00000577734
  CDS Start-End: 1-203
ggttgctgcaagctggagctgagctgtcagtggaacgggtcctggaaatcattaagcaaggcgtcgttgcgctgcccaaagacagactgaagccgctggccgatcgtcaggtggacagagtccttgcatgccaggcctttgtgtatgcagcttctgggttctcacagtttcatggcttgtctgtcagaaatttccagaattgaaattcaaatatgtggaagaggagcagcccgaggagttttttatcccctatgtctggtctcttgtctacaactcagcagtcggcctgtactggaatccacaggacatccagctgttcaccatggattccgactgagggcaggatgctctcccacccggacccctccagccaagcagcccttcaagttcttttatttctgggtaacagaagtagacagacaggttacttggtgtatcttctgttaaagaggattgcacgagtgtgttttcctcacacactttgatttggagaattggtgctagttggcaatagataactcagcgtagatagtattgcaaaaaggggaggaaatacacaacaataataaatgtaaaaacctgctattc

SEQ ID NO: 128326 - DNA, 566 bp, Homo sapiens
  Payload ID: 5127
  Gene Symbol: DYM
  Gene Name: dymeclin
  ENST ID: ENST00000581738
  CDS Start-End: 141-566
tttttccagatggctcaggtgcttcggctgccacggcagcaggttctctgctctcttttctctgctggaactgggccctagagactggggcaggcggttctgactcagaagatcttttggaagaattgctgtgctgtttgatgcagttgatcactgatattccactcttagatattacatatgaaatatcagtagaagctatatcaacaatggttgttttcctttcctgccaactcttccacaaagaagttttgcgacagagcatcagccacaagtatttgatgcgaggtccatgtcttccatacaccagcaaacttgtgaagaccttattatataactttatcagacaagaaaagccacctcctccaggggcccatgttttccctcagcagtcggatgggggaggactgctttatggacttgcatcaggagtagcaacaggactctggactgtcttcacactaggtggtgtgggcagcaaagcggctgcctctccagagctttcttcccctctggccaaccagagtctcctgcttctgctggtgttggccaatctgacagatgcc

SEQ ID NO: 128327 - DNA, 564 bp, Homo sapiens
  Payload ID: 5127
  Gene Symbol: DYM
  Gene Name: dymeclin
  ENST ID: ENST00000583225
  CDS Start-End: 141-564
aggtgcttcggctgccacggcagcaggttctctgctctcttttctctgctggaactgggccctagagactggggcaggcggtaggtagctcaggaggttctgactcagaagatcttttggaagaattgctgtgctgtttgatgcagttgatcactgatattccactcttagatattacatatgaaatatcagtagaagctatatcaacaatggttgttttcctttcctgccaactcttccacaaagaagttttgcgacagagcatcagccacaagtatttgatgcgaggtccatgtcttccatacaccagcaaacttgtgaagaccttattatataactttatcagacaagaaaagccacctcctccaggggcccatgttttccctcagcagtcggatgggggaggactgctttatggacttgcatcaggagtagcaagactctggactgtcttcacactaggtggtgtgggcagcaaagcggctgcctctccagagctttcttcccctctggccaaccagagtctcctgcttctgctggtgttggccaatctgacagatgcct

SEQ ID NO: 128328 - DNA, 4500 bp, Homo sapiens
  Payload ID: 5128
  Gene Symbol: DCTN1
  Gene Name: dynactin 1
  Uniprot ID: Q14203
  ENST ID: ENST00000361874
  CDS Start-End: 319-4155
agaggctagcacggttcctgacaagtctagagcagcactagcgcagagtgagactcatcagctggcaagcaggattctgtgtctctgggttcaggaatcctcaggcagcagaggggacttgctcctcagcccccatcactgcccccacccctacccgtgtaggccaccgagtgaggcccatggactggggagggctgtgcctgacgactcctgtgtccctctatgagggcccagcgccctgaccctcctgcctaggtttctaccttttctctctgtctttggccagctgggggagggggtagaggccgggtgagcaacatggcacagagcaagaggcacgtgtacagccggacgcccagcggcagcaggatgagtgcggaggcaagcgcccggcctctgcgggtgggctcccgtgtagaggtgattggaaaaggccaccgaggcactgtggcctatgttggagccacactgtttgccactggcaaatgggtaggcgtgattctggatgaagcaaagggcaaaaatgatggaactgttcaaggcaggaagtacttcacttgtgatgaagggcatggcatctttgtgcgccagtcccagatccaggtatttgaagatggagcagatactacttccccagagacacctgattcttctgcttcaaaagtcctcaaaagagagggaactgatacaactgcaaagactagcaaactgcggggactgaagcctaagaaggcaccgacagcccgaaagaccacaactcggcgacccaagcccacgcgcccagccagtactggggtggctggggccagtagctccctgggcccctctggctcagcgtcagcaggtgagctgagcagcagtgagcccagcaccccggctcagactccgctggcagcacccatcatccccacgccggtcctcacctctcctggagcagtccccccgcttccttccccatccaaggaggaggagggactaagggctcaggtgcgggacctggaggagaaactagagaccctgagactgaaacgggcagaagacaaagcaaagctaaaagagctggagaaacacaaaatccagctggagcaggtgcaggaatggaagagcaaaatgcaggagcagcaggccgacctgcagcggcgcctcaaggaggcgagaaaggaagccaaggaggcgctggaggcaaaggaacgctatatggaggagatggctgatactgctgatgccattgagatggccactttggacaaggagatggctgaagagcgggctgagtccctgcagcaggaggtggaggcactgaaggagcgggtggacgagctcactactgacttagagatcctcaaggctgagattgaagagaagggctcagatggcgctgcatccagttatcagctcaagcagcttgaggagcagaatgcccgcctgaaggatgccctggtgaggatgcgggatctttcttcctcagagaagcaggagcatgtgaagctccagaagctcatggaaaagaagaaccaagagctggaagttgtgaggcaacagcgggagcgtctgcaggaggagctaagccaggcagagagcaccattgatgagctcaaggagcaggtggatgctgctctgggtgctgaggagatggtggagatgctgacagatcggaacctgaatctggaagagaaagtgcgcgagttgagggagactgtgggagacttggaagcgatgaatgagatgaacgatgagctgcaggagaatgcacgtgagacagaactggagctgcgggagcagctggacatggcaggcgcgcgggttcgtgaggcccagaagcgtgtggaggcagcccaggagacggttgcagactaccagcagaccatcaagaagtaccgccagctgaccgcccatctacaggatgtgaatcgggaactgacaaaccagcaggaagcatctgtggagaggcaacagcagccacctccagagacctttgacttcaaaatcaagtttgctgagactaaggcccatgccaaggcaattgagatggaattgaggcagatggaggtggcccaggccaatcgacacatgtccctgctgacagccttcatgcctgacagcttccttcggccaggtggggaccatgactgcgttctggtgctgttgctcatgcctcgtctcatttgcaaggcagagctgatccggaagcaggcccaggagaagtttgaactaagtgagaactgttcagagcggcctgggctgcgaggagctgctggggagcaactcagctttgctgctggactggtgtactcgctgagcctgctgcaggccacgctacaccgctatgagcatgccctctctcagtgcagtgtggatgtgtataagaaagtgggcagcctgtaccctgagatgagtgcccatgagcgctccttggatttcctcattgaactgctgcacaaggatcagctggatgagactgtcaatgtggagcctctcaccaaggccatcaagtactatcagcatctgtacagcatccaccttgccgaacagcctgaggactgtactatgcagctggctgaccacattaagttcacgcagagtgctctggactgcatgagtgtggaggtaggacggctgcgtgccttcttgcagggtgggcaggaggctacagatattgccctcctgctccgggatctggaaacttcatgcagtgacatccgccagttctgcaagaagatccgaaggcgaatgccagggacagatgctcctgggatcccagctgcactggcctttggaccacaggtatctgacacgctcctagactgcaggaaacacttgacgtgggtcgtggctgtgctgcaggaggtggcagctgctgctgcccagctcattgccccactggcagagaatgaggggctacttgtggctgctctggaggaactggctttcaaagcaagcgagcagatctatgggaccccctccagcagcccctatgagtgtctgcgccagtcatgcaacatcctcatcagtaccatgaacaagctggccacagccatgcaggagggggagtatgatgcagagcggccccccagcaagcctccaccggttgaactgcgggctgctgcccttcgtgcagagatcacagatgctgaaggcctgggtttgaagctcgaagatcgagagacagttattaaggagttgaagaagtcactcaagattaagggagaggagctaagtgaggccaatgtgcggctgagcctcctggagaagaagttggacagtgctgccaaggatgcagatgagcgcatcgagaaagtccagactcggctggaggagacccaggcactgctgcgaaagaaggagaaagagtttgaggagacaatggatgcactccaggctgacatcgaccagctggaggcagagaaggcagaactaaagcagcgtctgaacagccagtccaaacgcacgattgagggactccggggccctcctccttcaggcattgctactctggtctctggcattgctggtgaagaacagcagcgaggagccatccctgggcaggctccagggtctgtgccaggcccagggctggtgaaggactcaccactgctgcttcagcagatctctgccatgaggctgcacatctcccagctccagcatgagaacagcatcctcaagggagcccagatgaaggcatccttggcatccctgccccctctgcatgttgcaaagctatcccatgagggccctggcagtgagttaccagctggagcgctgtatcgtaagaccagccagctgctggagacattgaatcaattgagcacacacacgcacgtagtagacatcactcgcaccagccctgctgccaagagcccgtcggcccaacttatggagcaagtggctcagcttaagtccctgagtgacaccgtcgagaagctcaaggatgaggtcctcaaggagacagtatctcagcgccctggagccacagtacccactgactttgccaccttcccttcatcagccttcctcagggccaaggaggagcagcaggatgacacagtctacatgggcaaagtgaccttctcatgtgcggctggttttggacagcgacaccggctggtgctgacccaggagcagctgcaccagcttcacagtcgcctcatctcctaagcactcctttcccctgctgtccccttcgaccctcagccctctggtgccgctctgcccgatgcacagccacctcagccagcccccaggtagaaacgtgggttaagctcttcctgccccgttcagcttcactcccaccctttcagcgtcctgccccttcaccttgacccgggttcccccactcccattccctggcctctgccataatttgttgttcaactgctccctccttcctgaggggcctcagggcttgtggggggtaggctgagaccccaccaccaaaggttaagtgaggtccccttgattgaggacttcaccccttgattaaagcaacttctgcttcagtgc

SEQ ID NO: 128329 - DNA, 4479 bp, Homo sapiens
  Payload ID: 5128
  Gene Symbol: DCTN1
  Gene Name: dynactin 1
  Uniprot ID: Q14203
  ENST ID: ENST00000394003
  CDS Start-End: 319-4134
agaggctagcacggttcctgacaagtctagagcagcactagcgcagagtgagactcatcagctggcaagcaggattctgtgtctctgggttcaggaatcctcaggcagcagaggggacttgctcctcagcccccatcactgcccccacccctacccgtgtaggccaccgagtgaggcccatggactggggagggctgtgcctgacgactcctgtgtccctctatgagggcccagcgccctgaccctcctgcctaggtttctaccttttctctctgtctttggccagctgggggagggggtagaggccgggtgagcaacatggcacagagcaagaggcacgtgtacagccggacgcccagcggcagcaggatgagtgcggaggcaagcgcccggcctctgcgggtgggctcccgtgtagaggtgattggaaaaggccaccgaggcactgtggcctatgttggagccacactgtttgccactggcaaatgggtaggcgtgattctggatgaagcaaagggcaaaaatgatggaactgttcaaggcaggaagtacttcacttgtgatgaagggcatggcatctttgtgcgccagtcccagatccaggtatttgaagatggagcagatactacttccccagagacacctgattcttctgcttcaaaagtcctcaaaagagagggaactgatacaactgcaaagactagcaaactggcaccgacagcccgaaagaccacaactcggcgacccaagcccacgcgcccagccagtactggggtggctggggccagtagctccctgggcccctctggctcagcgtcagcaggtgagctgagcagcagtgagcccagcaccccggctcagactccgctggcagcacccatcatccccacgccggtcctcacctctcctggagcagtccccccgcttccttccccatccaaggaggaggagggactaagggctcaggtgcgggacctggaggagaaactagagaccctgagactgaaacgggcagaagacaaagcaaagctaaaagagctggagaaacacaaaatccagctggagcaggtgcaggaatggaagagcaaaatgcaggagcagcaggccgacctgcagcggcgcctcaaggaggcgagaaaggaagccaaggaggcgctggaggcaaaggaacgctatatggaggagatggctgatactgctgatgccattgagatggccactttggacaaggagatggctgaagagcgggctgagtccctgcagcaggaggtggaggcactgaaggagcgggtggacgagctcactactgacttagagatcctcaaggctgagattgaagagaagggctcagatggcgctgcatccagttatcagctcaagcagcttgaggagcagaatgcccgcctgaaggatgccctggtgaggatgcgggatctttcttcctcagagaagcaggagcatgtgaagctccagaagctcatggaaaagaagaaccaagagctggaagttgtgaggcaacagcgggagcgtctgcaggaggagctaagccaggcagagagcaccattgatgagctcaaggagcaggtggatgctgctctgggtgctgaggagatggtggagatgctgacagatcggaacctgaatctggaagagaaagtgcgcgagttgagggagactgtgggagacttggaagcgatgaatgagatgaacgatgagctgcaggagaatgcacgtgagacagaactggagctgcgggagcagctggacatggcaggcgcgcgggttcgtgaggcccagaagcgtgtggaggcagcccaggagacggttgcagactaccagcagaccatcaagaagtaccgccagctgaccgcccatctacaggatgtgaatcgggaactgacaaaccagcaggaagcatctgtggagaggcaacagcagccacctccagagacctttgacttcaaaatcaagtttgctgagactaaggcccatgccaaggcaattgagatggaattgaggcagatggaggtggcccaggccaatcgacacatgtccctgctgacagccttcatgcctgacagcttccttcggccaggtggggaccatgactgcgttctggtgctgttgctcatgcctcgtctcatttgcaaggcagagctgatccggaagcaggcccaggagaagtttgaactaagtgagaactgttcagagcggcctgggctgcgaggagctgctggggagcaactcagctttgctgctggactggtgtactcgctgagcctgctgcaggccacgctacaccgctatgagcatgccctctctcagtgcagtgtggatgtgtataagaaagtgggcagcctgtaccctgagatgagtgcccatgagcgctccttggatttcctcattgaactgctgcacaaggatcagctggatgagactgtcaatgtggagcctctcaccaaggccatcaagtactatcagcatctgtacagcatccaccttgccgaacagcctgaggactgtactatgcagctggctgaccacattaagttcacgcagagtgctctggactgcatgagtgtggaggtaggacggctgcgtgccttcttgcagggtgggcaggaggctacagatattgccctcctgctccgggatctggaaacttcatgcagtgacatccgccagttctgcaagaagatccgaaggcgaatgccagggacagatgctcctgggatcccagctgcactggcctttggaccacaggtatctgacacgctcctagactgcaggaaacacttgacgtgggtcgtggctgtgctgcaggaggtggcagctgctgctgcccagctcattgccccactggcagagaatgaggggctacttgtggctgctctggaggaactggctttcaaagcaagcgagcagatctatgggaccccctccagcagcccctatgagtgtctgcgccagtcatgcaacatcctcatcagtaccatgaacaagctggccacagccatgcaggagggggagtatgatgcagagcggccccccagcaagcctccaccggttgaactgcgggctgctgcccttcgtgcagagatcacagatgctgaaggcctgggtttgaagctcgaagatcgagagacagttattaaggagttgaagaagtcactcaagattaagggagaggagctaagtgaggccaatgtgcggctgagcctcctggagaagaagttggacagtgctgccaaggatgcagatgagcgcatcgagaaagtccagactcggctggaggagacccaggcactgctgcgaaagaaggagaaagagtttgaggagacaatggatgcactccaggctgacatcgaccagctggaggcagagaaggcagaactaaagcagcgtctgaacagccagtccaaacgcacgattgagggactccggggccctcctccttcaggcattgctactctggtctctggcattgctggtgaagaacagcagcgaggagccatccctgggcaggctccagggtctgtgccaggcccagggctggtgaaggactcaccactgctgcttcagcagatctctgccatgaggctgcacatctcccagctccagcatgagaacagcatcctcaagggagcccagatgaaggcatccttggcatccctgccccctctgcatgttgcaaagctatcccatgagggccctggcagtgagttaccagctggagcgctgtatcgtaagaccagccagctgctggagacattgaatcaattgagcacacacacgcacgtagtagacatcactcgcaccagccctgctgccaagagcccgtcggcccaacttatggagcaagtggctcagcttaagtccctgagtgacaccgtcgagaagctcaaggatgaggtcctcaaggagacagtatctcagcgccctggagccacagtacccactgactttgccaccttcccttcatcagccttcctcagggccaaggaggagcagcaggatgacacagtctacatgggcaaagtgaccttctcatgtgcggctggttttggacagcgacaccggctggtgctgacccaggagcagctgcaccagcttcacagtcgcctcatctcctaagcactcctttcccctgctgtccccttcgaccctcagccctctggtgccgctctgcccgatgcacagccacctcagccagcccccaggtagaaacgtgggttaagctcttcctgccccgttcagcttcactcccaccctttcagcgtcctgccccttcaccttgacccgggttcccccactcccattccctggcctctgccataatttgttgttcaactgctccctccttcctgaggggcctcagggcttgtggggggtaggctgagaccccaccaccaaaggttaagtgaggtccccttgattgaggacttcaccccttgattaaagcaacttctgcttcagtgc

SEQ ID NO: 128330 - DNA, 4365 bp, Homo sapiens
  Payload ID: 5128
  Gene Symbol: DCTN1
  Gene Name: dynactin 1
  Uniprot ID: Q14203
  ENST ID: ENST00000409240
  CDS Start-End: 313-4023
acagtgcgcgtgcgcttatcctgtcccaggtgtccagctttgtgcctgattgatgtaatcccggctgcggtcggtgcgcagttttcagtcagggctggactgcgggaaaagagggttcactcgacccagaacgcctctgggcctctgggccgaagggttctgggcggtcctggaagggtctggcggcgagtcgggcagcccacgagggcggggagggcggggccggccccgcagggtcttgggcgtcggtcgtcggtggggtcggagctgggcgcggagcccctcacagtgcagacgcccagcggcagcaggatgagtgcggaggcaagcgcccggcctctgcgggtgggctcccgtgtagaggtgattggaaaaggccaccgaggcactgtggcctatgttggagccacactgtttgccactggcaaatgggtaggcgtgattctggatgaagcaaagggcaaaaatgatggaactgttcaaggcaggaagtacttcacttgtgatgaagggcatggcatctttgtgcgccagtcccagatccaggtatttgaagatggagcagatactacttccccagagacacctgattcttctgcttcaaaagtcctcaaaagagagggaactgatacaactgcaaagactagcaaactgcccacgcgcccagccagtactggggtggctggggccagtagctccctgggcccctctggctcagcgtcagcaggtgagctgagcagcagtgagcccagcaccccggctcagactccgctggcagcacccatcatccccacgccggtcctcacctctcctggagcagtccccccgcttccttccccatccaaggaggaggagggactaagggctcaggtgcgggacctggaggagaaactagagaccctgagactgaaacgggcagaagacaaagcaaagctaaaagagctggagaaacacaaaatccagctggagcaggtgcaggaatggaagagcaaaatgcaggagcagcaggccgacctgcagcggcgcctcaaggaggcgagaaaggaagccaaggaggcgctggaggcaaaggaacgctatatggaggagatggctgatactgctgatgccattgagatggccactttggacaaggagatggctgaagagcgggctgagtccctgcagcaggaggtggaggcactgaaggagcgggtggacgagctcactactgacttagagatcctcaaggctgagattgaagagaagggctcagatggcgctgcatccagttatcagctcaagcagcttgaggagcagaatgcccgcctgaaggatgccctggtgaggatgcgggatctttcttcctcagagaagcaggagcatgtgaagctccagaagctcatggaaaagaagaaccaagagctggaagttgtgaggcaacagcgggagcgtctgcaggaggagctaagccaggcagagagcaccattgatgagctcaaggagcaggtggatgctgctctgggtgctgaggagatggtggagatgctgacagatcggaacctgaatctggaagagaaagtgcgcgagttgagggagactgtgggagacttggaagcgatgaatgagatgaacgatgagctgcaggagaatgcacgtgagacagaactggagctgcgggagcagctggacatggcaggcgcgcgggttcgtgaggcccagaagcgtgtggaggcagcccaggagacggttgcagactaccagcagaccatcaagaagtaccgccagctgaccgcccatctacaggatgtgaatcgggaactgacaaaccagcaggaagcatctgtggagaggcaacagcagccacctccagagacctttgacttcaaaatcaagtttgctgagactaaggcccatgccaaggcaattgagatggaattgaggcagatggaggtggcccaggccaatcgacacatgtccctgctgacagccttcatgcctgacagcttccttcggccaggtggggaccatgactgcgttctggtgctgttgctcatgcctcgtctcatttgcaaggcagagctgatccggaagcaggcccaggagaagtttgaactaagtgagaactgttcagagcggcctgggctgcgaggagctgctggggagcaactcagctttgctgctggactggtgtactcgctgagcctgctgcaggccacgctacaccgctatgagcatgccctctctcagtgcagtgtggatgtgtataagaaagtgggcagcctgtaccctgagatgagtgcccatgagcgctccttggatttcctcattgaactgctgcacaaggatcagctggatgagactgtcaatgtggagcctctcaccaaggccatcaagtactatcagcatctgtacagcatccaccttgccgaacagcctgaggactgtactatgcagctggctgaccacattaagttcacgcagagtgctctggactgcatgagtgtggaggtaggacggctgcgtgccttcttgcagggtgggcaggaggctacagatattgccctcctgctccgggatctggaaacttcatgcagtgacatccgccagttctgcaagaagatccgaaggcgaatgccagggacagatgctcctgggatcccagctgcactggcctttggaccacaggtatctgacacgctcctagactgcaggaaacacttgacgtgggtcgtggctgtgctgcaggaggtggcagctgctgctgcccagctcattgccccactggcagagaatgaggggctacttgtggctgctctggaggaactggctttcaaagcaagcgagcagatctatgggaccccctccagcagcccctatgagtgtctgcgccagtcatgcaacatcctcatcagtaccatgaacaagctggccacagccatgcaggagggggagtatgatgcagagcggccccccagcaagcctccaccggttgaactgcgggctgctgcccttcgtgcagagatcacagatgctgaaggcctgggtttgaagctcgaagatcgagagacagttattaaggagttgaagaagtcactcaagattaagggagaggagctaagtgaggccaatgtgcggctgagcctcctggagaagaagttggacagtgctgccaaggatgcagatgagcgcatcgagaaagtccagactcggctggaggagacccaggcactgctgcgaaagaaggagaaagagtttgaggagacaatggatgcactccaggctgacatcgaccagctggaggcagagaaggcagaactaaagcagcgtctgaacagccagtccaaacgcacgattgagggactccggggccctcctccttcaggcattgctactctggtctctggcattgctggtggagccatccctgggcaggctccagggtctgtgccaggcccagggctggtgaaggactcaccactgctgcttcagcagatctctgccatgaggctgcacatctcccagctccagcatgagaacagcatcctcaagggagcccagatgaaggcatccttggcatccctgccccctctgcatgttgcaaagctatcccatgagggccctggcagtgagttaccagctggagcgctgtatcgtaagaccagccagctgctggagacattgaatcaattgagcacacacacgcacgtagtagacatcactcgcaccagccctgctgccaagagcccgtcggcccaacttatggagcaagtggctcagcttaagtccctgagtgacaccgtcgagaagctcaaggatgaggtcctcaaggagacagtatctcagcgccctggagccacagtacccactgactttgccaccttcccttcatcagccttcctcagggccaaggaggagcagcaggatgacacagtctacatgggcaaagtgaccttctcatgtgcggctggttttggacagcgacaccggctggtgctgacccaggagcagctgcaccagcttcacagtcgcctcatctcctaagcactcctttcccctgctgtccccttcgaccctcagccctctggtgccgctctgcccgatgcacagccacctcagccagcccccaggtagaaacgtgggttaagctcttcctgccccgttcagcttcactcccaccctttcagcgtcctgccccttcaccttgacccgggttcccccactcccattccctggcctctgccataatttgttgttcaactgctccctccttcctgaggggcctcagggcttgtggggggtaggctgagaccccaccaccaaaggttaagtgaggtccccttgattgaggacttcaccccttgattaaagcaacttctgcttcag

SEQ ID NO: 128331 - DNA, 4024 bp, Homo sapiens
  Payload ID: 5128
  Gene Symbol: DCTN1
  Gene Name: dynactin 1
  Uniprot ID: Q14203
  ENST ID: ENST00000409567
  CDS Start-End: 263-4024
atcagctggcaagcaggattctgtgtctctgggttcaggaatcctcaggcagcagaggggacttgctcctcagcccccatcactgcccccacccctacccgtgtaggccaccgagtgaggcccatggactggggagggctgtgcctgacgactcctgtgtccctctatgagggcccagcgccctgaccctcctgcctaggtttctaccttttctctctgtctttggccagctgggggagggggtagaggccgggtgagcaacatggcacagagcaagaggcacgtgtacagccggacgcccagcggcagcaggatgagtgcggaggcaagcgcccggcctctgcgggtgggctcccgtgtagaggtgattggaaaaggccaccgaggcactgtggcctatgttggagccacactgtttgccactggcaaatgggtaggcgtgattctggatgaagcaaagggcaaaaatgatggaactgttcaaggcaggaagtacttcacttgtgatgaagggcatggcatctttgtgcgccagtcccagatccaggtatttgaagatggagcagatactacttccccagagacacctgattcttctgcttcaaaagtcctcaaaagagagggaactgatacaactgcaaagactagcaaactgcccacgcgcccagccagtactggggtggctggggccagtagctccctgggcccctctggctcagcgtcagcaggtgagctgagcagcagtgagcccagcaccccggctcagactccgctggcagcacccatcatccccacgccggtcctcacctctcctggagcagtccccccgcttccttccccatccaaggaggaggagggactaagggctcaggtgcgggacctggaggagaaactagagaccctgagactgaaacgggcagaagacaaagcaaagctaaaagagctggagaaacacaaaatccagctggagcaggtgcaggaatggaagagcaaaatgcaggagcagcaggccgacctgcagcggcgcctcaaggaggcgagaaaggaagccaaggaggcgctggaggcaaaggaacgctatatggaggagatggctgatactgctgatgccattgagatggccactttggacaaggagatggctgaagagcgggctgagtccctgcagcaggaggtggaggcactgaaggagcgggtggacgagctcactactgacttagagatcctcaaggctgagattgaagagaagggctcagatggcgctgcatccagttatcagctcaagcagcttgaggagcagaatgcccgcctgaaggatgccctggtgaggatgcgggatctttcttcctcagagaagcaggagcatgtgaagctccagaagctcatggaaaagaagaaccaagagctggaagttgtgaggcaacagcgggagcgtctgcaggaggagctaagccaggcagagagcaccattgatgagctcaaggagcaggtggatgctgctctgggtgctgaggagatggtggagatgctgacagatcggaacctgaatctggaagagaaagtgcgcgagttgagggagactgtgggagacttggaagcgatgaatgagatgaacgatgagctgcaggagaatgcacgtgagacagaactggagctgcgggagcagctggacatggcaggcgcgcgggttcgtgaggcccagaagcgtgtggaggcagcccaggagacggttgcagactaccagcagaccatcaagaagtaccgccagctgaccgcccatctacaggatgtgaatcgggaactgacaaaccagcaggaagcatctgtggagaggcaacagcagccacctccagagacctttgacttcaaaatcaagtttgctgagactaaggcccatgccaaggcaattgagatggaattgaggcagatggaggtggcccaggccaatcgacacatgtccctgctgacagccttcatgcctgacagcttccttcggccaggtggggaccatgactgcgttctggtgctgttgctcatgcctcgtctcatttgcaaggcagagctgatccggaagcaggcccaggagaagtttgaactaagtgagaactgttcagagcggcctgggctgcgaggagctgctggggagcaactcagctttgctgctggactggtgtactcgctgagcctgctgcaggccacgctacaccgctatgagcatgccctctctcagtgcagtgtggatgtgtataagaaagtgggcagcctgtaccctgagatgagtgcccatgagcgctccttggatttcctcattgaactgctgcacaaggatcagctggatgagactgtcaatgtggagcctctcaccaaggccatcaagtactatcagcatctgtacagcatccaccttgccgaacagcctgaggactgtactatgcagctggctgaccacattaagttcacgcagagtgctctggactgcatgagtgtggaggtaggacggctgcgtgccttcttgcagggtgggcaggaggctacagatattgccctcctgctccgggatctggaaacttcatgcagtgacatccgccagttctgcaagaagatccgaaggcgaatgccagggacagatgctcctgggatcccagctgcactggcctttggaccacaggtatctgacacgctcctagactgcaggaaacacttgacgtgggtcgtggctgtgctgcaggaggtggcagctgctgctgcccagctcattgccccactggcagagaatgaggggctacttgtggctgctctggaggaactggctttcaaagcaagcgagcagatctatgggaccccctccagcagcccctatgagtgtctgcgccagtcatgcaacatcctcatcagtaccatgaacaagctggccacagccatgcaggagggggagtatgatgcagagcggccccccagcaagcctccaccggttgaactgcgggctgctgcccttcgtgcagagatcacagatgctgaaggcctgggtttgaagctcgaagatcgagagacagttattaaggagttgaagaagtcactcaagattaagggagaggagctaagtgaggccaatgtgcggctgagcctcctggagaagaagttggacagtgctgccaaggatgcagatgagcgcatcgagaaagtccagactcggctggaggagacccaggcactgctgcgaaagaaggagaaagagtttgaggagacaatggatgcactccaggctgacatcgaccagctggaggcagagaaggcagaactaaagcagcgtctgaacagccagtccaaacgcacgattgagggactccggggccctcctccttcaggcattgctactctggtctctggcattgctggtggagccatccctgggcaggctccagggtctgtgccaggcccagggctggtgaaggactcaccactgctgcttcagcagatctctgccatgaggctgcacatctcccagctccagcatgagaacagcatcctcaagggagcccagatgaaggcatccttggcatccctgccccctctgcatgttgcaaagctatcccatgagggccctggcagtgagttaccagctggagcgctgtatcgtaagaccagccagctgctggagacattgaatcaattgagcacacacacgcacgtagtagacatcactcgcaccagccctgctgccaagagcccgtcggcccaacttatggagcaagtggctcagcttaagtccctgagtgacaccgtcgagaagctcaaggatgaggtcctcaaggagacagtatctcagcgccctggagccacagtacccactgactttgccaccttcccttcatcagccttcctcagggccaaggaggagcagcaggatgacacagtctacatgggcaaagtgaccttctcatgtgcggctggttttggacagcgacaccggctggtgctgacccaggagcagctgcaccagcttcacagtcgcctcatctcctaa

SEQ ID NO: 128332 - DNA, 4145 bp, Homo sapiens
  Payload ID: 5128
  Gene Symbol: DCTN1
  Gene Name: dynactin 1
  Uniprot ID: Q14203
  ENST ID: ENST00000409438
  CDS Start-End: 384-3803
agtggctccacccccatggagcagaggagggtgggtgcatgacgtcaggtggagctggtgctgcggccactgaggctgccatcagcctaagctggtgaactgggccaggcaccgctccggtgcctgccggagcctggcgatccagctgcacgtctgcgggggcctctgtgtcagagcggcggccgtttgcaggctgggaagctgccgcaccgggaggctgagactgcattgttgggatttgatgcactaatctcctgtctccgccgcctttccctctgttcggtctcttgccctccctcccttcgtctgtccttcctccgtgtgtttgtctatcctcctctgtccctcctctttcctctccttgctttctttggttttctgcaatgatgagacaggcaccgacagcccgaaagaccacaactcggcgacccaagcccacgcgcccagccagtactggggtggctggggccagtagctccctgggcccctctggctcagcgtcagcaggtgagctgagcagcagtgagcccagcaccccggctcagactccgctggcagcacccatcatccccacgccggtcctcacctctcctggagcagtccccccgcttccttccccatccaaggaggaggagggactaagggctcaggtgcgggacctggaggagaaactagagaccctgagactgaaacgggcagaagacaaagcaaagctaaaagagctggagaaacacaaaatccagctggagcaggtgcaggaatggaagagcaaaatgcaggagcagcaggccgacctgcagcggcgcctcaaggaggcgagaaaggaagccaaggaggcgctggaggcaaaggaacgctatatggaggagatggctgatactgctgatgccattgagatggccactttggacaaggagatggctgaagagcgggctgagtccctgcagcaggaggtggaggcactgaaggagcgggtggacgagctcactactgacttagagatcctcaaggctgagattgaagagaagggctcagatggcgctgcatccagttatcagctcaagcagcttgaggagcagaatgcccgcctgaaggatgccctggtgaggatgcgggatctttcttcctcagagaagcaggagcatgtgaagctccagaagctcatggaaaagaagaaccaagagctggaagttgtgaggcaacagcgggagcgtctgcaggaggagctaagccaggcagagagcaccattgatgagctcaaggagcaggtggatgctgctctgggtgctgaggagatggtggagatgctgacagatcggaacctgaatctggaagagaaagtgcgcgagttgagggagactgtgggagacttggaagcgatgaatgagatgaacgatgagctgcaggagaatgcacgtgagacagaactggagctgcgggagcagctggacatggcaggcgcgcgggttcgtgaggcccagaagcgtgtggaggcagcccaggagacggttgcagactaccagcagaccatcaagaagtaccgccagctgaccgcccatctacaggatgtgaatcgggaactgacaaaccagcaggaagcatctgtggagaggcaacagcagccacctccagagacctttgacttcaaaatcaagtttgctgagactaaggcccatgccaaggcaattgagatggaattgaggcagatggaggtggcccaggccaatcgacacatgtccctgctgacagccttcatgcctgacagcttccttcggccaggtggggaccatgactgcgttctggtgctgttgctcatgcctcgtctcatttgcaaggcagagctgatccggaagcaggcccaggagaagtttgaactaagtgagaactgttcagagcggcctgggctgcgaggagctgctggggagcaactcagctttgctgctggactggtgtactcgctgagcctgctgcaggccacgctacaccgctatgagcatgccctctctcagtgcagtgtggatgtgtataagaaagtgggcagcctgtaccctgagatgagtgcccatgagcgctccttggatttcctcattgaactgctgcacaaggatcagctggatgagactgtcaatgtggagcctctcaccaaggccatcaagtactatcagcatctgtacagcatccaccttgccgaacagcctgaggactgtactatgcagctggctgaccacattaagttcacgcagagtgctctggactgcatgagtgtggaggtaggacggctgcgtgccttcttgcagggtgggcaggaggctacagatattgccctcctgctccgggatctggaaacttcatgcagtgacatccgccagttctgcaagaagatccgaaggcgaatgccagggacagatgctcctgggatcccagctgcactggcctttggaccacaggtatctgacacgctcctagactgcaggaaacacttgacgtgggtcgtggctgtgctgcaggaggtggcagctgctgctgcccagctcattgccccactggcagagaatgaggggctacttgtggctgctctggaggaactggctttcaaagcaagcgagcagatctatgggaccccctccagcagcccctatgagtgtctgcgccagtcatgcaacatcctcatcagtaccatgaacaagctggccacagccatgcaggagggggagtatgatgcagagcggccccccagcaagcctccaccggttgaactgcgggctgctgcccttcgtgcagagatcacagatgctgaaggcctgggtttgaagctcgaagatcgagagacagttattaaggagttgaagaagtcactcaagattaagggagaggagctaagtgaggccaatgtgcggctgagcctcctggagaagaagttggacagtgctgccaaggatgcagatgagcgcatcgagaaagtccagactcggctggaggagacccaggcactgctgcgaaagaaggagaaagagtttgaggagacaatggatgcactccaggctgacatcgaccagctggaggcagagaaggcagaactaaagcagcgtctgaacagccagtccaaacgcacgattgagggactccggggccctcctccttcaggcattgctactctggtctctggcattgctggtggagccatccctgggcaggctccagggtctgtgccaggcccagggctggtgaaggactcaccactgctgcttcagcagatctctgccatgaggctgcacatctcccagctccagcatgagaacagcatcctcaagggagcccagatgaaggcatccttggcatccctgccccctctgcatgttgcaaagctatcccatgagggccctggcagtgagttaccagctggagcgctgtatcgtaagaccagccagctgctggagacattgaatcaattgagcacacacacgcacgtagtagacatcactcgcaccagccctgctgccaagagcccgtcggcccaacttatggagcaagtggctcagcttaagtccctgagtgacaccgtcgagaagctcaaggatgaggtcctcaaggagacagtatctcagcgccctggagccacagtacccactgactttgccaccttcccttcatcagccttcctcagggccaaggaggagcagcaggatgacacagtctacatgggcaaagtgaccttctcatgtgcggctggttttggacagcgacaccggctggtgctgacccaggagcagctgcaccagcttcacagtcgcctcatctcctaagcactcctttcccctgctgtccccttcgaccctcagccctctggtgccgctctgcccgatgcacagccacctcagccagcccccaggtagaaacgtgggttaagctcttcctgccccgttcagcttcactcccaccctttcagcgtcctgccccttcaccttgacccgggttcccccactcccattccctggcctctgccataatttgttgttcaactgctccctccttcctgaggggcctcagggcttgtggggggtaggctgagaccccaccaccaaaggttaagtgaggtccccttgattgaggacttcaccccttgattaaagcaacttctgcttcag

SEQ ID NO: 128333 - DNA, 4202 bp, Homo sapiens
  Payload ID: 5128
  Gene Symbol: DCTN1
  Gene Name: dynactin 1
  ENST ID: ENST00000409868
  CDS Start-End: 91-3861
ccggccccgcagggtcttgggcgtcggtcgtcggtggggtcggagctgggcgcggagcccctcacagtgcagacgcccagcggcagcaggatgagtgcggaggcaagcgcccggcctctgcgggtgggctcccgtgtagaggtgattggaaaaggccaccgaggcactgtggcctatgttggagccacactgtttgccactggcaaatgggtaggcgtgattctggatgaagcaaagggcaaaaatgatggaactgttcaaggcaggaagtacttcacttgtgatgaagggcatggcatctttgtgcgccagtcccagatccaggtatttgaagatggagcagatactacttccccagagacacctgattcttctgcttcaaaagtcctcaaaagagagggaactgatacaactgcaaagactagcaaactgcggggactgaagcctaagaaggcaccgacagcccgaaagaccacaactcggcgacccaagcccacgcgcccagccagtactggggtggctggggccagtagctccctgggcccctctggctcagcgtcagcaggtgagctgagcagcagtgagcccagcaccccggctcagactccgctggcagcacccatcatccccacgccggtcctcacctctcctggagcagtccccccgcttccttccccatccaaggaggaggagggactaagggctcaggtgcgggacctggaggagaaactagagaccctgagactgaaacgggcagaagacaaagcaaagctaaaagagctggagaaacacaaaatccagctggagcaggtgcaggaatggaagagcaaaatgcaggagcagcaggccgacctgcagcggcgcctcaaggaggcgagaaaggaagccaaggaggcgctggaggcaaaggaacgctatatggaggagatggctgatactgctgatgccattgagatggccactttggacaaggagatggctgaagagcgggctgagtccctgcagcaggaggtggaggcactgaaggagcgggtggacgagctcactactgacttagagatcctcaaggctgagattgaagagaagggctcagatggcgctgcatccagttatcagctcaagcagcttgaggagcagaatgcccgcctgaaggatgccctggtgaggatgcgggatctttcttcctcagagaagcaggagcatgtgaagctccagaagctcatggaaaagaagaaccaagagctggaagttgtgaggcaacagcgggagcgtctgcaggaggagctaagccaggcagagagcaccattgatgagctcaaggagcaggtggatgctgctctgggtgctgaggagatggtggagatgctgacagatcggaacctgaatctggaagagaaagtgcgcgagttgagggagactgtgggagacttggaagcgatgaatgagatgaacgatgagctgcaggagaatgcacgtgagacagaactggagctgcgggagcagctggacatggcaggcgcgcgggttcgtgaggcccagaagcgtgtggaggcagcccaggagacggttgcagactaccagcagaccatcaagaagtaccgccagctgaccgcccatctacaggatgtgaatcgggaactgacaaaccagcaggaagcatctgtggagaggcaacagcagccacctccagagacctttgacttcaaaatcaagtttgctgagactaaggcccatgccaaggcaattgagatggaattgaggcagatggaggtggcccaggccaatcgacacatgtccctgctgacagccttcatgcctgacagcttccttcggccaggtggggaccatgactgcgttctggtgctgttgctcatgcctcgtctcatttgcaaggcagagctgatccggaagcaggcccaggagaagtttgaactaagtgagaactgttcagagcggcctgggctgcgaggagctgctggggagcaactcagctttgctgctggactggtgtactcgctgagcctgctgcaggccacgctacaccgctatgagcatgccctctctcagtgcagtgtggatgtgtataagaaagtgggcagcctgtaccctgagatgagtgcccatgagcgctccttggatttcctcattgaactgctgcacaaggatcagctggatgagactgtcaatgtggagcctctcaccaaggccatcaagtactatcagcatctgtacagcatccaccttgccgaacagcctgaggactgtactatgcagctggctgaccacattaagttcacgcagagtgctctggactgcatgagtgtggaggtaggacggctgcgtgccttcttgcagggtgggcaggaggctacagatattgccctcctgctccgggatctggaaacttcatgcagtgacatccgccagttctgcaagaagatccgaaggcgaatgccagggacagatgctcctgggatcccagctgcactggcctttggaccacaggtatctgacacgctcctagactgcaggaaacacttgacgtgggtcgtggctgtgctgcaggaggtggcagctgctgctgcccagctcattgccccactggcagagaatgaggggctacttgtggctgctctggaggaactggctttcaaagcaagcgagcagatctatgggaccccctccagcagcccctatgagtgtctgcgccagtcatgcaacatcctcatcagtaccatgaacaagctggccacagccatgcaggagggggagtatgatgcagagcggccccccagcaagcctccaccggttgaactgcgggctgctgcccttcgtgcagagatcacagatgctgaaggcctgggtttgaagctcgaagatcgagagacagttattaaggagttgaagaagtcactcaagattaagggagaggagctaagtgaggccaatgtgcggctgagcctcctggagaagaagttggacagtgctgccaaggatgcagatgagcgcatcgagaaagtccagactcggctggaggagacccaggcactgctgcgaaagaaggagaaagagtttgaggagacaatggatgcactccaggctgacatcgaccagctggaggcagagaaggcagaactaaagcagcgtctgaacagccagtccaaacgcacgattgagggactccggggccctcctccttcaggcattgctactctggtctctggcattgctggtggagccatccctgggcaggctccagggtctgtgccaggcccagggctggtgaaggactcaccactgctgcttcagcagatctctgccatgaggctgcacatctcccagctccagcatgagaacagcatcctcaagggagcccagatgaaggcatccttggcatccctgccccctctgcatgttgcaaagctatcccatgagggccctggcagtgagttaccagctggagcgctgtatcgtaagaccagccagctgctggagacattgaatcaattgagcacacacacgcacgtagtagacatcactcgcaccagccctgctgccaagagcccgtcggcccaacttatggagcaagtggctcagcttaagtccctgagtgacaccgtcgagaagctcaaggatgaggtcctcaaggagacagtatctcagcgccctggagccacagtacccactgactttgccaccttcccttcatcagccttcctcagggccaaggaggagcagcaggatgacacagtctacatgggcaaagtgaccttctcatgtgcggctggttttggacagcgacaccggctggtgctgacccaggagcagctgcaccagcttcacagtcgcctcatctcctaagcactcctttcccctgctgtccccttcgaccctcagccctctggtgccgctctgcccgatgcacagccacctcagccagcccccaggtagaaacgtgggttaagctcttcctgccccgttcagcttcactcccaccctttcagcgtcctgccccttcaccttgacccgggttcccccactcccattccctggcctctgccataatttgttgttcaactgctccctccttcctgaggggcctcagggcttgtggggggtaggctgagaccccaccaccaaaggttaagtgaggtccccttgattgaggacttcaccccttgattaaagcaacttctgcttca

SEQ ID NO: 128334 - DNA, 598 bp, Homo sapiens
  Payload ID: 5128
  Gene Symbol: DCTN1
  Gene Name: dynactin 1
  ENST ID: ENST00000437375
  CDS Start-End: 337-598
agtgcaggtacggaggcgcgactctgccaaccgtctgctccgccggccccctacgtgttcgtgaggttgccggcggtgggctggggaccgagcccggtgtgcggggcggggactggcaggggtgggcgcttgtcggggtccgggggctccgcctgagcgtttgccccgaggccggtctgacccacctcagctcttcagcctagcattgttctcctgggatcagagtgactgcgccttagagttcctccagaactgcaagggtctcccctccgttcctgcgagcgtctgaggcgcccctgaatccatactgagctacagacgcccagcggcagcaggatgagtgcggaggcaagcgcccggcctctgcgggtgggctcccgtgtagaggtgattggaaaaggccaccgaggcactgtggcctatgttggagccacactgtttgccactggcaaatgggtaggcgtgattctggatgaagcaaagggcaaaaatgatggaactgttcaaggcaggaagtacttcacttgtgatgaagggcatggcatctttgtgcgccagtcccagatccaggtatttgaagatggagcagatactactt

SEQ ID NO: 128335 - DNA, 521 bp, Homo sapiens
  Payload ID: 5128
  Gene Symbol: DCTN1
  Gene Name: dynactin 1
  ENST ID: ENST00000440727
  CDS Start-End: 330-521
gatgtaatcccggctgcggtcggtgcgcagttttcagtcagggctggactgcgggaaaagagggttcactcgacccagaacgcctctgggcctctgggccgaagggttctgggcggtcctggaagggtctggcggcgagtcgggcagcccacgagggcggggagggcggggccggccccgcagggtcttgggcgtcggtcgtcggtggggtcggagctgggcgcggagcccctcacagtgcagcaacatagcatggagaagaatctccagagcttggggatagagagttgaccaaacaagactcaggccagacgcccagcggcagcaggatgagtgcggaggcaagcgcccggcctctgcgggtgggctcccgtgtagaggtgattggaaaaggccaccgaggcactgtggcctatgttggagccacactgtttgccactggcaaatgggtaggcgtgattctggatgaagcaaagggcaaaaatgatggaactgttcaaggcaggaagtacttcacttgt

SEQ ID NO: 128336 - DNA, 556 bp, Homo sapiens
  Payload ID: 5128
  Gene Symbol: DCTN1
  Gene Name: dynactin 1
  ENST ID: ENST00000417090
  CDS Start-End: 152-556
gtcggtcgtcggtggggtcggagctgggcgcggagcccctcacagtgcagttcccaggtgatgctaatgctgctggcccatggaacacaatctgagtagcaaaagtatagatcactggattgaaagttagagaccatgttttccagaacagatgtgctgccttgagagagtcactttatctgtccaggcctataagacgcccagcggcagcaggatgagtgcggaggcaagcgcccggcctctgcgggtgggctcccgtgtagaggtgattggaaaaggccaccgaggcactgtggcctatgttggagccacactgtttgccactggcaaatgggtaggcgtgattctggatgaagcaaagggcaaaaatgatggaactgttcaaggcaggaagtacttcacttgtgatgaagggcatggcatctttgtgcgccagtcccagatccaggtatttgaagatggagcagatactacttccccagagacacctgattcttctgcttcaaaagtcctcaaaagagagggaactgatacaactgcaaagactagcaaactg

SEQ ID NO: 128337 - DNA, 627 bp, Homo sapiens
  Payload ID: 5128
  Gene Symbol: DCTN1
  Gene Name: dynactin 1
  ENST ID: ENST00000454119
  CDS Start-End: 264-627
acggttcctgacaagtctagagcagcactagcgcagagtgagactcatcagctggcaagcaggattctgtgtctctgggttcaggaatcctcaggcagcagaggggacttgctcctcagcccccatcactgcccccacccctacccgtgtaggccaccgagtgaggcccatggactggggagggctgtgcctgacgactcctgtgtccctctatgagggcccagcgccctgaccctcctgcctagacgcccagcggcagcaggatgagtgcggaggcaagcgcccggcctctgcgggtgggctcccgtgtagaggtgattggaaaaggccaccgaggcactgtggcctatgttggagccacactgtttgccactggcaaatgggtaggcgtgattctggatgaagcaaagggcaaaaatgatggaactgttcaaggcaggaagtacttcacttgtgatgaagggcatggcatctttgtgcgccagtcccagatccaggtatttgaagatggagcagatactacttccccagagacacctgattcttctgcttcaaaagtcctcaaaagagagggaactgatacaactgcaaagactagcaaactgcggggactgaagcctaagaagg

SEQ ID NO: 128338 - DNA, 561 bp, Homo sapiens
  Payload ID: 5128
  Gene Symbol: DCTN1
  Gene Name: dynactin 1
  ENST ID: ENST00000449655
  CDS Start-End: 521-561
agtgccaggaacttgctggttgattcagggggaggaatcagcaggaacttcgaacagcctaagtaggacttctgataccactgagaggattgaggttcttgagtgcagggctgagtgcctcttgccttcttgcagaagttcctatattgaagataagtgaagcatatagcatagcttttcttcttgacttttagaggtctgggcccttggaggtgggcctggaagtcactggatatttctggggaaaggggacattttgagatggagtagagctgcattcagagtgggagtgggtttgtagacgtttttttagggtaatgaggagctggagaagggaaggaagtccgttgagtgtgtaggccttatctatgaaatccgcaaggcagatactgagtaggacctaggaacaaaaagctctgtgtacgttgtcttctggggtcctgtgaatatctggaatccagctttccaagcttccagtctcccagcctccatttaccactcaacgcccagcggcagcaggatgagtgcggaggcaagcgcccggcctctgcgggtgggctc

SEQ ID NO: 128339 - DNA, 542 bp, Homo sapiens
  Payload ID: 5128
  Gene Symbol: DCTN1
  Gene Name: dynactin 1
  ENST ID: ENST00000421392
  CDS Start-End: 315-542
actctgccaaccgtctgctccgccggccccctacgtgttcgtgagtgaggagagcagcaaacccatgttgaccactggctactcagttcccaggtgatgctaatgctgctggcccatggaacacaatctgagtagcaaaagtatagatcactggattgaaagttagagaccatgttttccagaacagatgtgctgccttgagagagtcactttatctgtccaggcctataagttgaggtaaccgggactcaggaagttaaatatcttgctcagaggagaaccaaaggtatattcagacgcccagcggcagcaggatgagtgcggaggcaagcgcccggcctctgcgggtgggctcccgtgtagaggtgattggaaaaggccaccgaggcactgtggcctatgttggagccacactgtttgccactggcaaatgggtaggcgtgattctggatgaagcaaagggcaaaaatgatggaactgttcaaggcaggaagtacttcacttgtgatgaagggcatggcatctttgtgcgccagtcccag

SEQ ID NO: 128340 - DNA, 593 bp, Homo sapiens
  Payload ID: 5128
  Gene Symbol: DCTN1
  Gene Name: dynactin 1
  ENST ID: ENST00000413111
  CDS Start-End: 366-593
gattctgtgtctctgggttcaggaatcctcaggcagcagaggggacttgctcctcagcccccatcactgcccccacccctacccgtgtaggccaccgagtgaggcccatggactggggagggctgtgcctgacgactcctgtgtccctctatgagggcccagcgccctgaccctcctgcctaggtttctaccttttctctctgtctttggccagctgggggagggggtagaggccgggtgagcaacatggcacagagcaagaggcacgtgtacagccggcaacatagcatggagaagaatctccagagcttggggatagagagttgaccaaacaagactcaggccagacgcccagcggcagcaggatgagtgcggaggcaagcgcccggcctctgcgggtgggctcccgtgtagaggtgattggaaaaggccaccgaggcactgtggcctatgttggagccacactgtttgccactggcaaatgggtaggcgtgattctggatgaagcaaagggcaaaaatgatggaactgttcaaggcaggaagtacttcacttgtgatgaagggcatggcatctttgtgcgccagtcccag

SEQ ID NO: 128341 - DNA, 565 bp, Homo sapiens
  Payload ID: 5128
  Gene Symbol: DCTN1
  Gene Name: dynactin 1
  ENST ID: ENST00000458655
  CDS Start-End: 6-565
acttgatgcttatgggcctgctgaggccttacatcctgggggagaggggaacagtgatgacgcccagcggcagcaggatgagtgcggaggcaagcgcccggcctctgcgggtgggctcccgtgtagaggtgattggaaaaggccaccgaggcactgtggcctatgttggagccacactgtttgccactggcaaatgggtaggcgtgattctggatgaagcaaagggcaaaaatgatggaactgttcaaggcaggaagtacttcacttgtgatgaagggcatggcatctttgtgcgccagtcccagatccaggtatttgaagatggagcagatactacttccccagagacacctgattcttctgcttcaaaagtcctcaaaagagagggaactgatacaactgcaaagactagcaaactgcggggactgaagcctaagaaggcaccgacagcccgaaagaccacaactcggcgacccaagcccacgcgcccagccagtactggggtggctggggccagtagctccctgggcccctctggctcagcgtcagcaggtgagctgagcag

SEQ ID NO: 128342 - DNA, 4229 bp, Homo sapiens
  Payload ID: 5128
  Gene Symbol: DCTN1
  Gene Name: dynactin 1
  ENST ID: ENST00000434055
  CDS Start-End: 93-2765
ggccggccccgcagggtcttgggcgtcggtcgtcggtggggtcggagctgggcgcggagcccctcacagtgcagacgcccagcggcagcaggatgagtgcggaggcaagcgcccggcctctgcgggtgggctcccgtgtagaggtgattggaaaaggccaccgaggcactgtggcctatgttggagccacactgtttgccactggcaaatgggtaggcgtgattctggatgaagcaaagggcaaaaatgatggaactgttcaaggcaggaagtacttcacttgtgatgaagggcatggcatctttgtgcgccagtcccagatccaggtatttgaagatggagcagatactacttccccagagacacctgattcttctgcttcaaaagtcctcaaaagagagggaactgatacaactgcaaagactagcaaactgcccacgcgcccagccagtactggggtggctggggccagtagctccctgggcccctctggctcagcgtcagcaggtgagctgagcagcagtgagcccagcaccccggctcagactccgctggcagcacccatcatccccacgccggtcctcacctctcctggagcagtccccccgcttccttccccatccaaggaggaggagggactaagggctcaggtgcgggacctggaggagaaactagagaccctgagactgaaacgggcagaagacaaagcaaagctaaaagagctggagaaacacaaaatccagctggagcaggtgcaggaatggaagagcaaaatgcaggagcagcaggccgacctgcagcggcgcctcaaggaggcgagaaaggaagccaaggaggcgctggaggcaaaggaacgctatatggaggagatggctgatactgctgatgccattgagatggccactttggacaaggagatggctgaagagcgggctgagtccctgcagcaggaggtggaggcactgaaggagcgggtggacgagctcactactgacttagagatcctcaaggctgagattgaagagaagggctcagatggcgctgcatccagttatcagctcaagcagcttgaggagcagaatgcccgcctgaaggatgccctggtgaggatgcgggatctttcttcctcagagaagcaggagcatgtgaagctccagaagctcatggaaaagaagaaccaagagctggaagttgtgaggcaacagcgggagcgtctgcaggaggagctaagccaggcagagagcaccattgatgagctcaaggagcaggtggatgctgctctgggtgctgaggagatggtggagatgctgacagatcggaacctgaatctggaagagaaagtgcgcgagttgagggagactgtgggagacttggaagcgatgaatgagatgaacgatgagctgcaggagaatgcacgtgagacagaactggagctgcgggagcagctggacatggcaggcgcgcgggttcgtgaggcccagaagcgtgtggaggcagcccaggagacggttgcagactaccagcagaccatcaagaagtaccgccagctgaccgcccatctacaggatgtgaatcgggaactgacaaaccagcaggaagcatctgtggagaggcaacagcagccacctccagagacctttgacttcaaaatcaagtttgctgagactaaggcccatgccaaggcaattgagatggaattgaggcagatggaggtggcccaggccaatcgacacatgtccctgctgacagccttcatgcctgacagcttccttcggccaggtggggaccatgactgcgttctggtgctgttgctcatgcctcgtctcatttgcaaggcagagctgatccggaagcaggcccaggagaagtttgaactaagtgagaactgttcagagcggcctgggctgcgaggagctgctggggagcaactcagctttgctgctggactggtgtactcgctgagcctgctgcaggccacgctacaccgctatgagcatgccctctctcagtgcagtgtggatgtgtataagaaagtgggcagcctgtaccctgagatgagtgcccatgagcgctccttggatttcctcattgaactgctgcacaaggatcagctggatgagactgtcaatgtggagcctctcaccaaggccatcaagtactatcagcatctgtacagcatccaccttgccgaacagcctgaggactgtactatgcagctggctgaccacattaagttcacgcagagtgctctggactgcatgagtgtggaggtaggacggctgcgtgccttcttgcagggtgggcaggaggctacagatattgccctcctgctccgggatctggaaacttcatgcagtgacatccgccagttctgcaagaagatccgaaggcgaatgccagggacagatgctcctgggatcccagctgcactggcctttggaccacaggtatctgacacgctcctagactgcaggaaacacttgacgtgggtcgtggctgtgctgcaggaggtggcagctgctgctgcccagctcattgccccactggcagagaatgaggggctacttgtggctgctctggaggaactggctttcaaagcaagcgagcaggtgggcctggatggctgggtagaaggtgtggggagagttagtgaccagtgtggggcttttacttctgcccttggctcctgcagatctatgggaccccctccagcagcccctatgagtgtctgcgccagtcatgcaacatcctcatcagtaccatgaacaagctggccacagccatgcaggagggggagtatgatgcagagcggccccccagcaagcctccaccggttgaactgcgggctgctgcccttcgtgcagagatcacagatgctgaaggcctgggtttgaagctcgaagatcgagagacagttattaaggagttgaagaagtcactcaagattaagggagaggagctaagtgaggccaatgtgcggctgagcctcctggagaagaagttggacagtgctgccaaggatgcagatgagcgcatcgagaaagtccagactcggctggaggagacccaggcactgctgcgaaagaaggagaaagagtttgaggagacaatggatgcactccaggctgacatcgaccagctggaggcagagaaggcagaactaaagcagcgtctgaacagccagtccaaacgcacgattgagggactccggggccctcctccttcaggcattgctactctggtctctggcattgctggtggagccatccctgggcaggctccagggtctgtgccaggcccagggctggtgaaggactcaccactgctgcttcagcagatctctgccatgaggctgcacatctcccagctccagcatgagaacagcatcctcaagggagcccagatgaaggcatccttggcatccctgccccctctgcatgttgcaaagctatcccatgagggccctggcagtgagttaccagctggagcgctgtatcgtaagaccagccagctgctggagacattgaatcaattgagcacacacacgcacgtagtagacatcactcgcaccagccctgctgccaagagcccgtcggcccaacttatggagcaagtggctcagcttaagtccctgagtgacaccgtcgagaagctcaaggatgaggtcctcaaggagacagtatctcagcgccctggagccacagtacccactgactttgccaccttcccttcatcagccttcctcagggccaaggaggagcagcaggatgacacagtctacatgggcaaagtgaccttctcatgtgcggctggttttggacagcgacaccggctggtgctgacccaggagcagctgcaccagcttcacagtcgcctcatctcctaagcactcctttcccctgctgtccccttcgaccctcagccctctggtgccgctctgcccgatgcacagccacctcagccagcccccaggtagaaacgtgggttaagctcttcctgccccgttcagcttcactcccaccctttcagcgtcctgccccttcaccttgacccgggttcccccactcccattccctggcctctgccataatttgttgttcaactgctccctccttcctgaggggcctcagggcttgtggggggtaggctgagaccccaccaccaaaggttaagtgaggtccccttgattgaggacttcaccccttgattaaagcaacttctgcttcagt

SEQ ID NO: 128343 - DNA, 4485 bp, Homo sapiens
  Payload ID: 5128
  Gene Symbol: DCTN1
  Gene Name: dynactin 1
  ENST ID: ENST00000628224
  CDS Start-End: 370-4140
agaggctagcacggttcctgacaagtctagagcagcactagcgcagagtgagactcatcagctggcaagcaggattctgtgtctctgggttcaggaatcctcaggcagcagaggggacttgctcctcagcccccatcactgcccccacccctacccgtgtaggccaccgagtgaggcccatggactggggagggctgtgcctgacgactcctgtgtccctctatgagggcccagcgccctgaccctcctgcctaggtttctaccttttctctctgtctttggccagctgggggagggggtagaggccgggtgagcaacatggcacagagcaagaggcacgtgtacagccggacgcccagcggcagcaggatgagtgcggaggcaagcgcccggcctctgcgggtgggctcccgtgtagaggtgattggaaaaggccaccgaggcactgtggcctatgttggagccacactgtttgccactggcaaatgggtaggcgtgattctggatgaagcaaagggcaaaaatgatggaactgttcaaggcaggaagtacttcacttgtgatgaagggcatggcatctttgtgcgccagtcccagatccaggtatttgaagatggagcagatactacttccccagagacacctgattcttctgcttcaaaagtcctcaaaagagagggaactgatacaactgcaaagactagcaaactgcggggactgaagcctaagaaggcaccgacagcccgaaagaccacaactcggcgacccaagcccacgcgcccagccagtactggggtggctggggccagtagctccctgggcccctctggctcagcgtcagcaggtgagctgagcagcagtgagcccagcaccccggctcagactccgctggcagcacccatcatccccacgccggtcctcacctctcctggagcagtccccccgcttccttccccatccaaggaggaggagggactaagggctcaggtgcgggacctggaggagaaactagagaccctgagactgaaacgggcagaagacaaagcaaagctaaaagagctggagaaacacaaaatccagctggagcaggtgcaggaatggaagagcaaaatgcaggagcagcaggccgacctgcagcggcgcctcaaggaggcgagaaaggaagccaaggaggcgctggaggcaaaggaacgctatatggaggagatggctgatactgctgatgccattgagatggccactttggacaaggagatggctgaagagcgggctgagtccctgcagcaggaggtggaggcactgaaggagcgggtggacgagctcactactgacttagagatcctcaaggctgagattgaagagaagggctcagatggcgctgcatccagttatcagctcaagcagcttgaggagcagaatgcccgcctgaaggatgccctggtgaggatgcgggatctttcttcctcagagaagcaggagcatgtgaagctccagaagctcatggaaaagaagaaccaagagctggaagttgtgaggcaacagcgggagcgtctgcaggaggagctaagccaggcagagagcaccattgatgagctcaaggagcaggtggatgctgctctgggtgctgaggagatggtggagatgctgacagatcggaacctgaatctggaagagaaagtgcgcgagttgagggagactgtgggagacttggaagcgatgaatgagatgaacgatgagctgcaggagaatgcacgtgagacagaactggagctgcgggagcagctggacatggcaggcgcgcgggttcgtgaggcccagaagcgtgtggaggcagcccaggagacggttgcagactaccagcagaccatcaagaagtaccgccagctgaccgcccatctacaggatgtgaatcgggaactgacaaaccagcaggaagcatctgtggagaggcaacagcagccacctccagagacctttgacttcaaaatcaagtttgctgagactaaggcccatgccaaggcaattgagatggaattgaggcagatggaggtggcccaggccaatcgacacatgtccctgctgacagccttcatgcctgacagcttccttcggccaggtggggaccatgactgcgttctggtgctgttgctcatgcctcgtctcatttgcaaggcagagctgatccggaagcaggcccaggagaagtttgaactaagtgagaactgttcagagcggcctgggctgcgaggagctgctggggagcaactcagctttgctgctggactggtgtactcgctgagcctgctgcaggccacgctacaccgctatgagcatgccctctctcagtgcagtgtggatgtgtataagaaagtgggcagcctgtaccctgagatgagtgcccatgagcgctccttggatttcctcattgaactgctgcacaaggatcagctggatgagactgtcaatgtggagcctctcaccaaggccatcaagtactatcagcatctgtacagcatccaccttgccgaacagcctgaggactgtactatgcagctggctgaccacattaagttcacgcagagtgctctggactgcatgagtgtggaggtaggacggctgcgtgccttcttgcagggtgggcaggaggctacagatattgccctcctgctccgggatctggaaacttcatgcagtgacatccgccagttctgcaagaagatccgaaggcgaatgccagggacagatgctcctgggatcccagctgcactggcctttggaccacaggtatctgacacgctcctagactgcaggaaacacttgacgtgggtcgtggctgtgctgcaggaggtggcagctgctgctgcccagctcattgccccactggcagagaatgaggggctacttgtggctgctctggaggaactggctttcaaagcaagcgagcagatctatgggaccccctccagcagcccctatgagtgtctgcgccagtcatgcaacatcctcatcagtaccatgaacaagctggccacagccatgcaggagggggagtatgatgcagagcggccccccagcaagcctccaccggttgaactgcgggctgctgcccttcgtgcagagatcacagatgctgaaggcctgggtttgaagctcgaagatcgagagacagttattaaggagttgaagaagtcactcaagattaagggagaggagctaagtgaggccaatgtgcggctgagcctcctggagaagaagttggacagtgctgccaaggatgcagatgagcgcatcgagaaagtccagactcggctggaggagacccaggcactgctgcgaaagaaggagaaagagtttgaggagacaatggatgcactccaggctgacatcgaccagctggaggcagagaaggcagaactaaagcagcgtctgaacagccagtccaaacgcacgattgagggactccggggccctcctccttcaggcattgctactctggtctctggcattgctggtggagccatccctgggcaggctccagggtctgtgccaggcccagggctggtgaaggactcaccactgctgcttcagcagatctctgccatgaggctgcacatctcccagctccagcatgagaacagcatcctcaagggagcccagatgaaggcatccttggcatccctgccccctctgcatgttgcaaagctatcccatgagggccctggcagtgagttaccagctggagcgctgtatcgtaagaccagccagctgctggagacattgaatcaattgagcacacacacgcacgtagtagacatcactcgcaccagccctgctgccaagagcccgtcggcccaacttatggagcaagtggctcagcttaagtccctgagtgacaccgtcgagaagctcaaggatgaggtcctcaaggagacagtatctcagcgccctggagccacagtacccactgactttgccaccttcccttcatcagccttcctcagggccaaggaggagcagcaggatgacacagtctacatgggcaaagtgaccttctcatgtgcggctggttttggacagcgacaccggctggtgctgacccaggagcagctgcaccagcttcacagtcgcctcatctcctaagcactcctttcccctgctgtccccttcgaccctcagccctctggtgccgctctgcccgatgcacagccacctcagccagcccccaggtagaaacgtgggttaagctcttcctgccccgttcagcttcactcccaccctttcagcgtcctgccccttcaccttgacccgggttcccccactcccattccctggcctctgccataatttgttgttcaactgctccctccttcctgaggggcctcagggcttgtggggggtaggctgagaccccaccaccaaaggttaagtgaggtccccttgattgaggacttcaccccttgattaaagcaacttctgcttcagtgc

SEQ ID NO: 128344 - DNA, 4160 bp, Homo sapiens
  Payload ID: 5128
  Gene Symbol: DCTN1
  Gene Name: dynactin 1
  Uniprot ID: Q14203
  ENST ID: ENST00000633691
  CDS Start-End: 384-3818
agtggctccacccccatggagcagaggagggtgggtgcatgacgtcaggtggagctggtgctgcggccactgaggctgccatcagcctaagctggtgaactgggccaggcaccgctccggtgcctgccggagcctggcgatccagctgcacgtctgcgggggcctctgtgtcagagcggcggccgtttgcaggctgggaagctgccgcaccgggaggctgagactgcattgttgggatttgatgcactaatctcctgtctccgccgcctttccctctgttcggtctcttgccctccctcccttcgtctgtccttcctccgtgtgtttgtctatcctcctctgtccctcctctttcctctccttgctttctttggttttctgcaatgatgagacaggcaccgacagcccgaaagaccacaactcggcgacccaagcccacgcgcccagccagtactggggtggctggggccagtagctccctgggcccctctggctcagcgtcagcaggtgagctgagcagcagtgagcccagcaccccggctcagactccgctggcagcacccatcatccccacgccggtcctcacctctcctggagcagtccccccgcttccttccccatccaaggaggaggagggactaagggctcaggtgcgggacctggaggagaaactagagaccctgagactgaaacgggcagaagacaaagcaaagctaaaagagctggagaaacacaaaatccagctggagcaggtgcaggaatggaagagcaaaatgcaggagcagcaggccgacctgcagcggcgcctcaaggaggcgagaaaggaagccaaggaggcgctggaggcaaaggaacgctatatggaggagatggctgatactgctgatgccattgagatggccactttggacaaggagatggctgaagagcgggctgagtccctgcagcaggaggtggaggcactgaaggagcgggtggacgagctcactactgacttagagatcctcaaggctgagattgaagagaagggctcagatggcgctgcatccagttatcagctcaagcagcttgaggagcagaatgcccgcctgaaggatgccctggtgaggatgcgggatctttcttcctcagagaagcaggagcatgtgaagctccagaagctcatggaaaagaagaaccaagagctggaagttgtgaggcaacagcgggagcgtctgcaggaggagctaagccaggcagagagcaccattgatgagctcaaggagcaggtggatgctgctctgggtgctgaggagatggtggagatgctgacagatcggaacctgaatctggaagagaaagtgcgcgagttgagggagactgtgggagacttggaagcgatgaatgagatgaacgatgagctgcaggagaatgcacgtgagacagaactggagctgcgggagcagctggacatggcaggcgcgcgggttcgtgaggcccagaagcgtgtggaggcagcccaggagacggttgcagactaccagcagaccatcaagaagtaccgccagctgaccgcccatctacaggatgtgaatcgggaactgacaaaccagcaggaagcatctgtggagaggcaacagcagccacctccagagacctttgacttcaaaatcaagtttgctgagactaaggcccatgccaaggcaattgagatggaattgaggcagatggaggtggcccaggccaatcgacacatgtccctgctgacagccttcatgcctgacagcttccttcggccaggtggggaccatgactgcgttctggtgctgttgctcatgcctcgtctcatttgcaaggcagagctgatccggaagcaggcccaggagaagtttgaactaagtgagaactgttcagagcggcctgggctgcgaggagctgctggggagcaactcagctttgctgctggactggtgtactcgctgagcctgctgcaggccacgctacaccgctatgagcatgccctctctcagtgcagtgtggatgtgtataagaaagtgggcagcctgtaccctgagatgagtgcccatgagcgctccttggatttcctcattgaactgctgcacaaggatcagctggatgagactgtcaatgtggagcctctcaccaaggccatcaagtactatcagcatctgtacagcatccaccttgccgaacagcctgaggactgtactatgcagctggctgaccacattaagttcacgcagagtgctctggactgcatgagtgtggaggtaggacggctgcgtgccttcttgcagggtgggcaggaggctacagatattgccctcctgctccgggatctggaaacttcatgcagtgacatccgccagttctgcaagaagatccgaaggcgaatgccagggacagatgctcctgggatcccagctgcactggcctttggaccacaggtatctgacacgctcctagactgcaggaaacacttgacgtgggtcgtggctgtgctgcaggaggtggcagctgctgctgcccagctcattgccccactggcagagaatgaggggctacttgtggctgctctggaggaactggctttcaaagcaagcgagcagatctatgggaccccctccagcagcccctatgagtgtctgcgccagtcatgcaacatcctcatcagtaccatgaacaagctggccacagccatgcaggagggggagtatgatgcagagcggccccccagcaagcctccaccggttgaactgcgggctgctgcccttcgtgcagagatcacagatgctgaaggcctgggtttgaagctcgaagatcgagagacagttattaaggagttgaagaagtcactcaagattaagggagaggagctaagtgaggccaatgtgcggctgagcctcctggagaagaagttggacagtgctgccaaggatgcagatgagcgcatcgagaaagtccagactcggctggaggagacccaggcactgctgcgaaagaaggagaaagagtttgaggagacaatggatgcactccaggctgacatcgaccagctggaggcagagaaggcagaactaaagcagcgtctgaacagccagtccaaacgcacgattgagggactccggggccctcctccttcaggcattgctactctggtctctggcattgctggtgaagaacagcagcgaggagccatccctgggcaggctccagggtctgtgccaggcccagggctggtgaaggactcaccactgctgcttcagcagatctctgccatgaggctgcacatctcccagctccagcatgagaacagcatcctcaagggagcccagatgaaggcatccttggcatccctgccccctctgcatgttgcaaagctatcccatgagggccctggcagtgagttaccagctggagcgctgtatcgtaagaccagccagctgctggagacattgaatcaattgagcacacacacgcacgtagtagacatcactcgcaccagccctgctgccaagagcccgtcggcccaacttatggagcaagtggctcagcttaagtccctgagtgacaccgtcgagaagctcaaggatgaggtcctcaaggagacagtatctcagcgccctggagccacagtacccactgactttgccaccttcccttcatcagccttcctcagggccaaggaggagcagcaggatgacacagtctacatgggcaaagtgaccttctcatgtgcggctggttttggacagcgacaccggctggtgctgacccaggagcagctgcaccagcttcacagtcgcctcatctcctaagcactcctttcccctgctgtccccttcgaccctcagccctctggtgccgctctgcccgatgcacagccacctcagccagcccccaggtagaaacgtgggttaagctcttcctgccccgttcagcttcactcccaccctttcagcgtcctgccccttcaccttgacccgggttcccccactcccattccctggcctctgccataatttgttgttcaactgctccctccttcctgaggggcctcagggcttgtggggggtaggctgagaccccaccaccaaaggttaagtgaggtccccttgattgaggacttcaccccttgattaaagcaacttctgcttcag

SEQ ID NO: 128345 - DNA, 1677 bp, Homo sapiens
  Payload ID: 5129
  Gene Symbol: DCTN2
  Gene Name: dynactin 2 (p50)
  Uniprot ID: Q13561
  ENST ID: ENST00000434715
  CDS Start-End: 79-1299
aacccagcctctcccctacccgaacaccggccccggctccaccgaggcccgggtcccccagcccgtctcgccgccgccatggcggaccctaaatacgccgaccttcccggcattgccaggaatgagccagatgtttatgaaactagcgacctacctgaggatgatcaagcggagttcgatgcgtttgcacaagagctggaggagctgacaagcacaagtgtggaacacatcattgtcaatcctaatgctgcctatgacaagttcaaggacaagagagtggggacaaagggacttgatttctcagatcgtattggaaaaaccaagaggacaggatatgaatctggagaatatgagatgcttggagagggtctgggagtgaaggagacaccccagcaaaagtaccagcgcctactgcatgaggtccaagagctgacaactgaagttgaaaaaatcaagacgacagtgaaggagtcagccacagaggagaagctgacccctgtgttgctggctaaacagctggcagccctgaagcagcagctggttgcttcccacctggagaagctgctgggaccagatgctgcaatcaaccttaccgaccccgatggcgccctggctaagcgcctactactgcagctggaagcaacaaagaacagcaaagggggatcagggggaaaaaccactgggacccccccagatagcagccttgtcacttatgaactacattctcggcctgagcaggacaagttctctcaagctgccaaagtcgcagaacttgaaaagcgcctgacagagctggagacagctgtacgttgtgatcaggatgctcagaatcccctttctgcaggtctacagggagcctgtctcatggagactgtagagctgttgcaagcaaaggtgagcgccctagaccttgcagttttggatcaagtggaggctcggctacagagtgtcctgggaaaggtgaacgagattgccaagcataaagcctctgtagaagatgcagatacacaaagcaaggtgcaccagctatatgaaactatacagcgctggagccccattgcctccaccctccctgagctggtgcagagacttgtcaccatcaagcagctgcacgagcaagccatgcagtttggtcagctcctgacacacttggataccacccagcagatgattgctaattccttgaaggacaataccaccctcttgacccaggtgcagacaaccatgcgtgaaaacctggccacagttgaggggaactttgccagcattgatgaacggatgaagaagctgggaaagtgagcacatttgggagctggagaacaggggttatccctacccctgtgaactctgttaacagcttacatagggtttcccctttactataactctagcatccccatcccatttgacactgggggcaagggttcttcttgcatgtggggtttatacccctcccctgatgaatacagagtggtagctaggggttggttatcatcagaaggtggtctcccctcaggcctgggggataaggacgtgggcccagccacatgccaactcatgtccaatactgctttgcctggtgtggggaaggattgggtcttgtcccccaacacagcttctgtggctgactgtaatactgtacaactgtttctgaccattaaatgctgttgtactctg

SEQ ID NO: 128346 - DNA, 1321 bp, Homo sapiens
  Payload ID: 5129
  Gene Symbol: DCTN2
  Gene Name: dynactin 2 (p50)
  Uniprot ID: Q13561
  ENST ID: ENST00000543672
  CDS Start-End: 110-1321
tccctttgccgccgccttagcccgggacccgaacccagcctctcccctacccgaacaccggccccggctccaccgaggcccgggtcccccagcccgtctcgccgccgccatggcggaccctaaatacgccgaccttcccggcattgccaggaatgagccagatgtttatgaaactagcgacctacctgaggatgatcaagcggagttcgatgcggagctggaggagctgacaagcacaagtgtggaacacatcattgtcaatcctaatgctgcctatgacaagttcaaggacaagagagtggggacaaagggacttgatttctcagatcgtattggaaaaaccaagaggacaggatatgaatctggagaatatgagatgcttggagagggtctgggagtgaaggagacaccccagcaaaagtaccagcgcctactgcatgaggtccaagagctgacaactgaagttgaaaaaatcaagacgacagtgaaggagtcagccacagaggagaagctgacccctgtgttgctggctaaacagctggcagccctgaagcagcagctggttgcttcccacctggagaagctgctgggaccagatgctgcaatcaaccttaccgaccccgatggcgccctggctaagcgcctactactgcagctggaagcaacaaagaacagcaaagggggatcagggggaaaaaccactgggacccccccagatagcagccttgtcacttatgaactacattctcggcctgagcaggacaagttctctcaagctgccaaagtcgcagaacttgaaaagcgcctgacagagctggagacagctgtacgttgtgatcaggatgctcagaatcccctttctgcaggtctacagggagcctgtctcatggagactgtagagctgttgcaagcaaaggtgagcgccctagaccttgcagttttggatcaagtggaggctcggctacagagtgtcctgggaaaggtgaacgagattgccaagcataaagcctctgtagaagatgcagatacacaaagcaaggtgcaccagctatatgaaactatacagcgctggagccccattgcctccaccctccctgagctggtgcagagacttgtcaccatcaagcagctgcacgagcaagccatgcagtttggtcagctcctgacacacttggataccacccagcagatgattgctaattccttgaaggacaataccaccctcttgacccaggtgcagacaaccatgcgtgaaaacctggccacagttgaggggaactttgccagcattgatgaacggatgaagaagctgggaaagtga

SEQ ID NO: 128347 - DNA, 1527 bp, Homo sapiens
  Payload ID: 5129
  Gene Symbol: DCTN2
  Gene Name: dynactin 2 (p50)
  ENST ID: ENST00000550201
  CDS Start-End: 90-1037
cccgggacccgaacccagcctctcccctacccgaacaccggccccggctccaccgaggcccgggtcccccagcccgtctcgccgccgccatggcggaccctaaatacgccgaccttcccggcattgccaggaatgagccagatgtttatgaaactagcgacctacctgaggatgatcaagcggagttcgatgcggaggagctgacaagcacaagtgtggaacacatcattgtcaatcctaatgctgcctatgacaagttcaaggacaagagagtggggacaaagggacttgatttctcagatcgtattggaaaaaccaagaggacaggatatgaatctggagaatatgagatgcttggagagggtctgggagtgaaggagacaccccagcaaaagtaccagcgcctactgcatgaggtccaagagctgacaactgaagttgaaaaaatcaagacgacagtgaaggagtcagccacagaggagaagctgacccctgtgttgctggctaaacagctggcagccctgaagcagcagctggttgcttcccacctggagaagctgctgggaccagatgctgcaatcaaccttaccgaccccgatggcgccctggctaagcgcctactactgcagctggaagcaacaaagaacagcaaagggggatcagggggaaaaaccactgggacccccccagatagcagccttgtcacttatgaactacattctcggcctgagcaggacaagttctctcaagctgccaaagtcgcagaacttgaaaagcgcctgacagagctggagacagctgtacgttgtgatcaggatgctcagaatcccctttctgcaggtctacagggagcctgtctcatggagactgtagagctgttgcaagcaaaggtgagcgccctagaccttgcagttttggatcaagtggaggctcggctacagagtgtcctgggaaaggtgaacgagattgccaagcataaagcctctgtagaagatgcagatacacaaagcaagccatgcagtttggtcagctcctgacacacttggataccacccagcagatgattgctaattccttgaaggacaataccaccctcttgacccaggtgcagacaaccatgcgtgaaaacctggccacagttgaggggaactttgccagcattgatgaacggatgaagaagctgggaaagtgagcacatttgggagctggagaacaggggttatccctacccctgtgaactctgttaacagcttacatagggtttcccctttactataactctagcatccccatcccatttgacactgggggcaagggttcttcttgcatgtggggtttatacccctcccctgatgaatacagagtggtagctaggggttggttatcatcagaaggtggtctcccctcaggcctgggggataaggacgtgggcccagccacatgccaactcatgtccaatactgctttgcctggtgtggggaaggattgggtcttgtcccccaacacagcttctgtggctgactgtaa

SEQ ID NO: 128348 - DNA, 384 bp, Homo sapiens
  Payload ID: 5129
  Gene Symbol: DCTN2
  Gene Name: dynactin 2 (p50)
  ENST ID: ENST00000550086
  CDS Start-End: 1-384
gaggagctgacaagcacaagtgtggaacacatcattgtcaatcctaatgctgcctatgacaagttcaaggacaagagagtggggacaaagggacttgatttctcagatcgtattggaaaaaccaagaggacaggatatgaatctggagaatatgagatgcttggagagggtctgggagtgaaggagacaccccagcaaaagtaccagcgcctactgcatgaggtccaagagctgacaactgaagttgaaaaaatcaagaatcccctttctgcaggtctacagggagcctgtctcatggagactgtagagctgttgcaagcaaaggtgagcgccctagaccttgcagttttggatcaagtggaggctcggctacagagtgtcctg

SEQ ID NO: 128349 - DNA, 1439 bp, Homo sapiens
  Payload ID: 5129
  Gene Symbol: DCTN2
  Gene Name: dynactin 2 (p50)
  ENST ID: ENST00000549394
  CDS Start-End: 58-195
gaacaccggccccggctccaccgaggcccgggtcccccagcccgtctcgccgccgccatggcggaccctaaatacgccgaccttcccggcattgccaggaatgagccagatgtttatgaaactagcgacctacctgaggatgatcaagcggagttcgatgcgtttgcacaaatcttcaagacactgctggagtaggtgctactggaggactagagtgtgctcccgggccacagccttggagaggctccagaggatgccagcgccaggaggagctgacaagcacaagtgtggaacacatcattgtcaatcctaatgctgcctatgacaagttcaaggacaagagagtggggacaaagggacttgatttctcagatcgtattggaaaaaccaagaggacaggatatgaatctggagaatatgagatgcttggagagggtctgggagtgaaggagacaccccagcaaaagtaccagcgcctactgcatgaggtccaagagctgacaactgaagttgaaaaaatcaagacgacagtgaaggagtcagccacagaggagaagctgacccctgtgttgctggctaaacagctggcagccctgaagcagcagctggttgcttcccacctggagaagctgctgggaccagatgctgcaatcaaccttaccgaccccgatggcgccctggctaagcgcctactactgcagctggaagcaacaaagaacagcaaagggggatcagggggaaaaaccactgggacccccccagatagcagccttgtcacttatgaactacattctcggcctgagcaggacaagttctctcaagctgccaaagtcgcagaacttgaaaagcgcctgacagagctggagacagctgtacgttgtgatcaggatgctcagaatcccctttctgcaggtctacagggagcctgtctcatggagactgtagagctgttgcaagcaaaggtgagcgccctagaccttgcagttttggatcaagtggaggctcggctacagagtgtcctgggaaaggtgaacgagattgccaagcataaagcctctgtagaagatgcagatacacaaagcaaggtgcaccagctatatgaaactatacagcgctggagccccattgcctccaccctccctgagctggtgcagagacttgtcaccatcaagcagctgcacgagcaagccatgcagtttggtcagctcctgacacacttggataccacccagcagatgattgctaattccttgaaggacaataccaccctcttgacccaggtgcagacaaccatgcgtgaaaacctggccacagttgaggggaactttgccagcattgatgaacggatgaagaagctgggaaagtgagcacatttgggagctggagaacaggggttatccctacccctgtgaactctgttaacagcttacatagggttt

SEQ ID NO: 128350 - DNA, 2061 bp, Homo sapiens
  Payload ID: 5129
  Gene Symbol: DCTN2
  Gene Name: dynactin 2 (p50)
  Uniprot ID: Q13561
  ENST ID: ENST00000548249
  CDS Start-End: 269-1474
aatcctaggcggcgtcccctggccattacctcattccctggcctcgttctccccaatcccggcctctccaggggtgtggcagcagggctgttctcgcgacttttgctttacccttctgctgtgctactgctgtcgcgagacttcctgctcatctgccgctccctttgccgccgccttagcccgggacccgaacccagcctctcccctacccgaacaccggccccggctccaccgaggcccgggtcccccagcccgtctcgccgccgccatggcggaccctaaatacgccgaccttcccggcattgccaggaatgagccagatgtttatgaaactagcgacctacctgaggatgatcaagcggagttcgatgcggaggagctgacaagcacaagtgtggaacacatcattgtcaatcctaatgctgcctatgacaagttcaaggacaagagagtggggacaaagggacttgatttctcagatcgtattggaaaaaccaagaggacaggatatgaatctggagaatatgagatgcttggagagggtctgggagtgaaggagacaccccagcaaaagtaccagcgcctactgcatgaggtccaagagctgacaactgaagttgaaaaaatcaagacgacagtgaaggagtcagccacagaggagaagctgacccctgtgttgctggctaaacagctggcagccctgaagcagcagctggttgcttcccacctggagaagctgctgggaccagatgctgcaatcaaccttaccgaccccgatggcgccctggctaagcgcctactactgcagctggaagcaacaaagaacagcaaagggggatcagggggaaaaaccactgggacccccccagatagcagccttgtcacttatgaactacattctcggcctgagcaggacaagttctctcaagctgccaaagtcgcagaacttgaaaagcgcctgacagagctggagacagctgtacgttgtgatcaggatgctcagaatcccctttctgcaggtctacagggagcctgtctcatggagactgtagagctgttgcaagcaaaggtgagcgccctagaccttgcagttttggatcaagtggaggctcggctacagagtgtcctgggaaaggtgaacgagattgccaagcataaagcctctgtagaagatgcagatacacaaagcaaggtgcaccagctatatgaaactatacagcgctggagccccattgcctccaccctccctgagctggtgcagagacttgtcaccatcaagcagctgcacgagcaagccatgcagtttggtcagctcctgacacacttggataccacccagcagatgattgctaattccttgaaggacaataccaccctcttgacccaggtgcagacaaccatgcgtgaaaacctggccacagttgaggggaactttgccagcattgatgaacggatgaagaagctgggaaagtgagcacatttgggagctggagaacaggggttatccctacccctgtgaactctgttaacagcttacatagggtttcccctttactataactctagcatccccatcccatttgacactgggggcaagggttcttcttgcatgtggggtttatacccctcccctgatgaatacagagtggtagctaggggttggttatcatcagaaggtggtctcccctcaggcctgggggataaggacgtgggcccagccacatgccaactcatgtccaatactgctttgcctggtgtggggaaggattgggtcttgtcccccaacacagcttctgtggctgactgtaatactgtacaactgtttctgaccattaaatgctgttgtactctgtgtggcctctgctgtgtttcctggggaggaagcagcactaggatatagatattcattcgtcataacaggcaatctaagccactctatactacaagagatggatttaaattgtaacctgttcttaccaaagaactaaataaaaaatgagtacagagccagagccagagtttcaaaatattctcatctgttaaattaagagtgtctcccat

SEQ ID NO: 128351 - DNA, 580 bp, Homo sapiens
  Payload ID: 5129
  Gene Symbol: DCTN2
  Gene Name: dynactin 2 (p50)
  ENST ID: ENST00000546670
  CDS Start-End: 123-580
gctcatctgccgctccctttgccgccgccttagcccgggacccgaacccagcctctcccctacccgaacaccggccccggctccaccgaggcccgggtcccccagcccgtctcgccgccgccatggcggaccctaaatacgccgaccttcccggcattgccaggaatgagccagatgtttatgaaactagcgacctacctgaggatgatcaagcggagttcgatgcggaggagctgacaagcacaagtgtggaacacatcattgtcaatcctaatgctgcctatgacaagttcaaggacaagagagtggggacaaagggacttgatttctcagatcgtattggaaaaaccaagaggacaggatatgaatctggagaatatgagatgcttggagagggtctgggagtgaaggagacaccccagcaaaagtaccagcgcctactgcatgaggtccaagagctgacaactgaagttgaaaaaatcaaggtcgcagaacttgaaaagcgcctgacagagctggagacagctgtacgttgtgatcaggatgctcagaatcccctttctgcaggtctacagggagc

SEQ ID NO: 128352 - DNA, 817 bp, Homo sapiens
  Payload ID: 5129
  Gene Symbol: DCTN2
  Gene Name: dynactin 2 (p50)
  ENST ID: ENST00000546758
  CDS Start-End: 1-807
gttgaaaaaatcaagacgacagtgaaggagtcagccacagaggagaagctgacccctgtgttgctggctaaacagctggcagccctgaagcagcagctggttgcttcccacctggagaagctgctgggaccagatgctgcaatcaaccttaccgaccccgatggcgccctggctaagcgcctactactgcagctggaagcaacaaagaacagcaaagggggatcagggggaaaaaccactgggacccccccagatagcagccttgtcacttatgaactacattctcggcctgagcaggacaagttctctcaagctgccaaagtcgcagaacttgaaaagcgcctgacagagctggagacagctgtacgttgtgatcaggatgctcagaatcccctttctgcaggtctacagggagcctgtctcatggagactgtagagctgttgcaagcaaagagtgtcctgggaaaggtgaacgagattgccaagcataaagcctctgtagaagatgcagatacacaaagcaaggtgcaccagctatatgaaactatacagcgctggagccccattgcctccaccctccctgagctggtgcagagacttgtcaccatcaagcagctgcacgagcaagccatgcagtttggtcagctcctgacacacttggataccacccagcagatgattgctaattccttgaaggacaataccaccctcttgacccaggtgcagacaaccatgcgtgaaaacctggccacagttgaggggaactttgccagcattgatgaacggatgaagaagctgggaaagtgagcacatttgg

SEQ ID NO: 128353 - DNA, 567 bp, Homo sapiens
  Payload ID: 5129
  Gene Symbol: DCTN2
  Gene Name: dynactin 2 (p50)
  ENST ID: ENST00000550750
  CDS Start-End: 162-567
ttacccttctgctgtgctactgctgtcgcgagacttcctgctcatctgccgctccctttgccgccgccttagcccgggacccgaacccagcctctcccctacccgaacaccggccccggctccaccgaggcccgggtcccccagcccgtctcgccgccgccatggcggaccctaaatacgccgaccttcccggcattgaggagctgacaagcacaagtgtggaacacatcattgtcaatcctaatgctgcctatgacaagttcaaggacaagagagtggggacaaagggacttgatttctcagatcgtattggaaaaaccaagaggacaggatatgaatctggagaatatgagatgcttggagagggtctgggagtgaaggagacaccccagcaaaagtaccagcgcctactgcatgaggtccaagagctgacaactgaagttgaaaaaatcaagacgacagtgaaggagtcagccacagaggagaagctgacccctgtgttgctggctaaacagctggcagccctgaagcagcagctggttgcttcccacctggagaagctgctgg

SEQ ID NO: 128354 - DNA, 892 bp, Homo sapiens
  Payload ID: 5129
  Gene Symbol: DCTN2
  Gene Name: dynactin 2 (p50)
  ENST ID: ENST00000550954
  CDS Start-End: 59-892
cgaacaccggccccggctccaccgaggcccgggtcccccagcccgtctcgccgccgccatggcggaccctaaatacgccgaccttcccggcattgccaggaatgagccagatgtttatgaaactagcgacctacctgaggatgatcaagcggagttcgatgcggagctggtaagaagcctgacctttcatctgctttttaacggggaggagctgacaagcacaagtgtggaacacatcattgtcaatcctaatgctgcctatgacaagttcaaggacaagagagtggggacaaagggacttgatttctcagatcgtattggaaaaaccaagaggacaggatatgaatctggagaatatgagatgcttggagagggtctgggagtgaaggagacaccccagcaaaagtaccagcgcctactgcatgaggtccaagagctgacaactgaagttgaaaaaatcaagacgacagtgaaggagtcagccacagaggagaagctgacccctgtgttgctggctaaacagctggcagccctgaagcagcagctggttgcttcccacctggagaagctgctgggaccagatgctgcaatcaaccttaccgaccccgatggcgccctggctaagcgcctactactgcagctggaagcaacaaagaacagcaaagggggatcagggggaaaaaccactgggacccccccagatagcagccttgtcacttatgaactacattctcggcctgagcaggacaagttctctcaagctgccaaagtcgcagaacttgaaaagcgcctgacagagctggagacagctgtacgttgtgatcaggatgctcagaatcccctttctgcaggtctacagggagcctgtctcatggagactgtagagctgttg

SEQ ID NO: 128355 - DNA, 808 bp, Homo sapiens
  Payload ID: 5130
  Gene Symbol: DCTN3
  Gene Name: dynactin 3 (p22)
  Uniprot ID: O75935
  ENST ID: ENST00000259632
  CDS Start-End: 17-577
tgggtcggtagtagcgatggcgggtctgactgacttgcagcggctacaggcccgagtggaagagctggagcgctgggtgtacgggccgggcggggcgcgcggctcacggaaggtggctgacggcctggtcaaggtgcaggtggctttggggaacatttccagcaagagggagagggtgaagattctctacaaaaagattgaagatctgatcaagtacctggatcctgagtacatcgaccgcattgccatacctgatgcctctaagctgcaattcatcctagcagaggagcagtttatcctttcccaggttgcactcctggagcaggtgaatgccttggtgcccatgctggacagtgctcacatcaaagccgttcctgagcatgctgcccgcctgcagcgcttggcccagatccacattcagcagcaggaccagtgtgtggaaatcactgaggagtccaaggctctcctggaggaatacaacaagactacaatgcttctctccaagcaattcgtgcagtgggatgagctactttgccagctagaggccgccacgcaagtgaagccagcagaggagtgatagctgctccccatcccaaagtgggcctgggcagtcaggctccagggccctatgccaacctgcctttgttacaaggcagaggaagctttgtatttattggcttcaaggcccacctctctgtactctgggctctaaagttggaggtcaggttacctgaggtttgcaatttgcaacacccaccctccccccaatcagtgttcttatttcagtgacaataaaccatagagatga

SEQ ID NO: 128356 - DNA, 899 bp, Homo sapiens
  Payload ID: 5130
  Gene Symbol: DCTN3
  Gene Name: dynactin 3 (p22)
  Uniprot ID: O75935
  ENST ID: ENST00000341694
  CDS Start-End: 11-541
ggtagtagcgatggcgggtctgactgacttgcagcggctacaggcccgagtggaagagctggagcgctgggtgtacgggccgggcggggcgcgcggctcacggaaggtggctgacggcctggtcaaggtgcaggtggctttggggaacatttccagcaagagggagagggtgaagattctctacaaaaagattgaagatctgatcaagtacctggatcctgagtacatcgaccgcattgccatacctgatgcctctaagctgcaattcatcctagcagaggagcagtttatcctttcccaggttgcactcctggagcaggtgaatgccttggtgcccatgctggacagtgctcacatcaaagccgttcctgagcatgctgcccgcctgcagcgcttggcccagatccacattcagcagcaggctccatggggagtgggagtccgtgatgaggcaggaagtttagtggaagatgtgggctttgcccagttcctttctgtgctacactttggccctacaggaccagtgtgtggaaatcactgaggagtccaaggctctcctggaggaatacaacaagactacaatgcttctctccaagcaattcgtgcagtgggatgagctactttgccagctagaggccgccacgcaagtgaagccagcagaggagtgatagctgctccccatcccaaagtgggcctgggcagtcaggctccagggccctatgccaacctgcctttgttacaaggcagaggaagctttgtatttattggcttcaaggcccacctctctgtactctgggctctaaagttggaggtcaggttacctgaggtttgcaatttgcaacacccaccctccccccaatcagtgttcttatttcagtgacaataaaccatagagatga

SEQ ID NO: 128357 - DNA, 482 bp, Homo sapiens
  Payload ID: 5130
  Gene Symbol: DCTN3
  Gene Name: dynactin 3 (p22)
  ENST ID: ENST00000378911
  CDS Start-End: 1-482
atggcgggtctgactgacttgcagcggctacaggcccgagtggaagagctggagcgctgggtgtacgggccgggcggggcgcgcggctcacggaaggtggctgacggcctggtcaaggtgcaggtggctttggggaacatttccagcaagagggagagggtgaagattctctacaaaaagattgaagatctgatcaagtacctggatcctgagtacatcgaccgcattgccatacctgatgcctctaagctgcaattcatcctagcaggtaatgctggactacatgtgtacatgcatctgaggatgtgggtcgtcggggaggttaagcacagagatggcctctccatccagtcttctggtggatacaagccctggatgctgctctctggaattgtggcctggttctgggttgaggatcctatggatcctctagtagacattgagtacagtatacctctgcaccagctgcaggccatggtgcc

SEQ ID NO: 128358 - DNA, 951 bp, Homo sapiens
  Payload ID: 5130
  Gene Symbol: DCTN3
  Gene Name: dynactin 3 (p22)
  ENST ID: ENST00000378913
  CDS Start-End: 18-446
gtgggtcggtagtagcgatggcgggtctgactgacttgcagcggctacaggcccgagtggaagagctggagcgctgggtgtacgggccgggcggggcgcgcggctcacggaaggtggctgacggcctggtcaaggtgcaggtggctttggggaacatttccagcaagagggagagggtgaagattctctacaaaaagattgaagatctgatcaagtacctggatcctgagtacatcgaccgcattgccatacctgatgcctctaagctgcaattcatcctagcagaggagcagtttatcctttcccaggttgcactcctggagcaggtgaatgccttggtgcccatgctggacagtgctcacatcaaagccgttcctgagcatgctgcccgcctgcagcgcttggcccagatccacattcagcagcaggtatgggaggggagatgactagaagcgaagatggaggtggcgcagcacctcatcccaactcatgccacctggggaagcagcttcaggcctttctgttgtaacctcagcagaaactttggggtttatcctttatcttgcatatgccccagggaggtaaagggacttgcctaggttcatgtacaaactttctgcttccagagcaggactttattgggacaccataaggttgaggctgggaggtacccaagaattcctggggatggtatgtcattgactgtgggtagaggggctcttttttcactattcccaggccctagtgtaaagttcaaagagagttcagaaataaggacagaagaagagacatacactagggggaatgtttacttaatgtatggccactcccttttccatccgtctttggactgctgttagggcacccatcctggagcctgaaagtgctcccatagccatttgctcctttggctttggggttaagcgtcatcttttttaggctccatgggga

SEQ ID NO: 128359 - DNA, 773 bp, Homo sapiens
  Payload ID: 5130
  Gene Symbol: DCTN3
  Gene Name: dynactin 3 (p22)
  Uniprot ID: O75935
  ENST ID: ENST00000378916
  CDS Start-End: 60-536
atttggactgacgtcccgccctctggctgtttcctggccgaggtgggtcggtagtagcgatggcgggtctgactgacttgcagcggctacaggcccgagtggaagagctggagcgctgggtgtacgggccgggcggggcgcgcggctcacggaaggtggctgacggcctggtcaaggtgcaggtggctttggggaacatttccagcaagagggagagggtgaagattctctacaaaaagattgaagatctgatcaagtacctggatcctgagtacatcgaccgcattgccatacctgatgcctctaagctgcaattcatcctagcagccgttcctgagcatgctgcccgcctgcagcgcttggcccagatccacattcagcagcaggaccagtgtgtggaaatcactgaggagtccaaggctctcctggaggaatacaacaagactacaatgcttctctccaagcaattcgtgcagtgggatgagctactttgccagctagaggccgccacgcaagtgaagccagcagaggagtgatagctgctccccatcccaaagtgggcctgggcagtcaggctccagggccctatgccaacctgcctttgttacaaggcagaggaagctttgtatttattggcttcaaggcccacctctctgtactctgggctctaaagttggaggtcaggttacctgaggtttgcaatttgcaacacccaccctccccccaatcagtgttcttatttcagtgacaataaaccatagagatgactggag

SEQ ID NO: 128360 - DNA, 687 bp, Homo sapiens
  Payload ID: 5130
  Gene Symbol: DCTN3
  Gene Name: dynactin 3 (p22)
  ENST ID: ENST00000421919
  CDS Start-End: 1-456
cagcggctacaggcccgagtggaagagctggagcgctgggtgtacgggccgggcggggcgcgcggctcacggaaggtggctgacggcctggtcaaggtgcaggtggctttggggaacatttccagcaagagggagagggtgaagattctctacaaaaagattgaagatctgatcaagtacctggatcctgagtacatcgaccgcattgccatacctgatgcctctaagctgcaattcatcctagcagccgttcctgagcatgctgcccgcctgcagcgcttggcccagatccacattcagcagcaggaccagtgtgtggaaatcactgaggagtccaaggctctcctggaggaatacaacaagactacaatgcttctctccaagcaattcgtgcagtgggatgagctactttgccagctagaggccgccacgcaagtgaagccagcagaggagtgatagctgctccccatcccaaagtgggcctgggcagtcaggctccagggccctatgccaacctgcctttgttacaaggcagaggaagctttgtatttattggcttcaaggcccacctctctgtactctgggctctaaagttggaggtcaggttacctgaggtttgcaatttgcaacacccaccctccccccaatcagtgttcttatttcagtgacaataaaccatagagatga

SEQ ID NO: 128361 - DNA, 713 bp, Homo sapiens
  Payload ID: 5130
  Gene Symbol: DCTN3
  Gene Name: dynactin 3 (p22)
  ENST ID: ENST00000477738
  CDS Start-End: 5-535
agcgatggcgggtctgactgacttgcagcggctacaggcccgagtggaagagctggagcgctgggtgtacgggccgggcggggcgcgcggctcacggaaggtggctgacggcctggtcaaggtgcaggtggctttggggaacatttccagcaagagggagagggtgaagattctctacaaaaagattgaagatctgatcaagtacctggatcctgagtacatcgaccgcattgccatacctgatgcctctaagctgcaattcatcctagcagaggagcagtttatcctttcccaggttgcactcctggagcaggtgaatgccttggtgcccatgctggacagtgctcacatcaaagccgttcctgagcatgctgcccgcctgcagcgcttggcccagatccacattcagcagcagattcctattctcaccttgacctacaaccagacaatgcttctctccaagcaattcgtgcagtgggatgagctactttgccagctagaggccgccacgcaagtgaagccagcagaggagtgatagctgctccccatcccaaagtgggcctgggcagtcaggctccagggccctatgccaacctgcctttgttacaaggcagaggaagctttgtatttattggcttcaaggcccacctctctgtactctgggctctaaagttggaggtcaggttacctgaggtttgcaatttgcaacaccc

SEQ ID NO: 128362 - DNA, 4054 bp, Homo sapiens
  Payload ID: 5131
  Gene Symbol: DCTN4
  Gene Name: dynactin 4 (p62)
  Uniprot ID: Q9UJW0
  ENST ID: ENST00000424236
  CDS Start-End: 442-1653
actgcctttccaggatttattgcgaggatggagggaggcgcaggcgttctcattcatagttctcccatcctgaaagttctgttcctcttttgtccagaaactgggccctcgtcagactgccttgccctgttcctgactcaggccaaggcctgcagccgggaagaggttggggcggcgtgagttatgtgaaaagcgctcagaatacagtatgtcatgtaagaagctgaaagtgtatttatggagctagaggacaatgctgtccttccctggcacaagtgggcgtccgaagttggatttttcaaaaagaagaccccggccagtaaaaagtcaccaaataacaaaaccccaaaacttctgcagcgcttggcacatcttgtttattcagtaagctttagggattaaaaggtggactcccattattgtcccagttgtttagaaaatatgccatcggctgaagccaaactaaaaaagaatagatgtgccaattgttttgactgtcctggctgcatgcacaccctctctactcgggccacgagcatctccacacagcttccagatgacccagccaagaccaccatgaagaaagcctattacctggcatgtggattttgtcgctggacgtctagagatgtgggcatggcagacaaatctgtagctagtggcggttggcaggaacctgaaaatcctcacacacaacggatgaacaaattgattgaatattaccagcagcttgctcagaaagagaaggttgagcgagatcgcaagaaactggcacgacgtagaaactatatgcctctggctttttcggacaaatatggtcttggaaccaggcttcagcgaccacgagctggtgcatccatcagtacccttgccggactttcccttaaagaaggagaggatcagaaagagataaagattgagccagctcaggctgtggatgaagtggaacctctacctgaagactattatacaagaccagtaaatttaacagaggtaacaacccttcagcagcgtctgttacagcctgacttccagccagtctgtgcttcacagctctatcctcgccacaaacatcttctgatcaaacggtccctgcgctgccgtaaatgtgaacataatttgagcaagccagaatttaacccaacgtcaatcaaattcaaaatccagctggtcgctgtcaattatattccagaagtgagaatcatgtcaattcccaaccttcgctacatgaaggagagccaggtcctcctgactcttacaaatccagttgagaacctcacccatgtgactctcttcgagtgtgaggagggggaccctgatgatatcaacagcactgctaaggtggtggtgcctcccaaagagctcgttttagctggcaaggatgcagcagcagagtacgatgagttggcagaacctcaagactttcaggacgatcctgacattatagccttcagaaaggccaacaaagtgggtattttcatcaaagttacaccacagcgtgaggagggtgaagtgaccgtgtgcttcaagatgaagcatgattttaaaaacctggcagcccccattcgccccattgaagaaagtgaccagggaacagaagtcatctggctcacccagcatgtggaacttagcttgggcccacttcttccttaaaaggttccactggagggcagatcccaaaggacagtatcaccgtaaacctgcgttaaaatgtggaagctgctgcttcattaggccttgtttataacgatgtacccatgcactacggaattctattgctaagaaagtgggagcataggcaaggcattgggaacacagggtagctgctgttgctcttgctctcacccctgttgacaccagtaagtctgtgtctccctcactgaaccctgcacgttgagtaacagcagcataattccatcctaggaaaggggatgggtgttccttggaatggcattgtatttaccacctgagaaactctgtactgtctcttgatctgatctcactaaggatcacaatgtcacagatgaaacttaaatgataacccaaaggtagacctgctgttaatgatccagcattggtcacaatgtaccaactgctttctgcattccgttaaatatcatctaacagtctaaaacatatcccttcattgccataatggctgccattttgccatagatttccatataactgaaaaactgaattgtcactttatctttagtatcatgatgattggaaaaacctgtgaagttgttaaggcactctcatttgccctctttttctaagtgaatacaggacacgtattagttgttcttaatttttttcccagtaaaatatggatcttttaagaagaatttgagaagcaaacaattacatgtcatgtcaagggggtagcagattccattcgttttcaatattgccacaatacccagggattaatgctgccacaggggggcaatctttatttgtcttacttcctaccccttccctgttctgcctctttaactcagttaagttgttctgtttgggacctggaaaagaacccaaagaaaacctgagtggacaggttcatttctggaatgcagaaaacattttaaaggctagatttttagaatattctcaactagcattctttccattgatttgaaggggaaattaactattataatctcttgaatccaaaactggatattaagaactttcccccttactaagtttaagacttttgtcatgtggtgagtcaaataagaccattttgattgtaaaccataaaatagttcagcaagtagcccacagttctggcctaacagcagacttgctgttttcacttggtatcctggagttgggttgctaaccttaatttctatgatgttttctaaaatgaaacttgataaagtagaccaccagctgcaccgtgttttctgtaaaagtattgttagtaagtggccaagagacttgaggaaaatacagattttttgtttaccttggtcttgttttaagtcttaaaaaattaaagataacattataatgtagaatacagatgggacatagtccttgtaagcttcccttgaaaatgttttaaatatttaggaagcttttaaaagacactaaattgtactctaaaagacactaaattgtactaattgtacaaaggtcaagccaattttatgaaacagtcctacagagtaatatatgtgatgcagtgtaagaaggaaaatactcatctctaacattatggtaataacatttagcctcttaggagttggagcagggggatgggtaattacagatttgcagactatagaaagagtttcatttttttgtgaccccacagagtctcaaatttttatttcactacctgctagagcctactgtgaaatcactgctccatatttgccagtggaggaaatgggcatagagtagagaatagcttcatatgtttacacgtttgcatagactacacacatgtcatgcgtttatggcaggtagctggtatttattccccaaagtaataatgttgaagtatgggtctcatcattcccatacacagaaacacaaaacactttgatcataaacttttttcttcagaagccaaactaacttgcagaataatagagccactggtttaatgtttcctcaagataggttttagtgtaagctagtattctgtgtgttcgtagaaatgattcaatacctgcagctggtgaattaggaattgtatttgttgccttttttatattagatgaggtgcaaaaattttaatgctagtcagtatgcaccaccacaggaaagttagatcccattagcacttgaaactacagctttggaaacttaggctaagttaatttggatttgttacttgattcacctactgaccttttcttttgtttgaagtgcttatcagcataatgagctaagtgtcatgcatatttgtgaagaaacaccctttttggtcccttttgggacagagaggtactccttgatctttatgaatgacaggttactgttttgccttattgcttaacttaatgtagtgaaataaagcagacaaagcttg

SEQ ID NO: 128363 - DNA, 1737 bp, Homo sapiens
  Payload ID: 5131
  Gene Symbol: DCTN4
  Gene Name: dynactin 4 (p62)
  Uniprot ID: Q9UJW0
  ENST ID: ENST00000446090
  CDS Start-End: 43-1446
acgtgatgcgccgggagcgtcatcgcctcctccctccccaagatggcgtccttgctgcagtcggaccgggttctctatctagtccagggagaaaagaaggttcgggccccgctctcgcaactctacttctgccgctattgtagcgaactgcggtcgctggaatgtgtgtctcacgaggtggactcccattattgtcccagttgtttagaaaatatgccatcggctgaagccaaactaaaaaagaatagatgtgccaattgttttgactgtcctggctgcatgcacaccctctctactcgggccacgagcatctccacacagcttccagatgacccagccaagaccaccatgaagaaagcctattacctggcatgtggattttgtcgctggacgtctagagatgtgggcatggcagacaaatctgtagctagtggcggttggcaggaacctgaaaatcctcacacacaacggatgaacaaattgattgaatattaccagcagcttgctcagaaagagaaggttgagcgagatcgcaagaaactggcacgacgtagaaactatatgcctctggctttttcgcaacatactattcatgtagtggacaaatatggtcttggaaccaggcttcagcgaccacgagctggtgcatccatcagtacccttgccggactttcccttaaagaaggagaggatcagaaagagataaagattgagccagctcaggctgtggatgaagtggaacctctacctgaagactattatacaagaccagtaaatttaacagaggtaacaacccttcagcagcgtctgttacagcctgacttccagccagtctgtgcttcacagctctatcctcgccacaaacatcttctgatcaaacggtccctgcgctgccgtaaatgtgaacataatttgagcaagccagaatttaacccaacgtcaatcaaattcaaaatccagctggtcgctgtcaattatattccagaagtgagaatcatgtcaattcccaaccttcgctacatgaaggagagccaggtcctcctgactcttacaaatccagttgagaacctcacccatgtgactctcttcgagtgtgaggagggggaccctgatgatatcaacagcactgctaaggtggtggtgcctcccaaagagctcgttttagctggcaaggatgcagcagcagagtacgatgagttggcagaacctcaagactttcaggacgatcctgacattatagccttcagaaaggccaacaaagtgggtattttcatcaaagttacaccacagcgtgaggagggtgaagtgaccgtgtgcttcaagatgaagcatgattttaaaaacctggcagcccccattcgccccattgaagaaagtgaccagggaacagaagtcatctggctcacccagcatgtggaacttagcttgggcccacttcttccttaaaaggttccactggagggcagatcccaaaggacagtatcaccgtaaacctgcgttaaaatgtggaagctgctgcttcattaggccttgtttataacgatgtacccatgcactacggaattctattgctaagaaagtgggagcataggcaaggcattgggaacacagggtagctgctgttgctcttgctctcacccctgttgacaccagtaagtctgtgtctccctcactgaaccctgcacgttgagtaacagcagcataattccatcctaggaaaggggatgggtgttcctt

SEQ ID NO: 128364 - DNA, 4208 bp, Homo sapiens
  Payload ID: 5131
  Gene Symbol: DCTN4
  Gene Name: dynactin 4 (p62)
  Uniprot ID: Q9UJW0
  ENST ID: ENST00000447998
  CDS Start-End: 117-1499
gtgggaaacctaacgtcaaagtctacgtaggaagtcgtagggaaggcagcgaggaagacgctggctctcgggtcacgtgatgcgccgggagcgtcatcgcctcctccctccccaagatggcgtccttgctgcagtcggaccgggttctctatctagtccagggagaaaagaaggttcgggccccgctctcgcaactctacttctgccgctattgtagcgaactgcggtcgctggaatgtgtgtctcacgaggtggactcccattattgtcccagttgtttagaaaatatgccatcggctgaagccaaactaaaaaagaatagatgtgccaattgttttgactgtcctggctgcatgcacaccctctctactcgggccacgagcatctccacacagcttccagatgacccagccaagaccaccatgaagaaagcctattacctggcatgtggattttgtcgctggacgtctagagatgtgggcatggcagacaaatctgtagctagtggcggttggcaggaacctgaaaatcctcacacacaacggatgaacaaattgattgaatattaccagcagcttgctcagaaagagaaggttgagcgagatcgcaagaaactggcacgacgtagaaactatatgcctctggctttttcggacaaatatggtcttggaaccaggcttcagcgaccacgagctggtgcatccatcagtacccttgccggactttcccttaaagaaggagaggatcagaaagagataaagattgagccagctcaggctgtggatgaagtggaacctctacctgaagactattatacaagaccagtaaatttaacagaggtaacaacccttcagcagcgtctgttacagcctgacttccagccagtctgtgcttcacagctctatcctcgccacaaacatcttctgatcaaacggtccctgcgctgccgtaaatgtgaacataatttgagcaagccagaatttaacccaacgtcaatcaaattcaaaatccagctggtcgctgtcaattatattccagaagtgagaatcatgtcaattcccaaccttcgctacatgaaggagagccaggtcctcctgactcttacaaatccagttgagaacctcacccatgtgactctcttcgagtgtgaggagggggaccctgatgatatcaacagcactgctaaggtggtggtgcctcccaaagagctcgttttagctggcaaggatgcagcagcagagtacgatgagttggcagaacctcaagactttcaggacgatcctgacattatagccttcagaaaggccaacaaagtgggtattttcatcaaagttacaccacagcgtgaggagggtgaagtgaccgtgtgcttcaagatgaagcatgattttaaaaacctggcagcccccattcgccccattgaagaaagtgaccagggaacagaagtcatctggctcacccagcatgtggaacttagcttgggcccacttcttccttaaaaggttccactggagggcagatcccaaaggacagtatcaccgtaaacctgcgttaaaatgtggaagctgctgcttcattaggccttgtttataacgatgtacccatgcactacggaattctattgctaagaaagtgggagcataggcaaggcattgggaacacagggtagctgctgttgctcttgctctcacccctgttgacaccagtaagtctgtgtctccctcactgaaccctgcacgttgagtaacagcagcataattccatcctaggaaaggggatgggtgttccttggaatggcattgtatttaccacctgagaaactctgtactgtctcttgatctgatctcactaaggatcacaatgtcacagatgaaacttaaatgataacccaaaggtagacctgctgttaatgatccagcattggtcacaatgtaccaactgctttctgcattccgttaaatatcatctaacagtctaaaacatatcccttcattgccataatggctgccattttgccatagatttccatataactgaaaaactgaattgtcactttatctttagtatcatgatgattggaaaaacctgtgaagttgttaaggcactctcatttgccctctttttctaagtgaatacaggacacgtattagttgttcttaatttttttcccagtaaaatatggatcttttaagaagaatttgagaagcaaacaattacatgtcatgtcaagggggtagcagattccattcgttttcaatattgccacaatacccagggattaatgctgccacaggggggcaatctttatttgtcttacttcctaccccttccctgttctgcctctttaactcagttaagttgttctgtttgggacctggaaaagaacccaaagaaaacctgagtggacaggttcatttctggaatgcagaaaacattttaaaggctagatttttagaatattctcaactagcattctttccattgatttgaaggggaaattaactattataatctcttgaatccaaaactggatattaagaactttcccccttactaagtttaagacttttgtcatgtggtgagtcaaataagaccattttgattgtaaaccataaaatagttcagcaagtagcccacagttctggcctaacagcagacttgctgttttcacttggtatcctggagttgggttgctaaccttaatttctatgatgttttctaaaatgaaacttgataaagtagaccaccagctgcaccgtgttttctgtaaaagtattgttagtaagtggccaagagacttgaggaaaatacagattttttgtttaccttggtcttgttttaagtcttaaaaaattaaagataacattataatgtagaatacagatgggacatagtccttgtaagcttcccttgaaaatgttttaaatatttaggaagcttttaaaagacactaaattgtactctaaaagacactaaattgtactaattgtacaaaggtcaagccaattttatgaaacagtcctacagagtaatatatgtgatgcagtgtaagaaggaaaatactcatctctaacattatggtaataacatttagcctcttaggagttggagcagggggatgggtaattacagatttgcagactatagaaagagtttcatttttttgtgaccccacagagtctcaaatttttatttcactacctgctagagcctactgtgaaatcactgctccatatttgccagtggaggaaatgggcatagagtagagaatagcttcatatgtttacacgtttgcatagactacacacatgtcatgcgtttatggcaggtagctggtatttattccccaaagtaataatgttgaagtatgggtctcatcattcccatacacagaaacacaaaacactttgatcataaacttttttcttcagaagccaaactaacttgcagaataatagagccactggtttaatgtttcctcaagataggttttagtgtaagctagtattctgtgtgttcgtagaaatgattcaatacctgcagctggtgaattaggaattgtatttgttgccttttttatattagatgaggtgcaaaaattttaatgctagtcagtatgcaccaccacaggaaagttagatcccattagcacttgaaactacagctttggaaacttaggctaagttaatttggatttgttacttgattcacctactgaccttttcttttgtttgaagtgcttatcagcataatgagctaagtgtcatgcatatttgtgaagaaacaccctttttggtcccttttgggacagagaggtactccttgatctttatgaatgacaggttactgttttgccttattgcttaacttaatgtagtgaaataaagcagacaaagcttgagcgtgtcttttgtttgctctcatgtagatactaagtagcatggctcagagccaaaagacaagcgtgaagttaagagagttggctaagagagttggtggggcatgctcccttccattccttaaatgaagtaatctaaaatctcttagcaggttagttcaccataatatataagtagatgttgctttgagcttcttatatacatattcacagaaccattatataaatgttgttagacctctaccagtttttatcctgggtcattgcttctaaagatatcctttacaatatacacagtggtctgactcca

SEQ ID NO: 128365 - DNA, 661 bp, Homo sapiens
  Payload ID: 5131
  Gene Symbol: DCTN4
  Gene Name: dynactin 4 (p62)
  ENST ID: ENST00000521728
  CDS Start-End: 387-661
gcgccgtttcctaagcctgttggaaaagcgcagtattcgggtgggagtggcccgattttccaggtgccgtctgtcacccctttccttgaccaggaaagggaactccctgatcccttgcgcttcccaagtgaggcaatgccttgccctgcttcggctggcgcacggtgcgctgcacccactgtcctgcacccactgtctggcactccctagtgagatgaacccagtacctcagatggaaatgcagaaatcacccgtcttctgcgtcggtcacgctgggagctgtagaccggagctgttcctattcggccatcttggctcctcctaagtcttgctcttttcaagctagtggcggttggcaggaacctgaaaatcctcacacacaacggatgaacaaattgattgaatattaccagcagcttgctcagaaagagaaggttgagcgagatcgcaagaaactggcacgacgtagaaactatatgcctctggctttttcggacaaatatggtcttggaaccaggcttcagcgaccacgagctggtgcatccatcagtacccttgccggactttcccttaaagaaggagaggatcagaaagagataaagattgagccagctcaggctgtggatgaagtggaacctctacctgaagactattatacaag

SEQ ID NO: 128366 - DNA, 585 bp, Homo sapiens
  Payload ID: 5131
  Gene Symbol: DCTN4
  Gene Name: dynactin 4 (p62)
  ENST ID: ENST00000521448
  CDS Start-End: 28-288
agcgtcatcgcctcctccctccccaagatggcgtccttgctgcagtcggaccgggttctctatctagtccagggagaaaagaaggttcgggccccgctctcgcaactctacttctgccgctattgtagcgaactgcggtcgctggaatgtgtgtctcacgaggtggactcccattattgtcccagttgtttagaaaatatgccatcggctgaagccaaactaaaaaagaatagactaggggaatgtattttgcggaggagaaccacagagatgtgccaattgttttgactgtcctggctgcatgcacaccctctctactcgggccacgagcatctccacacagcttccagatgacccagccaagaccaccatgaagaaagcctattacctggcatgtggattttgtcgctggacgtctagagatgtgggcatggcagacaaatctgtagctagtggcggttggcaggaacctgaaaatcctcacacacaacggatgaacaaattgattgaatattaccagcagcttgctcagaaagagaaggttgagcgagatcgcaagaaactggcacgacgtagaaactatat

SEQ ID NO: 128367 - DNA, 578 bp, Homo sapiens
  Payload ID: 5131
  Gene Symbol: DCTN4
  Gene Name: dynactin 4 (p62)
  ENST ID: ENST00000521533
  CDS Start-End: 236-578
ttattgcgaggatggagggaggcgcaggcgttctcattcatagttctcccatcctgaaagttctgttcctcttttgtccagaaactgggccctcgtcagactgccttgccctgttcctgactcaggccaaggcctgcagccgggaagaggttggggcggcgtgagttatgtgaaaagcgctcagaatacagtatgtcatgtggactcccattattgtcccagttgtttagaaaatatgccatcggctgaagccaaactaaaaaagaatagatgtgccaattgttttgactgtcctggctgcatgcacaccctctctactcgggccacgagcatctccacacagcttccagatgacccagccaagaccaccatgaagaaagcctattacctggcatgtggattttgtcgctggacgtctagagatgtgggcatggcagacaaatctgtagctagtggcggttggcaggaacctgaaaatcctcacacacaacggatgaacaaattgattgaatattaccagcagcttgctcagaaagagaaggttgagcgagatcgcaagaaactggcacgacgtagaa

SEQ ID NO: 128368 - DNA, 579 bp, Homo sapiens
  Payload ID: 5131
  Gene Symbol: DCTN4
  Gene Name: dynactin 4 (p62)
  ENST ID: ENST00000518015
  CDS Start-End: 178-579
acttggaaaggaggagcagcctcgggtgggactgagcggatcttctggttctagagcggcctctgattggacaaacttgacttagggaccgtgtctgtctgcgatggggcttggtaaagaaacagatacagagtgttcgctgtggactcccattattgtcccagttgtttagaaaatatgccatcggctgaagccaaactaaaaaagaatagatgtgccaattgttttgactgtcctggctgcatgcacaccctctctactcgggccacgagcatctccacacagcttccagatgacccagccaagaccaccatgaagaaagcctattacctggcatgtggattttgtcgctggacgtctagagatgtgggcatggcagacaaatctgtagctagtggcggttggcaggaacctgaaaatcctcacacacaacggatgaacaaattgattgaatattaccagcagcttgctcagaaagagaaggttgagcgagatcgcaagaaactggcacgacgtagaaactatatgcctctggctttttcggacaaatatggtcttggaaccaggcttcagcgacca

SEQ ID NO: 128369 - DNA, 576 bp, Homo sapiens
  Payload ID: 5131
  Gene Symbol: DCTN4
  Gene Name: dynactin 4 (p62)
  ENST ID: ENST00000517421
  CDS Start-End: 103-363
gtcaaagtctacgtaggaagtcgtagggaaggcagcgaggaagacgctggctctcgggtcacgtgatgcgccgggagcgtcatcgcctcctccctccccaagatggcgtccttgctgcagtcggaccgggttctctatctagtccagggagaaaagaaggttcgggccccgctctcgcaactctacttctgccgctattgtagcgaactgcggtcgctggaatgtgtgtctcacgaggtggactcccattattgtcccagttgtttagaaaatatgccatcggctgaagccaaactaaaaaagaatagactaggggaatgtattttgcggaggagaaccacagagatgtgccaattgttttgactgtcctggctgcatgcacaccctctctactcgggccacgagcatctccacacagcttccagatgacccagccaagaccaccatgaagaaagcctattacctggcatgtggattttgtcgctggacgtctagagatgtgggcatggcagacaaatctgtagctagtggcggttggcaggaacctgaaaatcctcacacacaacggataacctg

SEQ ID NO: 128370 - DNA, 1774 bp, Homo sapiens
  Payload ID: 5131
  Gene Symbol: DCTN4
  Gene Name: dynactin 4 (p62)
  ENST ID: ENST00000627368
  CDS Start-End: 43-303
acgtgatgcgccgggagcgtcatcgcctcctccctccccaagatggcgtccttgctgcagtcggaccgggttctctatctagtccagggagaaaagaaggttcgggccccgctctcgcaactctacttctgccgctattgtagcgaactgcggtcgctggaatgtgtgtctcacgaggtggactcccattattgtcccagttgtttagaaaatatgccatcggctgaagccaaactaaaaaagaatagactaggggaatgtattttgcggaggagaaccacagagatgtgccaattgttttgactgtcctggctgcatgcacaccctctctactcgggccacgagcatctccacacagcttccagatgacccagccaagaccaccatgaagaaagcctattacctggcatgtggattttgtcgctggacgtctagagatgtgggcatggcagacaaatctgtagctagtggcggttggcaggaacctgaaaatcctcacacacaacggatgaacaaattgattgaatattaccagcagcttgctcagaaagagaaggttgagcgagatcgcaagaaactggcacgacgtagaaactatatgcctctggctttttcgcaacatactattcatgtagtggacaaatatggtcttggaaccaggcttcagcgaccacgagctggtgcatccatcagtacccttgccggactttcccttaaagaaggagaggatcagaaagagataaagattgagccagctcaggctgtggatgaagtggaacctctacctgaagactattatacaagaccagtaaatttaacagaggtaacaacccttcagcagcgtctgttacagcctgacttccagccagtctgtgcttcacagctctatcctcgccacaaacatcttctgatcaaacggtccctgcgctgccgtaaatgtgaacataatttgagcaagccagaatttaacccaacgtcaatcaaattcaaaatccagctggtcgctgtcaattatattccagaagtgagaatcatgtcaattcccaaccttcgctacatgaaggagagccaggtcctcctgactcttacaaatccagttgagaacctcacccatgtgactctcttcgagtgtgaggagggggaccctgatgatatcaacagcactgctaaggtggtggtgcctcccaaagagctcgttttagctggcaaggatgcagcagcagagtacgatgagttggcagaacctcaagactttcaggacgatcctgacattatagccttcagaaaggccaacaaagtgggtattttcatcaaagttacaccacagcgtgaggagggtgaagtgaccgtgtgcttcaagatgaagcatgattttaaaaacctggcagcccccattcgccccattgaagaaagtgaccagggaacagaagtcatctggctcacccagcatgtggaacttagcttgggcccacttcttccttaaaaggttccactggagggcagatcccaaaggacagtatcaccgtaaacctgcgttaaaatgtggaagctgctgcttcattaggccttgtttataacgatgtacccatgcactacggaattctattgctaagaaagtgggagcataggcaaggcattgggaacacagggtagctgctgttgctcttgctctcacccctgttgacaccagtaagtctgtgtctccctcactgaaccctgcacgttgagtaacagcagcataattccatcctaggaaaggggatgggtgttcctt

SEQ ID NO: 128371 - DNA, 11011 bp, Homo sapiens
  Payload ID: 5132
  Gene Symbol: DCTN5
  Gene Name: dynactin 5 (p25)
  Uniprot ID: Q9BTE1
  ENST ID: ENST00000300087
  CDS Start-End: 152-700
gaggccgcctaaaggagagccgcgctgtcgatgagtcccagtgggccacctggagcggaagtggaggagcggccggaagtagccggaatctctgaaagactgaccgactgactctgacaggatccggggctgagggaaggaggcggcggccatggagttgggcgagctgctctacaacaagtctgagtacatcgagacggcatctgggaacaaagtcagtcgccagtcagtgttgtgtggaagccagaacatcgttctcaatggcaagaccattgtgatgaatgactgtattatccgaggggatctggcaaatgtaagagttggacgtcattgtgttgtgaaaagtcgtagtgtcataaggccaccattcaagaagttcagcaaaggtgttgcattctttcctttacatattggagaccatgtctttattgaggaagattgtgtggtcaacgcagcacagattggttcctatgttcatgttgggaagaactgtgtgattgggcgccgatgtgtgttgaaagactgctgcaaaattcttgacaacacagtattacctccagaaactgtggttccaccattcactgtcttctcaggctgcccaggactcttctcaggggagctcccggagtgcactcaggagctgatgattgacgtcaccaagagctactaccagaagtttttgcccctgacgcaagtctagcatctctgcctcatgtcttgaatctgcttgagctctaagatgaacctggggacaaagtgagccagtcagcacctacaaagagcttttgtgtctttgacatctaccaccctcctccttttaaaaaatttctttagaatttctcaatcttcaaggctctaagtgcttaagaattcactaacagacagaccatctggaggagctgtcttcaaatgctgtgcttacaccttatctatgaacagtcactttgtaccattatctgtggaacacagaatcatctgttcccaacactccagccccttggtcctgtggatggctggatcccgcctgaaacggacctgcagagcagcagcacccttccggtgtggaggctatgtagctggtgcgctgctcacggccattcactgcccatgctgagcgcctctcacacaggtaatgcccagcttttctgctgctaacacatttggccagttgttgcagttgctcatcatcttgggaaaggtgtttgtgacttttcagagcccagattcctgttgtctattaaaacttgaagggaggggtgaatagtgtttctctcttcttcccaaaatgaccttagctgtcctaggatagttagtaaaagactttttagcattttgacctagggcctttggctttcactaaaagtggggacctcagtatcccagattgtaattttgccaagtgttagatttgagtctctcatgtggatgcattagtcaggtggttactccttgcttcaaggtacttaccttatttcattgaagacaccgcatttgtgaactcttgcttcctggcctagaaccattcagcctaccctgtatttgccataaactccacaattcacaccaaaatgtctgtacttagagctaattcgcatatatacaggaagggctcttagaatcagtttgtgggcacagagcctcaggagtaaatgaagttactagggctgttcttaccatctccttctggccaaatagcacaacatttcctcgttctgctctgacctcttagcttagaaggaagattcagaagtgaggggctaagaaggttgtccttgcctaatgctctgatctgtaagtgaatagggcagaacagttcagccttgaggttagaatttagcaggagctatcctgacttaatatccagttgtggggtttgcaaaacaaaacagctgtatgtaatcattgccactagttccatctagaactcctttctagtttgttatttttaaaatgtttatacataaaaccaccaaaatacatagcttcgacaagatggaagtttatttctctctcccataacagtgcagtgatagtcagctggtccaggccaggcaaggggctggtccatgatgtcatcaggcacccaggttcctactgtcttgccatgtggccacagttagcaacaaaggaggctgtaaatttagtttctacttgggcagccaaaactctgaggaaggagattctgctagtaaaaaggagtgggggaagaatggccattgggagacaacaagcagactcaaccaggcctctttgttggcttcctttcctcctgctgcacatgagccttcgccgtgcatttggagccatgacagctgatagctccagacctgcatcctcctagcttgggggctctgaatgaaaggtttcttcccttccagttcgaatttggaaactcccaaagttctcaatggtttgttgtgagttccatgtcctcttggatcagtcactgtggccatgcatgtttggccacatgattaatccagtctgggtcatgaccttttcttcatccaaaacaaggtgatgggaagacaaaaacaatagctactacaaacaataggagtttataattatgtgctgatgtattcgaagatgtgttgacagtcgtgagtgtgtatcctaggaaaggcgagctggactctgtctccatggtggctctcaccccagggacctaggaacagcctgtcaccacacaattacttttataaccctggagatgaaaatctccttgtcctcaaaatacttccagaagaacaaccagatgggaaggaccttggttgggactctttccagttcacttggggcagagggaatttaatggctcacgtagctgaaaaggatgggctagattgggcttcaggctgcatcccaggactccaaacagggatctgtctctttggctctcagctctgctttcatttgagttggctttattcttgggcttcacagtgtggccccacagcaccagttattgataaaaagagctcccctttgctgacagaactgctggatttggttctcattggtccagacgaggaaggtatccagcctcaagtcatcattgtggccaggaagatggaatacaccaaatggacaggcctggcatgtacccacagagactgagagttggtgctggtggttgtggtggcagatgatattacctgaagaagggacgaatgggtgctgggcaggacaaagcatcagctgtccagttcaggcctctcctctttccctggtgtcttcattttcctccgtctccctgctgtcccttaccctctgcccaatctctcattactcctggtcttgggagttgccttctgaggatactccactgggggtacctgagcctggattagagggcagggggaggatattgcctagccaaagtgggtgttcaataaagaaccatttggagatggtcttctgtctggaactgcttcctttttgttttattatttttccccagatgagctgactgggccatggaactgcatccttatggttcccatagcaccttaccgaggcgcccttatcaatagagttttagttatgtacctgtgttcttgtctgaacccctactaactgtgagctcctgaggagtcaggcctgagtctgtgggtcatctagcacatccttaatagaatgattgcctggatgtgaccaccctcacccccaaccctcacacaccctgccagcatgcctcagaccttaccccagctcaagataagtctcagattgcaggatacctgctgcagggaacaaaggtgaatgattgtcttgtgagcctcctgttgactgattctgttttacatggctgcacagagcccttgtggttatttggggttggggtggtggcttctgtattagtcacttctgcatgaaccatttcactcaggatctgaggccacagttcctttcttagtcactgatacatctggcagacttgaaattaatcagacaaacattgttcatagttaacatatccttggaagtttctcagctataaggaagaggtcttggtggctagggaggcctttctctgtatcctgttctatccagtgagagcctagagggtgctgcccagccatattctggctagcctcagcggttctcctgaaaaaaaattggcatctgacaacctggatggtgactataggtagtcaaatccagctggctggtctcctgggggttagcttccatggagctgcaagtcccctgaaatgatactggcagtgttgggacagcgtgtccgaaggcctggttttttcagaactggtctcagcaaaatgtctcgccaacttctacagttcccataagtacatgataactgaaacacttctagagccccccagcaatgggcttgtgcttttagtagaatatgtgcttgcttccatttaggggtaagaaggtgggcccctcaccatatgctgcacagagaagagagacaccatcactcatttattcatttaacaagtgctttccaagccactactaggtgccaagcacttcctaggtcctggggatacagtggagactaagatggagccagttctttctcatagggatctcacagcttagtgagtgagaaagccaaagagtcaaaatacagagagggtctgaggggcccattttgagagccatcatagtggtgaggagtgtgagtgctagagtcaggctgatcaaatcccagcctgccattggctagccttgtgactttgagcaagttatcttacttcgtggaacctcaggtttctcatccataaaatggggaagttggatagggtattatgatgattgaaatgcatttatacatgtaaagcataagtactggctcagggtgagcactcaataaacggcagtttattaggcacttttattaggaagtgatacaccttgagcaaaaccccttagagtataaggcatagcattcttacatatttttaaaatttaaaataaaatttaaaacatcttgccctttataatcagtccgccacaaacaagagatggagaaatcacccttccttgttttgtatctatggggtgcaaacatttaatcctcccaactgtcaaaaaagtgagagtttcacagcctgttttacagcagaggaaactgatattcagagaggttaagtaaatttgcccaatgccacacatctaataaatggctgagctggaatcaaggccagctcttacttggctgcaaaatccatgttttatgcagctcctccactatcttggcctccaaggcagctggctttgaacactacccttgcagcccagtcagccaatcccttgctctcctgaagcttttgctggtgggccagccccacctgctttccttgtgcactctgacttggaccctgaagtgagaagagttggcacaggacatcttacttccctgaaaacagtacctggacttttctgtatcttcacatccattgggcattgggcaaatgggtcatgcagatgaaaaccatccaagataagagacatgggagtgaaattcacacccactctggctttcataccatgggtctgaacattagcccatggtgtttcttggccatactgacctgtgccatttcagctgcattcatctcagttggtgttgtctgctggctgctctttctgatttcccacaggagcagtaagaacctgaggaagagtagggtcagaggagtctgggagaatgaggaaatatgagagccccaggaactgaaaaggcctgtgagagactctgagcttcctgggaacaggtataggttctttttatttcaataataacagaaacaactgtcaaaaccatgtgcctgtactatttggagtgctgtccttgcagaatctcattataagaaccttaggaaataggcacatcatctcctggatagaatcctaggaaatgggcactataatgggcactttatcccattttataaacatggaaattgaggcacagagagattaagtactttcccaaggtcatacagctagtgatggaggagctagcatttgaacccggagtttttagtctattgagtttaaccgacagatcatactgtgttttggtagggagggagggaggaagcaagcaagtgaacaaatgagtctgggatttaggacttgccagacaaacaaggcccaagaggcaagtgtgcaggtgggtgtagttgggagtcagcagagttgggttggaattcaagctttgccacctgctggctataaaccttggttgggtaagtaacccaaggtaaatgagatcatctctgtaaaactcttagccttgtgcctggcacatagtaaatgcttaataagggttcactgttagtattactgttactgataacatacaaatagattgtattaatggaccataattgcaactgtataaaacaaattccatgtttggccaggcgcagtggctcaagcctgtaatcccatcacttcgggaggccgaggtgggcagatcacgaggtcaggagatcaagaccatcctggctaacacagtgaaaccccatctctactaaaaatacaaaaaaattagccaggcatggtggcgggtgcctgtattcccagctacttgggaggctgaggcaggagaatggcgcgaacccagggggcggagcttgcagtgagctgtaattgtgccactgcactccagcctgggcgacagagcgagactccgtctcaaaaaaaaaaaaaaaaaccacaacaacaacaacaaaaattccatgttgacaaggatgggaatatgagaacatggaaacagctatgaaaagacataagagaattaggaggattttctttaatatatcattttttaaaaaaaaacttgcttgtatttgtttattttttaaatagagacagggttttaccatgttgcccagactagtcttgaactcctgggctcaagcgatcttggcctccctaagtgctgggattacagtcatgagccactgtgccccgccattttttaataaacctttctaatggaacaagtaaaacacatgcagtggatgctcagcaggccttgagtgtgtgaatgaaaaatatttgaacttgtttttactggttgatttcattgcttaaaaaacataccttagctggacgcagtggcgtgcgcctgtagtcccagctactcatctcttaaaaaaaaagttttatgcttgttaatttcataaatgctagagggatcaccctaatcaaataaagctactcaaaaataaaatatgaaaggtgttagtgggatacagctttctagttttttgccactagtggataggttggaatttaaattcttcggatattggaaccagaacaggctgtaactgattatttttgctgtgattcgtgcttactggagcctcgggaaagagggagacaacatgtaaagagaagcaatctgtttggaaaatgaaaatacagttaaattgctaatgaacccttgtcaaaatcaaatgtctccccttagaggctgatgattgtctagtctaatatgcattttttttgagtgggtcaattggactctaagaccaacaagataaaaaggcagccttgcatgtcacttggaccacagctgtctggccatgcagcatgccttcactgctgctgaagaaaagcagctgcttgttgagaatctcaaattctcagatcctaattgcctggccctgactctaagctgaaacctgctactgtctgccttgagctgttttagcctcaacacgagctatgctgaactgaaagcaggcacaggctcaatgaccaggactcagacgttggggccgttggagattaaggaccccctccgtggagcgctaaactatgaaaacgtcctggaacctggctgaaaagggcttattctctaatgggaccatctaagatcaagctgctgataggctctttgtctctaatacagaggctaattgcattcctaacttctaatatttgccaaacgctccaagctggggaagggcacatcgcaaggactatgacctctcctcctgcttttgacagaccagactcaaaccttctctggggcttctctcactgctgttgacttgttgcattcagcttttgggattagttgcagcttgcaacagtggactgacagcctgactctacttccctcacttttctcccagcacacacagcttagtaaggtaggtggattattaaaacgtagctgtccccagaaaggtattaggcttttctagtctgctcattgaataatcaggacaaaaggggtagaagattatgtaaacacattttgaaatttttaaaaattcagggtttcatcctttattagtttgctaaggataccataacaaagtaccacaaactgagtgacttacacaatagaaacttattttcctgcagttctggaggctgaaagtccaggacaaggtgtcgacagctttagattcttctgaggcctctctgcttggcttgcagatggctgccttcttactgtgtccttgtatggtccctctgtctgggtgtctgtgtcctaatcttctcttttaataaggataccactcaggttggattagggcccatcctaacaatcccattttaacttagttacctcttcagggcctatcttcaaatatactcacattttgaggtacaggtagatggttagggcttcagcatgaatttttgtggggacataattcaaccctccacacataattaccaatttctgaatgtctttctggttaagttgcataaaaacgtttatctacttgaactctaggatgatagttaaaaaaaaaaatgttggccaggcgcagtgatggatgcatatgatcccagcactttgggaggccgaggtgggcagattgcttgagttcaggagttcaagaccagcctggcaacatggtgaaatcctgtgtctacaaaaaatgcaaaaattagctggacatgatggcatgtgcctttggttccagctacttaggaggctgaggtaggaggatggcttgagcccaggaggcggaggttgcagtgagccaaaatcgtgccaccgcactctagcctgggcaacagagccagaccatatctcaaaaaaaaaaaaaaaaaagtttatctacaaaaatgcttttgtgcctcttacatacaacccttccagaggaaaggcctagctgagagtaagagatggttgaaaaaatgcaatgttatgattgctgaacagggcacgactgtttttgtaatattggagaaaataattaaagcctggcacctggggaggcttgatccctggaagcctcctcttgctgaaggaaaattcccagtgctgcctttccatgtgctgtgagtgctttgagttcagactgacaacagagtgggtctagcttctatgctttccatgaagatctcccacaaatgtcatccatgctcatgagatggatcaacttgtatcctgaacaagcaaaactgtttgggactcactgccttcaggcagtcccttggaagccaaggactctgggaacttttcagatgggactggaaacacttgggcaggagttcccctggtaggaggtctgttcacctgtacagcctaatggatgtcctgcttgaggtgccctaatattgcaaattctttgtttacaggggtaccacctgtgcccctgggactgtgcttctgtacatgaccacaactctcatgatgtcccctcagccctggaaagcatttgggttagcttccgcttactggtcagagttatactgtgcctgaattgatgcctcaggtcaggttgaaaaaaaaaaaaaaggttcagacagcaattaagggctgggcacggtggctcatgcctgtaatcccggcactttgggaggctgaggtgggcagatcacctgaggtcaggagtttgagaccagcctgaccgacatggtgaaaagtaaaaatacaaaaataaaaaaattagctgggtgtggtggtgtgcacctgtagtccctacaaaaataaaaaaattagctgggtgtggtggtgtgcacctgtagtcccagctactcgggaggctgaggcaggagaatcgcttgaacccaggaggtggaggctgcagtgagccaagatcacgccactgcactccagcctgggtgacagagcaagactccatctcaacaacaacaacaaaaaggaattaaggaggaagccacctggcttcctaagatagactttatggttaatgggatttattttagctggttaagtccaggacccctaccaggaagaactgaggtccatatttgaggttggtctcacccttttgcatgtggtcctactaataataattttgctgtaaagaagcctcaataaggagatggactgtgtgaaaagagatgagaaagcaggcctgtttgcaaggctggcccttggctggcatctgaaagcttggatttcaggagggttctcattactccctaaatgataagagtggctcactgtgcctaaactgttcgtacaaacaatgtgggttatgcccaacatctgctttccttctgggagtcagattttcatatgtgttaggcagaggatgaggtgagcagctcccaatgagaaccctgaacactgagtctgtaatgagcttcccttgtatacaacattgcacatgggttgtcacaactgattgctggaggaattgtgtcctatgtgactctgctgggagaggactgtgggaggcttacacctggtttccctggactttgtccatgcgcttttttcctttgctgattttgcttcctagcctttcgctgtagtaaaacatagccatgagtatgactacaggctgagtctgtgaatctcctagtacatcatcagactaggaggtggtggtgttggcaccccccagcacagggcacaagggagacttgcagggtgtttgtcatgttccctttctcaatctgggtgtggtttacagatttgttcagtttgtgaaaattcactgagctctatgaacaattataatatgtacatttttttctgtaagtgtattaaatttcaataaaaagaattcacact

SEQ ID NO: 128372 - DNA, 878 bp, Homo sapiens
  Payload ID: 5132
  Gene Symbol: DCTN5
  Gene Name: dynactin 5 (p25)
  Uniprot ID: Q9BTE1
  ENST ID: ENST00000563998
  CDS Start-End: 73-531
tagccggaatctctgaaagactgaccgactgactctgacaggatccggggctgagggaaggaggcggcggccatggagttgggcgagctgctctacaacaagtctgagtacatcgagacggcatctgggaacaaagtcagtcgccagtcagtgttgtgtggaagccagaacatcgttctcaatggcaagaccattgtgatgaatgactgtattatccgaggggatctggcaaatgtaagagttggacgtcattgtgttgtgaaaagtcgtagtgtcataaggccaccattcaagaagttcagcaaaggtgttgcattctttcctttacatattggagaccatgtctttattgaggaagattgtgtggtcaacgcagcacagattggttcctatgttcatgttgggaagaactgtgtgattgggcgccgatgtgtgttgaaagactgctgcaaaattcttgacaacacagtattacctccagaaactgtggttccaccattcactgtcttctcaggctgcccagctccttagagctgggtctttctttccccaggactcttctcaggggagctcccggagtgcactcaggagctgatgattgacgtcaccaagagctactaccagaagtttttgcccctgacgcaagtctagcatctctgcctcatgtcttgaatctgcttgagctctaagatgaacctggggacaaagtgagccagtcagcacctacaaagagcttttgtgtctttgacatctaccaccctcctccttttaaaaaatttctttagaatttctcaatcttcaaggctctaagtgcttaagaattcactaacagacagaccatctggaggagctgtcttcaaatgctgtgcttacacctt

SEQ ID NO: 128373 - DNA, 523 bp, Homo sapiens
  Payload ID: 5132
  Gene Symbol: DCTN5
  Gene Name: dynactin 5 (p25)
  Uniprot ID: Q9BTE1
  ENST ID: ENST00000568272
  CDS Start-End: 15-269
aggaggcggcggccatggagttgggcgagctgctctacaacaagtctgagtacatcgagacggcatctgggaacaaagtcagtcgccagtcagtgttgtgtggaagccagaacatcgttctcaatggcaagaactttgtcatttctgttttcctgagcccatatatcagatgtcacagtgcctgcagggatagaaagagatcagatgagtcagtaagactgagtgtgaacaatagagagtggtggggcctggtgaattggagaatgtgaccaatctaagcccaagctggttgttactgtgtgggaatacaggcccacgtggcaacaatcagctttccagagcgtctgattctttttcaaaagcaactggaaatctcactttttaaaatgcaagatgttccactactcaaatagtaatgtttaattttaaatgatttgttaaaatgccacgtgtccttcctgtaggagatagctaaaaaaaattaaaagaaataaataataaaaatgctgcatgagccaaacaa

SEQ ID NO: 128374 - DNA, 772 bp, Homo sapiens
  Payload ID: 5132
  Gene Symbol: DCTN5
  Gene Name: dynactin 5 (p25)
  ENST ID: ENST00000568589
  CDS Start-End: 33-500
ggatccggggctgagggaaggaggcggcggccatggagttgggcgagctgctctacaacaagtctgagtacatcgagacggcatctgggaacaaagtcagtcgccagtcagtgttgtgtggaagccagaacatcgttctcaatggcaagaccattgtgatgaatgactgtattatccgaggggatctggcaaatgtaagagttggacgtcattgtgttgtgaaaagtcgtagtgtcataaggccaccattcaagaagttcagcaaaggtgttgcattctttcctttacatattggagaccatgtctttattgaggaagattgtgtggtcaacgcagcacagattggttcctatgttcatgttgggaagaactgtgtgattgggcgccgatgtgtgttgaaagactgctgcaaaattcttgacaacacagtattacctccagaaactgtggttccaccattcactgtcttctcaggctgcccaggtaaccttggctgttgattaattttattttaacttcctaaaactcagttgtattttccatcgcaaaagtaatgcttacgattcctatctctggcaatatgttgatagagctaacttagaaattcacctgtacaaagtacctagaaatgctacctaacatataacaagcatctgtttaaatgcataattgggttcaccagaaaataaggaaattatgaagggccaaacacaaagaggaaactaagcccaagctgtgagattgcacgggttaatgctgtcttcataataga

SEQ ID NO: 128375 - DNA, 547 bp, Homo sapiens
  Payload ID: 5132
  Gene Symbol: DCTN5
  Gene Name: dynactin 5 (p25)
  ENST ID: ENST00000563188
  CDS Start-End: 31-258
atccggggctgagggaaggaggcggcggccatggagttgggcgagctgctctacaacaagtctgagtacatcgagacggcatctgggaacaaagtcagtcgccagtcagtgttgtgtggaagccagaacatcgttctcaatggcaaggctggagtgcaatggcgcgatctcggctcactgcaacctccgcctcccaggttcaagcgattctcctgcctcagcctcccgagtagctgggattactgcagaccattgtgatgaatgactgtattatccgaggggatctggcaaatgtaagagttggacgtcattgtgttgtgaaaagtcgtagtgtcataaggccaccattcaagaagttcagcaaaggtgttgcattctttcctttacatattggagaccatgtctttattgaggaagattgtgtggtcaacgcagcacagattggttcctatgttcatgttgggaagaactgtgtgattgggcgccgatgtgtgttgaaagactgctgcaaaattcttgacaacacagtattacctccagaaactgt

SEQ ID NO: 128376 - DNA, 571 bp, Homo sapiens
  Payload ID: 5132
  Gene Symbol: DCTN5
  Gene Name: dynactin 5 (p25)
  ENST ID: ENST00000566053
  CDS Start-End: 68-229
ggaatctctgaaagactgaccgactgactctgacaggatccggggctgagggaaggaggcggcggccatggagttgggcgagctgctctacaacaagtctgagtacatcgagacggcatctgggaacaaagtcagtcgccagtcagtgttgtgtggaagccagaacatcgttctcaatggcaagtgttgcattctttcctttacatattggagaccatgtctttattgaggaagattgtgtggtcaacgcagcacagattggttcctatgttcatgttgggaagaactgtgtgattgggcgccgatgtgtgttgaaagactgctgcaaaattcttgacaacacagtattacctccagaaactgtggttccaccattcactgtcttctcaggctgcccaggactcttctcaggggagctcccggagtgcactcaggagctgatgattgacgtcaccaagagctactaccagaagtttttgcccctgacgcaagtctagcatctctgcctcatgtcttgaatctgcttgagctctaagatgaacctggggacaaagtgagccagtcagcacct

SEQ ID NO: 128377 - DNA, 744 bp, Homo sapiens
  Payload ID: 5132
  Gene Symbol: DCTN5
  Gene Name: dynactin 5 (p25)
  ENST ID: ENST00000566298
  CDS Start-End: 447-744
atcctctagcctcagccttctgaggagctgggactacagacacgcgccaccatgcccggctaattaaaaaattttttttttgttgagaaggggtctcactatgttgcctaggctggtcttgagctcctgtcctcaagggatccgtctgcctcagcctctcaaagtgctgagattacaggcatgagccaccatactcagccatagtttcctaatccatcattgcttttttgatatcctggactcactccattgtggacagcaccccactttatgtttttttctctcaaatgggagctttcttgatggaaacctgtagtccagaaacctattaagtttgctttccccggttttccgttgttttcttttaggcatctgggaacaaagtcagtcgccagtcagtgttgtgtggaagccagaacatcgttctcaatggcaagaccattgtgatgaatgactgtattatccgaggggatctggcaaatgtaagagttggacgtcattgtgttgtgaaaagtcgtagtgtcataaggccaccattcaagaagttcagcaaaggtgttgcattctttcctttacatattggagaccatgtctttattgaggaagattgtgtggtcaacgcagcacagattggttcctatgttcatgttgggaagaactgtgtgattgggcgccgatgtgtgttgaaagactgctgcaaaattcttgacaacacagtattacctccagaaactgtggttccac

SEQ ID NO: 128378 - DNA, 1127 bp, Homo sapiens
  Payload ID: 5133
  Gene Symbol: DCTN6
  Gene Name: dynactin 6
  Uniprot ID: O00399
  ENST ID: ENST00000221114
  CDS Start-End: 88-660
caaccctgccaggctctccaatcgcatgtggaattatcgctctacccaggcggtggtgtcgatctacgttccaattggggccgtaccatggcggagaagactcaaaagagtgtgaagattgctcctggagcagttgtatgtgtagaaagtgaaatcagaggagatgtaactatcggacctcggacagtgatccaccctaaagcaagaattattgcggaagccgggccaatagtgattggcgaagggaacctaatagaagaacaggcccttatcataaatgcttacccagataatatcactcctgacactgaagatccagaaccaaaacctatgatcattggcaccaataatgtgtttgaagttggctgttattcccaagccatgaagatgggagataataatgtcattgaatcaaaagcatatgtaggcagaaatgtaatattgacaagtggctgcatcattggggcttgttgcaacctaaatacatttgaagtcatccctgagaatacggtgatctatggtgcagactgccttcgtcgggtgcagactgagcgaccgcagccccagacactacagctggatttcttgatgaaaatcttgccaaattaccaccacctaaagaagactatgaaaggaagctcaactccagtaaagaactaagaacagtgtataacatgaagataacattttgtctttgaccactgtcttttgaatgggcccacagtgtttatgtactcttaacaactcacagaataatacatgttcactttattttgtaaaattgggttgagaggaaactaatggagtttcattgtaactgtcctttgtaatttatataaatgtattattttcctatatccttggttcttttctgataatttacagatttagcttttcttttgttatataaactgctagccacaaattttagttatgtaaaaggctacccttgacaagaaaagacatactgtcatgtatttatattctagcatagactaaactgaataaaaatgctgataacaggacctttagtaagcatactttaatcagtttttctccttgaattaatcttttctcttaatttttattatgtactagttgtattaaagctaatgtgtttacttttt

SEQ ID NO: 128379 - DNA, 878 bp, Homo sapiens
  Payload ID: 5133
  Gene Symbol: DCTN6
  Gene Name: dynactin 6
  ENST ID: ENST00000523666
  CDS Start-End: 15-236
attggggccgtaccatggcggagaagactcaaaagagtgtgaagattgctcctggagcagttgtatgtgtagaaagtgaaatcagaggagatgtaactatcggacctcggacagtgatccaccctaaagcaagaattattgcggaagccgggccaatagtgattggcgaagggaacctaatagaagaacaggcccttatcataaatgcattcccaagccatgaagatgggagataataatgtcattgaatcaaaagcatatgtaggcagaaatgtaatattgacaagtggctgcatcattggggcttgttgcaacctaaatacatttgaagtcatccctgagaatacggtgatctatggtgcagactgccttcgtcgggtgcagactgagcgaccgcagccccagacactacagctggatttcttgatgaaaatcttgccaaattaccaccacctaaagaagactatgaaaggaagctcaactccagtaaagaactaagaacagtgtataacatgaagataacattttgtctttgaccactgtcttttgaatgggcccacagtgtttatgtactcttaacaactcacagaataatacatgttcactttattttgtaaaattgggttgagaggaaactaatggagtttcattgtaactgtcctttgtaatttatataaatgtattattttcctatatccttggttcttttctgataatttacagatttagcttttcttttgttatataaactgctagccacaaattttagttatgtaaaaggctacccttgacaagaaaagacatactgtcatgtatttatattctagcatagactaaactgaataaaaatgctgataacaggacctttagtaagcata

SEQ ID NO: 128380 - DNA, 540 bp, Homo sapiens
  Payload ID: 5133
  Gene Symbol: DCTN6
  Gene Name: dynactin 6
  ENST ID: ENST00000519830
  CDS Start-End: 10-123
ggccgtaccatggcggagaagactcaaaagagtgtgaagattgctcctggagcagttgtatgtgtagaaagtgaaatcagaggagatgtaactatcgctgggcatggtggtgcatgcctgtaatcccagctactcgggaggctgaggcaggacaattgcttgaacctgggaggcagaggttgcggtgagccgagatcgcgccgttgcactccagcctgggcaacaagagcgaaactccttctcagaaaaaaaaaaaaagaaaaaagaaaaaagaatttgccaggacctcggacagtgatccaccctaaagcaagaattattgcggaagccgggccaatagtgattggcgaagggaacctaatagaagaacaggcccttatcataaatgcttacccagataatatcactcctgacactgaagatccagaaccaaaacctatgatcattggcaccaataatgtgtttgaagttggctgttattcccaagccatgaagatgggagataataatgtcattgaatcaaaagcatatgtaggcaga

SEQ ID NO: 128381 - DNA, 820 bp, Homo sapiens
  Payload ID: 5133
  Gene Symbol: DCTN6
  Gene Name: dynactin 6
  ENST ID: ENST00000522141
  CDS Start-End: 66-206
cgcatgtggaattatcgctctacccaggcggtggtgtcgatctacgttccaattggggccgtaccatggcggagaagactcaaaagagtgtgaagattgctcctggagcagttgtatgtgtagaaagtgaaatcagaggagatgtaactatcgttacccagataatatcactcctgacactgaagatccagaaccaaaacctatgatcattggcaccaataatgtgtttgaagttggctgttattcccaagccatgaagatgggagataataatgtcattgaatcaaaagcatatgtaggcagaaatgtaatattgacaagtggctgcatcattggggcttgttgcaacctaaatacatttgaagtcatccctgagaatacggtgatctatggtgcagactgccttcgtcgggtgcagactgagcgaccgcagccccagacactacagctggatttcttgatgaaaatcttgccaaattaccaccacctaaagaagactatgaaaggaagctcaactccagtaaagaactaagaacagtgtataacatgaagataacattttgtctttgaccactgtcttttgaatgggcccacagtgtttatgtactcttaacaactcacagaataatacatgttcactttattttgtaaaattgggttgagaggaaactaatggagtttcattgtaactgtcctttgtaatttatataaatgtattattttcctatatccttggttcttttctgataatttacagatttagcttttcttttgttatataaactgctagccacaaattttagttatgtaaaaggctacc

SEQ ID NO: 128382 - DNA, 880 bp, Homo sapiens
  Payload ID: 5133
  Gene Symbol: DCTN6
  Gene Name: dynactin 6
  ENST ID: ENST00000520829
  CDS Start-End: 16-528
aattggggccgtaccatggcggagaagactcaaaagagtgtgaagattgctcctggagcagttgtatgtgtagaaagtgaaatcagaggagatgtaactatcggacctcggacagtgatccaccctaaagcaagaattattgcggaagccgggccaatagtgattggcgaagggaacctaatagaagaacaggcccttatcataaatgcttacccagataatatcactcctgacactgaagatccagaaccaaaacctatgatcattggcaccaataatgtgtttgaagttggctgttattcccaagccatgaagatgggagataataatgtcattgaatcaaaagcatatgtaggcagaaatgtaatattgacaagtggctgcatcattggggcttgttgcaacctaaatacatttgaagtcatccctgagaatacggtgatctatggtgcagactgccttcgtcgggtgcagactgagcgaccgcaggtactagaacctctctttaaaaagagttctatctgctgattttcccaaaatacaatgtaattgtcttcatgaggcagcaggtacactatttaagaacataattaaaataaaacaaaagatgccagtctcagtgactcgtgcctggaattctagcactttgggaggccgaggcaggaggatgacttgagggcaggaatttaagagcagcctgggcaacatagtgagactctgtctctacaaacactagaaaaactaagccaggtgtggtggggcatgactatagtccagctactgaggaggctgaggtgggaagataattcttgagtgtgaggttaccatgagccatgatcatgccactgcactccagcctgagcaacagagaccccaactc

SEQ ID NO: 128383 - DNA, 2027 bp, Homo sapiens
  Payload ID: 5134
  Gene Symbol: DYNAP
  Gene Name: dynactin associated protein
  Uniprot ID: Q8N1N2
  ENST ID: ENST00000321600
  CDS Start-End: 47-679
gtactgatgcatcatagttgacttccaccagtgttttaattgtttcatggttgcagatataaagggcaatgaacaaattgaaaaatattcttggagagaagcttgtgatactggcagctcaagaatggacagaaagcatggaaaatacatattgaacgttgagcactctgaaaaccagccgccaatcacacatccaaatgaccaagaggctcacagttccatatgctggtgtctaccttcaaatgatataaccagtgatgtctctcccaacttaactggggtctgcgtgaacccaggaatccttgcacattcaagatgtctacagtcagaatcctgtaacacacaggtaaaagaatattgccgcaatgactggtctatgtggaaagtcttcctggcttgtctcttagcctgtgtgataatgacagcaattggagtacttataatatgcttggtgaataacaaaggatcggccaattcctccattgttatccagctatccacaaatgatggagagtgtgtgactgtcaaacctggaacaccctctcctgcttgtccacctacaatgaccaccacttcaactgtacctgcaagtacagccactgaatctacaacttcaacagctacagctgccaccacttccacagaacctataactgttgcacctaccgatcatttataatttgaacagccatagccatcacttcaactgaaacttcaacctctaccacttcaactcagtttgcaactataatagctactcctatcacttcaagtggaatcatggctgcagtcactttaacagactctataaccgttacaacttcaacaaaatcaagtcctacttcaacttaaacttacttgacaactcaaataatcaccacttcgaccatctctttgactgaatcaacaactacattcccttcaactgaatctgcaaccacttccacttaacctataactactgtaacttctacttagcctacagtaacaatgctcatcactcttttccaacaatgtataatctccacctattcatctgaggactaagctctgatttttcatcttgcccaaattcctttctaaggggtatggggagtcatgccctacaaaccataaattctcatcagatgggttttatttaaccctgtatattgtgacttactttctaatctgactctggcataacaagggaaaaaaatcaaaatgttttaccccaaaatatatttccttgccataccttgaaattgtcctgcaaagtctcttgtggagaaactccacattctgtagagaatatcctttcccctttgttttccttcctttctttccagatccaggagataatcaactaagagccaggcacccttttaggtctaataagaaacactttacaacctgctctctctctgaagtctgctttctgagagattcctctgcacaataaaacttgatctccacaatcctttatcttaacctgaacattcctttccatggatctcaggtcttcagataaactaaaccaattgtcaaccagaacatgtttaaatttacctatagcctggaagccccaactttgagttgtcctgcctttctgaaccaagccaatgtatttcttaaatgtatttgattgatgtctcatgtctccctaaaaatatataaaaccaaactgtaccttagccactttggacacatgttctcaggacctcctgagggctatgtcatgagccatggtcactcatatttggctcagaattaatctcttaaaatattttacagagtttgactctttttgtcaacacatccgaacctgcaactacaaatgccaccattaccacttaaaacttgatagaactagcatcagtcatcaaaataacctgttctatattaagttaacttttagttatcaccagtaatactagcctacaactactcgccacactggctcttccccaaaattgaaattgtacaatatgtgagtctaattcttgctaacataacattattgcctacattaaaagcttctgcaaagc

SEQ ID NO: 128384 - DNA, 1102 bp, Homo sapiens
  Payload ID: 5134
  Gene Symbol: DYNAP
  Gene Name: dynactin associated protein
  ENST ID: ENST00000585973
  CDS Start-End: 92-568
aggaggatcagggtgtaagtcagccagagagacaaggaaaattttggatctataggagaaagaactttcaaacagcaaaagtcacccaaaaatggaataccaacttctagatataaagggcaatgaacaaattgaaaaatattcttggagagaagcttgtgatactggcagctcaagaatggacagaaagcatggaaaatacatattgaacgttgagcactctgaaaaccagccggtaaaagaatattgccgcaatgactggtctatgtggaaagtcttcctggcttgtctcttagcctgtgtgataatgacagcaattggagtacttataatatgcttggtgaataacaaaggatcggccaattcctccattgttatccagctatccacaaatgatggagagtgtgtgactgtcaaacctggaacaccctctcctgcttgtccacctacaatgaccaccacttcaactgtacctgcaagtacagccactgaatctacaacttcaacagctacagctgccaccacttccacagaacctataactgttgcacctaccgatcatttataatttgaacagccatagccatcacttcaactgaaacttcaacctctaccacttcaactcagtttgcaactataatagctactcctatcacttcaagtggaatcatggctgcagtcactttaacagactctataaccgttacaacttcaacaaaatcaagtcctacttcaacttaaacttacttgacaactcaaataatcaccacttcgaccatctctttgactgaatcaacaactacattcccttcaactgaatctgcaaccacttccacttaacctataactactgtaacttctacttagcctacagtaacaatgctcatcactcttttccaacaatgtataatctccacctattcatctgaggactaagctctgatttttcatcttgcccaaattcctttctaaggggtatggggagtcatgccctacaaaccataaattctcatcagatgggttttatttaaccctgtatattgtgacttactttctaatctgactctggcataacaagggaaaaaaatcaaaatgttttacc

SEQ ID NO: 128385 - DNA, 3254 bp, Homo sapiens
  Payload ID: 5135
  Gene Symbol: DNM1
  Gene Name: dynamin 1
  Uniprot ID: Q05193
  ENST ID: ENST00000341179
  CDS Start-End: 93-2648
agtctgggcgcgcggctgcagcggcggagccggagtcggagccgggagcgctagcggcagccggatcgcagcctgcggggcccgccgcagccatgggcaaccgcggcatggaagatctcatcccgctggtcaaccggctgcaagacgccttctctgccatcggccagaacgcggacctcgacctgccgcagatcgctgtggtgggcggccagagcgccggcaagagctcggtgctcgagaatttcgtaggcagggacttcttgcctcgaggatctggcattgtcacccgacgtcccctggtcttgcagctggtcaatgcaaccacagaatatgccgagttcctgcactgcaagggaaagaaattcaccgacttcgaggaggtgcgccttgagatcgaggccgagaccgacagggtcaccggcaccaacaagggcatctcgccggtgcctatcaacctccgcgtctactcgccgcacgtgctgaacctgaccctggtggacctgcccggaatgaccaaggtcccggtgggggaccaacctcccgacatcgagttccagatccgagacatgcttatgcagtttgtcaccaaggagaactgcctcatcctggccgtgtcccccgccaactctgacctggccaattctgacgccctcaaggtcgccaaggaggtggacccccagggccagcgcaccatcggggtcatcaccaagctggacctgatggacgagggcacagatgcccgtgatgtgctggagaacaagctgctccccctgcgcagaggctacattggagtggtgaaccggagccagaaggacattgatggcaagaaggacattaccgccgccttggctgctgaacgaaagttcttcctctcccatccatcttatcgccacttggctgaccgtatgggcacgccctacctgcagaaggtcctcaatcagcaactgacgaaccacatccgggacacactgccggggctgcggaacaagctgcagagccagctactgtccattgagaaggaggtggaggaatacaagaacttccgccctgatgacccagctcgcaagaccaaggccctgctgcagatggtccagcagttcgccgtagactttgagaagcgcattgagggctcaggagatcagatcgacacctacgaactgtcagggggagcccgcattaaccgaatcttccacgagcgcttccctttcgagctggtcaagatggagtttgatgagaaggaactccgaagggagatcagctatgctatcaagaatatccatggcattagaacggggctgtttaccccagacatggcctttgagaccattgtgaaaaagcaggtgaagaagatccgagaaccgtgtctcaagtgtgtggacatggttatctcggagctaatcagcaccgttagacagtgcaccaagaagctccagcagtacccgcggctacgggaggagatggagcgcatcgtgaccacccacatccgggagcgcgagggccgcactaaggagcaggtcatgcttctcatcgatatcgagctggcttacatgaacaccaaccatgaggacttcataggctttgccaatgctcagcagaggagcaaccagatgaacaagaagaagacttcagggaaccaggatgagattctggtcatccgcaagggctggctgactatcaataatattggcatcatgaaagggggctccaaggagtactggtttgtgctgactgctgagaatctgtcctggtacaaggatgatgaggagaaagagaagaaatacatgctgtctgtggacaacctcaagctgcgggacgtggagaagggctttatgtcgagcaagcatatctttgccctctttaacacggagcagaggaatgtctacaaggattatcggcagctggagctagcctgtgagacacaggaggaggtggacagctggaaggcctccttcctgagggctggcgtgtaccctgagcgtgttggggacaaagagaaagccagcgagaccgaggagaatggctccgacagcttcatgcattccatggacccacagctggaacggcaagtggagaccatccggaatcttgtggactcatacatggccattgtcaacaagaccgtgagggacctcatgcccaagaccatcatgcacctcatgattaacaataccaaggagttcatcttctcggagctgctggccaacctgtactcgtgtggggaccagaacacgctgatggaggagtcggcggagcaggcacagcggcgcgacgagatgctgcgcatgtaccacgcactgaaggaggcgctcagcatcatcggcgacatcaacacgaccaccgtcagcacgcccatgcccccgcccgtggacgactcctggctgcaggtgcagagcgtaccggccggacgcaggtcgcccacgtccagccccacgccgcagcgccgagcccccgccgtgcccccagcccggcccgggtcgcggggccctgctcctgggcctccgcctgctgggtccgccctggggggggcgccccccgtgccctccaggccgggggcttcccctgaccctttcggccctccccctcaggtgccctcgcgccccaaccgcgccccgcccggggtccccagaatcactatcagtgacccctgaggagcgtcagccatgccgatcgggtcaggcaagtccatcccgtcctgagagccccaggccccccttcgacctctaaacagatccctcctcttctcggagacctccctttccaagcctgcctggacggctgttctgtgacttgacagtggctcccccagccccaaagccagcccccttcatctgtgacttaatctgttgtagtggtgagctgatacattcaggtgtgaccgttggtgaaaacttgtgccccttctgtggtatgcccttgccctgttctataaatatctataaatactcatatatatacacacctacacatggccaaccgcctcgcctctagcgctgggaatcagtcactgtgctatccttgtggagtcttgtggcccaactaccagagaacgctgtcccccgacatcccactccaaagtgtgccacctccagtgagcctccttgtcatgcccggcctgtggacagccagcccccgccatccctcccaccccctaccaagcatgggggtgctgtgcaggcagccgtgtggcctgacagtttctaccagtcctgctgtccctcggctgagaataaaacccatttctggatgatggggaa

SEQ ID NO: 128386 - DNA, 3244 bp, Homo sapiens
  Payload ID: 5135
  Gene Symbol: DNM1
  Gene Name: dynamin 1
  Uniprot ID: Q05193
  ENST ID: ENST00000372923
  CDS Start-End: 120-2714
gaggggcgggggccccgcggcgcaggcagtctgggcgcgcggctgcagcggcggagccggagtcggagccgggagcgctagcggcagccggatcgcagcctgcggggcccgccgcagccatgggcaaccgcggcatggaagatctcatcccgctggtcaaccggctgcaagacgccttctctgccatcggccagaacgcggacctcgacctgccgcagatcgctgtggtgggcggccagagcgccggcaagagctcggtgctcgagaatttcgtaggcagggacttcttgcctcgaggatctggcattgtcacccgacgtcccctggtcttgcagctggtcaatgcaaccacagaatatgccgagttcctgcactgcaagggaaagaaattcaccgacttcgaggaggtgcgccttgagatcgaggccgagaccgacagggtcaccggcaccaacaagggcatctcgccggtgcctatcaacctccgcgtctactcgccgcacgtgctgaacctgaccctggtggacctgcccggaatgaccaaggtcccggtgggggaccaacctcccgacatcgagttccagatccgagacatgcttatgcagtttgtcaccaaggagaactgcctcatcctggccgtgtcccccgccaactctgacctggccaattctgacgccctcaaggtcgccaaggaggtggacccccagggccagcgcaccatcggggtcatcaccaagctggacctgatggacgagggcacagatgcccgtgatgtgctggagaacaagctgctccccctgcgcagaggctacattggagtggtgaaccggagccagaaggacattgatggcaagaaggacattaccgccgccttggctgctgaacgaaagttcttcctctcccatccatcttatcgccacttggctgaccgtatgggcacgccctacctgcagaaggtcctcaatcagcaactgacgaaccacatccgggacacactgccggggctgcggaacaagctgcagagccagctactgtccattgagaaggaggtggaggaatacaagaacttccgccctgatgacccagctcgcaagaccaaggccctgctgcagatggtccagcagttcgccgtagactttgagaagcgcattgagggctcaggagatcagatcgacacctacgaactgtcagggggagcccgcattaaccgaatcttccacgagcgcttccctttcgagctggtcaagatggagtttgatgagaaggaactccgaagggagatcagctatgctatcaagaatatccatggcattagaacggggctgtttaccccagacatggcctttgagaccattgtgaaaaagcaggtgaagaagatccgagaaccgtgtctcaagtgtgtggacatggttatctcggagctaatcagcaccgttagacagtgcaccaagaagctccagcagtacccgcggctacgggaggagatggagcgcatcgtgaccacccacatccgggagcgcgagggccgcactaaggagcaggtcatgcttctcatcgatatcgagctggcttacatgaacaccaaccatgaggacttcataggctttgccaatgctcagcagaggagcaaccagatgaacaagaagaagacttcagggaaccaggatgagattctggtcatccgcaagggctggctgactatcaataatattggcatcatgaaagggggctccaaggagtactggtttgtgctgactgctgagaatctgtcctggtacaaggatgatgaggagaaagagaagaaatacatgctgtctgtggacaacctcaagctgcgggacgtggagaagggctttatgtcgagcaagcatatctttgccctctttaacacggagcagaggaatgtctacaaggattatcggcagctggagctagcctgtgagacacaggaggaggtggacagctggaaggcctccttcctgagggctggcgtgtaccctgagcgtgttggggacaaagagaaagccagcgagaccgaggagaatggctccgacagcttcatgcattccatggacccacagctggaacggcaagtggagaccatccggaatcttgtggactcatacatggccattgtcaacaagaccgtgagggacctcatgcccaagaccatcatgcacctcatgattaacaataccaaggagttcatcttctcggagctgctggccaacctgtactcgtgtggggaccagaacacgctgatggaggagtcggcggagcaggcacagcggcgcgacgagatgctgcgcatgtaccacgcactgaaggaggcgctcagcatcatcggcgacatcaacacgaccaccgtcagcacgcccatgcccccgcccgtggacgactcctggctgcaggtgcagagcgtaccggccggacgcaggtcgcccacgtccagccccacgccgcagcgccgagcccccgccgtgcccccagcccggcccgggtcgcggggccctgctcctgggcctccgcctgctgggtccgccctggggggggcgccccccgtgccctccaggccgggggcttcccctgaccctttcggccctccccctcaggtgccctcgcgccccaaccgcgccccgcccggggtccccagccgatcgggtcaggcaagtccatcccgtcctgagagccccaggccccccttcgacctctaaacagatccctcctcttctcggagacctccctttccaagcctgcctggacggctgttctgtgacttgacagtggctcccccagccccaaagccagcccccttcatctgtgacttaatctgttgtagtggtgagctgatacattcaggtgtgaccgttggtgaaaacttgtgccccttctgtggtatgcccttgccctgttctataaatatctataaatactcatatatatacacacctacacatggccaaccgcctcgcctctagcgctgggaatcagtcactgtgctatccttgtggagtcttgtggcccaactaccagagaacgctgtcccccgacatcccactccaaagtgtgccacctccagtgagcctccttgtcatgcccggcctgtggacagccagcccccgccatccctcccaccccctaccaagcatgggggtgctgtgcaggcagccgtgtggcctgacagtttctaccagtcctgctgtccctcggctgagaataaaacccatttctggatgatggggaa

SEQ ID NO: 128387 - DNA, 3245 bp, Homo sapiens
  Payload ID: 5135
  Gene Symbol: DNM1
  Gene Name: dynamin 1
  Uniprot ID: Q05193
  ENST ID: ENST00000393594
  CDS Start-End: 84-2639
gcgcggctgcagcggcggagccggagtcggagccgggagcgctagcggcagccggatcgcagcctgcggggcccgccgcagccatgggcaaccgcggcatggaagatctcatcccgctggtcaaccggctgcaagacgccttctctgccatcggccagaacgcggacctcgacctgccgcagatcgctgtggtgggcggccagagcgccggcaagagctcggtgctcgagaatttcgtaggcagggacttcttgcctcgaggatctggcattgtcacccgacgtcccctggtcttgcagctggtcaatgcaaccacagaatatgccgagttcctgcactgcaagggaaagaaattcaccgacttcgaggaggtgcgccttgagatcgaggccgagaccgacagggtcaccggcaccaacaagggcatctcgccggtgcctatcaacctccgcgtctactcgccgcacgtgctgaacctgaccctggtggacctgcccggaatgaccaaggtcccggtgggggaccaacctcccgacatcgagttccagatccgagacatgcttatgcagtttgtcaccaaggagaactgcctcatcctggccgtgtcccccgccaactctgacctggccaattctgacgccctcaaggtcgccaaggaggtggacccccagggccagcgcaccatcggggtcatcaccaagctggacctgatggacgagggcacagatgcccgtgatgtgctggagaacaagctgctccccctgcgcagaggctacattggagtggtgaaccggagccagaaggacattgatggcaagaaggacattaccgccgccttggctgctgaacgaaagttcttcctctcccatccatcttatcgccacttggctgaccgtatgggcacgccctacctgcagaaggtcctcaatcagcaactgacgaaccacatccgggacacactgccggggctgcggaacaagctgcagagccagctactgtccattgagaaggaggtggaggaatacaagaacttccgccctgatgacccagctcgcaagaccaaggccctgctgcagatggtccagcagttcgccgtagactttgagaagcgcattgagggctcaggagatcagatcgacacctacgaactgtcagggggagcccgcattaaccgaatcttccacgagcgcttccctttcgagctggtcaagatggagtttgatgagaaggaactccgaagggagatcagctatgctatcaagaatatccatggcattaggacgggcctcttcacacctgacctcgcttttgaagccacagtgaaaaagcaggtgcagaagctcaaagagcccagtatcaagtgtgtggatatggtagtcagtgagctcacagccaccatcagaaagtgtagcgaaaagctccagcagtacccgcggctacgggaggagatggagcgcatcgtgaccacccacatccgggagcgcgagggccgcactaaggagcaggtcatgcttctcatcgatatcgagctggcttacatgaacaccaaccatgaggacttcataggctttgccaatgctcagcagaggagcaaccagatgaacaagaagaagacttcagggaaccaggatgagattctggtcatccgcaagggctggctgactatcaataatattggcatcatgaaagggggctccaaggagtactggtttgtgctgactgctgagaatctgtcctggtacaaggatgatgaggagaaagagaagaaatacatgctgtctgtggacaacctcaagctgcgggacgtggagaagggctttatgtcgagcaagcatatctttgccctctttaacacggagcagaggaatgtctacaaggattatcggcagctggagctagcctgtgagacacaggaggaggtggacagctggaaggcctccttcctgagggctggcgtgtaccctgagcgtgttggggacaaagagaaagccagcgagaccgaggagaatggctccgacagcttcatgcattccatggacccacagctggaacggcaagtggagaccatccggaatcttgtggactcatacatggccattgtcaacaagaccgtgagggacctcatgcccaagaccatcatgcacctcatgattaacaataccaaggagttcatcttctcggagctgctggccaacctgtactcgtgtggggaccagaacacgctgatggaggagtcggcggagcaggcacagcggcgcgacgagatgctgcgcatgtaccacgcactgaaggaggcgctcagcatcatcggcgacatcaacacgaccaccgtcagcacgcccatgcccccgcccgtggacgactcctggctgcaggtgcagagcgtaccggccggacgcaggtcgcccacgtccagccccacgccgcagcgccgagcccccgccgtgcccccagcccggcccgggtcgcggggccctgctcctgggcctccgcctgctgggtccgccctggggggggcgccccccgtgccctccaggccgggggcttcccctgaccctttcggccctccccctcaggtgccctcgcgccccaaccgcgccccgcccggggtccccagaatcactatcagtgacccctgaggagcgtcagccatgccgatcgggtcaggcaagtccatcccgtcctgagagccccaggccccccttcgacctctaaacagatccctcctcttctcggagacctccctttccaagcctgcctggacggctgttctgtgacttgacagtggctcccccagccccaaagccagcccccttcatctgtgacttaatctgttgtagtggtgagctgatacattcaggtgtgaccgttggtgaaaacttgtgccccttctgtggtatgcccttgccctgttctataaatatctataaatactcatatatatacacacctacacatggccaaccgcctcgcctctagcgctgggaatcagtcactgtgctatccttgtggagtcttgtggcccaactaccagagaacgctgtcccccgacatcccactccaaagtgtgccacctccagtgagcctccttgtcatgcccggcctgtggacagccagcccccgccatccctcccaccccctaccaagcatgggggtgctgtgcaggcagccgtgtggcctgacagtttctaccagtcctgctgtccctcggctgagaataaaacccatttctggatgatggggaa

SEQ ID NO: 128388 - DNA, 2710 bp, Homo sapiens
  Payload ID: 5135
  Gene Symbol: DNM1
  Gene Name: dynamin 1
  Uniprot ID: Q05193
  ENST ID: ENST00000475805
  CDS Start-End: 93-2648
agtctgggcgcgcggctgcagcggcggagccggagtcggagccgggagcgctagcggcagccggatcgcagcctgcggggcccgccgcagccatgggcaaccgcggcatggaagatctcatcccgctggtcaaccggctgcaagacgccttctctgccatcggccagaacgcggacctcgacctgccgcagatcgctgtggtgggcggccagagcgccggcaagagctcggtgctcgagaatttcgtaggcagggacttcttgcctcgaggatctggcattgtcacccgacgtcccctggtcttgcagctggtcaatgcaaccacagaatatgccgagttcctgcactgcaagggaaagaaattcaccgacttcgaggaggtgcgccttgagatcgaggccgagaccgacagggtcaccggcaccaacaagggcatctcgccggtgcctatcaacctccgcgtctactcgccgcacgtgctgaacctgaccctggtggacctgcccggaatgaccaaggtcccggtgggggaccaacctcccgacatcgagttccagatccgagacatgcttatgcagtttgtcaccaaggagaactgcctcatcctggccgtgtcccccgccaactctgacctggccaattctgacgccctcaaggtcgccaaggaggtggacccccagggccagcgcaccatcggggtcatcaccaagctggacctgatggacgagggcacagatgcccgtgatgtgctggagaacaagctgctccccctgcgcagaggctacattggagtggtgaaccggagccagaaggacattgatggcaagaaggacattaccgccgccttggctgctgaacgaaagttcttcctctcccatccatcttatcgccacttggctgaccgtatgggcacgccctacctgcagaaggtcctcaatcagcaactgacgaaccacatccgggacacactgccggggctgcggaacaagctgcagagccagctactgtccattgagaaggaggtggaggaatacaagaacttccgccctgatgacccagctcgcaagaccaaggccctgctgcagatggtccagcagttcgccgtagactttgagaagcgcattgagggctcaggagatcagatcgacacctacgaactgtcagggggagcccgcattaaccgaatcttccacgagcgcttccctttcgagctggtcaagatggagtttgatgagaaggaactccgaagggagatcagctatgctatcaagaatatccatggcattaggacgggcctcttcacacctgacctcgcttttgaagccacagtgaaaaagcaggtgcagaagctcaaagagcccagtatcaagtgtgtggatatggtagtcagtgagctcacagccaccatcagaaagtgtagcgaaaagctccagcagtacccgcggctacgggaggagatggagcgcatcgtgaccacccacatccgggagcgcgagggccgcactaaggagcaggtcatgcttctcatcgatatcgagctggcttacatgaacaccaaccatgaggacttcataggctttgccaatgctcagcagaggagcaaccagatgaacaagaagaagacttcagggaaccaggatgagattctggtcatccgcaagggctggctgactatcaataatattggcatcatgaaagggggctccaaggagtactggtttgtgctgactgctgagaatctgtcctggtacaaggatgatgaggagaaagagaagaaatacatgctgtctgtggacaacctcaagctgcgggacgtggagaagggctttatgtcgagcaagcatatctttgccctctttaacacggagcagaggaatgtctacaaggattatcggcagctggagctagcctgtgagacacaggaggaggtggacagctggaaggcctccttcctgagggctggcgtgtaccctgagcgtgttggggacaaagagaaagccagcgagaccgaggagaatggctccgacagcttcatgcattccatggacccacagctggaacggcaagtggagaccatccggaatcttgtggactcatacatggccattgtcaacaagaccgtgagggacctcatgcccaagaccatcatgcacctcatgattaacaataccaaggagttcatcttctcggagctgctggccaacctgtactcgtgtggggaccagaacacgctgatggaggagtcggcggagcaggcacagcggcgcgacgagatgctgcgcatgtaccacgcactgaaggaggcgctcagcatcatcggcgacatcaacacgaccaccgtcagcacgcccatgcccccgcccgtggacgactcctggctgcaggtgcagagcgtaccggccggacgcaggtcgcccacgtccagccccacgccgcagcgccgagcccccgccgtgcccccagcccggcccgggtcgcggggccctgctcctgggcctccgcctgctgggtccgccctggggggggcgccccccgtgccctccaggccgggggcttcccctgaccctttcggccctccccctcaggtgccctcgcgccccaaccgcgccccgcccggggtccccagaatcactatcagtgacccctgaggagcgtcagccatggaagggcccagcctcacctacgagacctgcagccccccgaccagctg

SEQ ID NO: 128389 - DNA, 3181 bp, Homo sapiens
  Payload ID: 5135
  Gene Symbol: DNM1
  Gene Name: dynamin 1
  Uniprot ID: Q05193
  ENST ID: ENST00000486160
  CDS Start-End: 57-2651
cggagccgggagcgctagcggcagccggatcgcagcctgcggggcccgccgcagccatgggcaaccgcggcatggaagatctcatcccgctggtcaaccggctgcaagacgccttctctgccatcggccagaacgcggacctcgacctgccgcagatcgctgtggtgggcggccagagcgccggcaagagctcggtgctcgagaatttcgtaggcagggacttcttgcctcgaggatctggcattgtcacccgacgtcccctggtcttgcagctggtcaatgcaaccacagaatatgccgagttcctgcactgcaagggaaagaaattcaccgacttcgaggaggtgcgccttgagatcgaggccgagaccgacagggtcaccggcaccaacaagggcatctcgccggtgcctatcaacctccgcgtctactcgccgcacgtgctgaacctgaccctggtggacctgcccggaatgaccaaggtcccggtgggggaccaacctcccgacatcgagttccagatccgagacatgcttatgcagtttgtcaccaaggagaactgcctcatcctggccgtgtcccccgccaactctgacctggccaattctgacgccctcaaggtcgccaaggaggtggacccccagggccagcgcaccatcggggtcatcaccaagctggacctgatggacgagggcacagatgcccgtgatgtgctggagaacaagctgctccccctgcgcagaggctacattggagtggtgaaccggagccagaaggacattgatggcaagaaggacattaccgccgccttggctgctgaacgaaagttcttcctctcccatccatcttatcgccacttggctgaccgtatgggcacgccctacctgcagaaggtcctcaatcagcaactgacgaaccacatccgggacacactgccggggctgcggaacaagctgcagagccagctactgtccattgagaaggaggtggaggaatacaagaacttccgccctgatgacccagctcgcaagaccaaggccctgctgcagatggtccagcagttcgccgtagactttgagaagcgcattgagggctcaggagatcagatcgacacctacgaactgtcagggggagcccgcattaaccgaatcttccacgagcgcttccctttcgagctggtcaagatggagtttgatgagaaggaactccgaagggagatcagctatgctatcaagaatatccatggcattaggacgggcctcttcacacctgacctcgcttttgaagccacagtgaaaaagcaggtgcagaagctcaaagagcccagtatcaagtgtgtggatatggtagtcagtgagctcacagccaccatcagaaagtgtagcgaaaagctccagcagtacccgcggctacgggaggagatggagcgcatcgtgaccacccacatccgggagcgcgagggccgcactaaggagcaggtcatgcttctcatcgatatcgagctggcttacatgaacaccaaccatgaggacttcataggctttgccaatgctcagcagaggagcaaccagatgaacaagaagaagacttcagggaaccaggatgagattctggtcatccgcaagggctggctgactatcaataatattggcatcatgaaagggggctccaaggagtactggtttgtgctgactgctgagaatctgtcctggtacaaggatgatgaggagaaagagaagaaatacatgctgtctgtggacaacctcaagctgcgggacgtggagaagggctttatgtcgagcaagcatatctttgccctctttaacacggagcagaggaatgtctacaaggattatcggcagctggagctagcctgtgagacacaggaggaggtggacagctggaaggcctccttcctgagggctggcgtgtaccctgagcgtgttggggacaaagagaaagccagcgagaccgaggagaatggctccgacagcttcatgcattccatggacccacagctggaacggcaagtggagaccatccggaatcttgtggactcatacatggccattgtcaacaagaccgtgagggacctcatgcccaagaccatcatgcacctcatgattaacaataccaaggagttcatcttctcggagctgctggccaacctgtactcgtgtggggaccagaacacgctgatggaggagtcggcggagcaggcacagcggcgcgacgagatgctgcgcatgtaccacgcactgaaggaggcgctcagcatcatcggcgacatcaacacgaccaccgtcagcacgcccatgcccccgcccgtggacgactcctggctgcaggtgcagagcgtaccggccggacgcaggtcgcccacgtccagccccacgccgcagcgccgagcccccgccgtgcccccagcccggcccgggtcgcggggccctgctcctgggcctccgcctgctgggtccgccctggggggggcgccccccgtgccctccaggccgggggcttcccctgaccctttcggccctccccctcaggtgccctcgcgccccaaccgcgccccgcccggggtccccagccgatcgggtcaggcaagtccatcccgtcctgagagccccaggccccccttcgacctctaaacagatccctcctcttctcggagacctccctttccaagcctgcctggacggctgttctgtgacttgacagtggctcccccagccccaaagccagcccccttcatctgtgacttaatctgttgtagtggtgagctgatacattcaggtgtgaccgttggtgaaaacttgtgccccttctgtggtatgcccttgccctgttctataaatatctataaatactcatatatatacacacctacacatggccaaccgcctcgcctctagcgctgggaatcagtcactgtgctatccttgtggagtcttgtggcccaactaccagagaacgctgtcccccgacatcccactccaaagtgtgccacctccagtgagcctccttgtcatgcccggcctgtggacagccagcccccgccatccctcccaccccctaccaagcatgggggtgctgtgcaggcagccgtgtggcctgacagtttctaccagtcctgctgtccctcggctgagaataaaacccatttctggatgatggggaa

SEQ ID NO: 128390 - DNA, 672 bp, Homo sapiens
  Payload ID: 5135
  Gene Symbol: DNM1
  Gene Name: dynamin 1
  ENST ID: ENST00000482638
  CDS Start-End: 1-395
acgaactgtcagggggagcccgcattaaccgaatcttccacgagcgcttccctttcgagctggtcaagatggagtttgatgagaaggaactccgaagggagatcagctatgctatcaagaatatccatggcattaggacgggcctcttcacacctgacctcgcttttgaagccacagtgaaaaagcaggtgcagaagctcaaagagcccagtatcaagtgtgtggatatggtagtcagtgagctcacagccaccatcagaaagtgtagcgaaaagctggcggaacatcctggaaatgttcagaggcagccagaatggaaaaagatgctcaaaggggacagaacttctcaaaggggtggaggctgccctgccatgggtgacacgtggaaaacttgagacatgtgacatccaggcgctccagcagtacccgcggctacgggaggagatggagcgcatcgtgaccacccacatccgggagcgcgagggccgcactaaggagcaggtcatgcttctcatcgatatcgagctggcttacatgaacaccaaccatgaggacttcataggctttgccaatgctcagcagaggagcaaccagatgaacaagaagaagacttcagggaaccaggatgagattctggtcatccgcaagggctggctgactatcaataatatt

SEQ ID NO: 128391 - DNA, 2724 bp, Homo sapiens
  Payload ID: 5135
  Gene Symbol: DNM1
  Gene Name: dynamin 1
  ENST ID: ENST00000627061
  CDS Start-End: 55-2562
gagccgggagcgctagcggcagccggatcgcagcctgcggggcccgccgcagccatgggcaaccgcggcatggaagatctcatcccgctggtcaaccggctgcaagacgccttctctgccatcggccagaacgcggacctcgacctgccgcagatcgctgtggtgggcggccagagcgccggcaagagctcggtgctcgagaatttcgtaggcagggacttcttgcctcgaggatctggcattgtcacccgacgtcccctggtcttgcagctggtcaatgcaaccacagaatatgccgagttcctgcactgcaagggaaagaaattcaccgacttcgaggaggtgcgccttgagatcgaggccgagaccgacagggtcaccggcaccaacaagggcatctcgccggtgcctatcaacctccgcgtctactcgccgcacgtgctgaacctgaccctggtggacctgcccggaatgaccaaggtcccggtgggggaccaacctcccgacatcgagttccagatccgagacatgcttatgcagtttgtcaccaaggagaactgcctcatcctggccgtgtcccccgccaactctgacctggccaattctgacgccctcaaggtcgccaaggaggtggacccccagggccagcgcaccatcggggtcatcaccaagctggacctgatggacgagggcacagatgcccgtgatgtgctggagaacaagctgctccccctgcgcagaggctacattggagtggtgaaccggagccagaaggacattgatggcaagaaggacattaccgccgccttggctgctgaacgaaagttcttcctctcccatccatcttatcgccacttggctgaccgtatgggcacgccctacctgcagaaggtcctcaatcagcaactgacgaaccacatccgggacacactgccggggctgcggaacaagctgcagagccagctactgtccattgagaaggaggtggaggaatacaagaacttccgccctgatgacccagctcgcaagaccaaggccctgctgcagatggtccagcagttcgccgtagactttgagaagcgcattgagggctcaggagatcagatcgacacctacgaactgtcagggggagcccgcattaaccgaatcttccacgagcgcttccctttcgagctggtcaagatggagtttgatgagaaggaactccgaagggagatcagctatgctatcaagaatatccatggcattaggacgggcctcttcacacctgacctcgcttttgaagccacagtgaaaaagcagctccagcagtacccgcggctacgggaggagatggagcgcatcgtgaccacccacatccgggagcgcgagggccgcactaaggagcaggtcatgcttctcatcgatatcgagctggcttacatgaacaccaaccatgaggacttcataggctttgccaatgctcagcagaggagcaaccagatgaacaagaagaagacttcagggaaccaggatgagattctggtcatccgcaagggctggctgactatcaataatattggcatcatgaaagggggctccaaggagtactggtttgtgctgactgctgagaatctgtcctggtacaaggatgatgaggagaaagagaagaaatacatgctgtctgtggacaacctcaagctgcgggacgtggagaagggctttatgtcgagcaagcatatctttgccctctttaacacggagcagaggaatgtctacaaggattatcggcagctggagctagcctgtgagacacaggaggaggtggacagctggaaggcctccttcctgagggctggcgtgtaccctgagcgtgttggggacaaagagaaagccagcgagaccgaggagaatggctccgacagcttcatgcattccatggacccacagctggaacggcaagtggagaccatccggaatcttgtggactcatacatggccattgtcaacaagaccgtgagggacctcatgcccaagaccatcatgcacctcatgattaacaataccaaggagttcatcttctcggagctgctggccaacctgtactcgtgtggggaccagaacacgctgatggaggagtcggcggagcaggcacagcggcgcgacgagatgctgcgcatgtaccacgcactgaaggaggcgctcagcatcatcggcgacatcaacacgaccaccgtcagcacgcccatgcccccgcccgtggacgactcctggctgcaggtgcagagcgtaccggccggacgcaggtcgcccacgtccagccccacgccgcagcgccgagcccccgccgtgcccccagcccggcccgggtcgcggggccctgctcctgggcctccgcctgctgggtccgccctggggggggcgccccccgtgccctccaggccgggggcttcccctgaccctttcggccctccccctcaggtgccctcgcgccccaaccgcgccccgcccggggtccccagccgatcgggtcaggcaagtccatcccgtcctgagagccccaggccccccttcgacctctaaacagatccctcctcttctcggagacctccctttccaagcctgcctggacggctgttctgtgacttgacagtggctcccccagccccaaagccagcccccttcatctgtgacttaatctgttgtagtggtgagctgatacattcaggtgtgaccgttggtgaa

SEQ ID NO: 128392 - DNA, 3835 bp, Homo sapiens
  Payload ID: 5135
  Gene Symbol: DNM1
  Gene Name: dynamin 1
  ENST ID: ENST00000628346
  CDS Start-End: 75-2669
cagcggcggagccggagtcggagccgggagcgctagcggcagccggatcgcagcctgcggggcccgccgcagccatgggcaaccgcggcatggaagatctcatcccgctggtcaaccggctgcaagacgccttctctgccatcggccagaacgcggacctcgacctgccgcagatcgctgtggtgggcggccagagcgccggcaagagctcggtgctcgagaatttcgtaggcagggacttcttgcctcgaggatctggcattgtcacccgacgtcccctggtcttgcagctggtcaatgcaaccacagaatatgccgagttcctgcactgcaagggaaagaaattcaccgacttcgaggaggtgcgccttgagatcgaggccgagaccgacagggtcaccggcaccaacaagggcatctcgccggtgcctatcaacctccgcgtctactcgccgcacgtgctgaacctgaccctggtggacctgcccggaatgaccaaggtcccggtgggggaccaacctcccgacatcgagttccagatccgagacatgcttatgcagtttgtcaccaaggagaactgcctcatcctggccgtgtcccccgccaactctgacctggccaattctgacgccctcaaggtcgccaaggaggtggacccccagggccagcgcaccatcggggtcatcaccaagctggacctgatggacgagggcacagatgcccgtgatgtgctggagaacaagctgctccccctgcgcagaggctacattggagtggtgaaccggagccagaaggacattgatggcaagaaggacattaccgccgccttggctgctgaacgaaagttcttcctctcccatccatcttatcgccacttggctgaccgtatgggcacgccctacctgcagaaggtcctcaatcagcaactgacgaaccacatccgggacacactgccggggctgcggaacaagctgcagagccagctactgtccattgagaaggaggtggaggaatacaagaacttccgccctgatgacccagctcgcaagaccaaggccctgctgcagatggtccagcagttcgccgtagactttgagaagcgcattgagggctcaggagatcagatcgacacctacgaactgtcagggggagcccgcattaaccgaatcttccacgagcgcttccctttcgagctggtcaagatggagtttgatgagaaggaactccgaagggagatcagctatgctatcaagaatatccatggcattagaacggggctgtttaccccagacatggcctttgagaccattgtgaaaaagcaggtgaagaagatccgagaaccgtgtctcaagtgtgtggacatggttatctcggagctaatcagcaccgttagacagtgcaccaagaagctccagcagtacccgcggctacgggaggagatggagcgcatcgtgaccacccacatccgggagcgcgagggccgcactaaggagcaggtcatgcttctcatcgatatcgagctggcttacatgaacaccaaccatgaggacttcataggctttgccaatgctcagcagaggagcaaccagatgaacaagaagaagacttcagggaaccaggtcatccgcaagggctggctgactatcaataatattggcatcatgaaagggggctccaaggagtactggtttgtgctgactgctgagaatctgtcctggtacaaggatgatgaggagaaagagaagaaatacatgctgtctgtggacaacctcaagctgcgggacgtggagaagggctttatgtcgagcaagcatatctttgccctctttaacacggagcagaggaatgtctacaaggattatcggcagctggagctagcctgtgagacacaggaggaggtggacagctggaaggcctccttcctgagggctggcgtgtaccctgagcgtgttggggacaaagagaaagccagcgagaccgaggagaatggctccgacagcttcatgcattccatggacccacagctggaacggcaagtggagaccatccggaatcttgtggactcatacatggccattgtcaacaagaccgtgagggacctcatgcccaagaccatcatgcacctcatgattaacaataccaaggagttcatcttctcggagctgctggccaacctgtactcgtgtggggaccagaacacgctgatggaggagtcggcggagcaggcacagcggcgcgacgagatgctgcgcatgtaccacgcactgaaggaggcgctcagcatcatcggcgacatcaacacgaccaccgtcagcacgcccatgcccccgcccgtggacgactcctggctgcaggtgcagagcgtaccggccggacgcaggtcgcccacgtccagccccacgccgcagcgccgagcccccgccgtgcccccagcccggcccgggtcgcggggccctgctcctgggcctccgcctgctgggtccgccctggggggggcgccccccgtgccctccaggccgggggcttcccctgaccctttcggccctccccctcaggtgccctcgcgccccaaccgcgccccgcccggggtccccagcaggaagggcccagcctcacctacgagacctgcagccccccgaccagctgaggctcccctcttagacttataagtctatggccactggcatccggctgcctgccctccctgcctcccccagggtcccttcagagggtcctgggttttctgaacacccagaggggcctccggcgctccctccagccatcccttttagtttcaccctcctggttcaagcagtgttctttctctatcaggcctggtggctgttgcatggggctccccaaggcaaggggtggccccaggccagtgggttggaagacagggtgaccagagaagagggaagcccgagggggccgagcatcagcctgaattgcgggtgccctgcctgggtgccgtgtgagaggccagcgtgtgtggggtggggagggccgccacagcccccaggcgctatctgtgaagctacggctcctccctccatcttcctcccctttcccttccagccccttttccaggaaccttgccacacccacacctgcagcctcccctccccggccctcccaccactgctgcggcgcggccggccccggccgtgtgctgcgcttgccttaccagctctctcctcgcttttctctcccgttttctctctgctttctctccaactgccagccgatcgggtcaggcaagtccatcccgtcctgagagccccaggccccccttcgacctctaaacagatccctcctcttctcggagacctccctttccaagcctgcctggacggctgttctgtgacttgacagtggctcccccagccccaaagccagcccccttcatctgtgacttaatctgttgtagtggtgagctgatacattcaggtgtgaccgttggtgaaaacttgtgccccttctgtggtatgcccttgccctgttctataaatatctataaatactcatatatatacacacctacacatggccaaccgcctcgcctctagcgctgggaatcagtcactgtgctatccttgtggagtcttgtggcccaactaccagagaacgctgtcccccgacatcccactccaaagtgtgccacctccagtgagcctccttgtcatgcccggcctgtggacagccagcccccgccatccctcccaccccctaccaagcatgggggtgctgtgcaggcagccgtgtggcctgacagtttctaccagtcctgctgtccctcggctgagaataaaacccatttctggatgatggggaa

SEQ ID NO: 128393 - DNA, 333 bp, Homo sapiens
  Payload ID: 5135
  Gene Symbol: DNM1
  Gene Name: dynamin 1
  ENST ID: ENST00000625457
  CDS Start-End: 1-161
ctcctgggcctccgcctgctgggtccgccctggggggggcgccccccgtgccctccaggccgggggcttcccctgaccctttcggccctccccctcaggtgccctcgcgccccaaccgcgccccgcccggggtccccagaatcactatcagtgacccctgaggagcgtcagccatgcaggaagggcccagcctcacctacgagacctgcagccccccgaccagctgaggctcccctcttagacttataagtctatggccactggcatccggctgcctgccctccctgcctcccccagggtcccttcagagggtcctgggttttctgaacaccc

SEQ ID NO: 128394 - DNA, 4734 bp, Homo sapiens
  Payload ID: 5135
  Gene Symbol: DNM1
  Gene Name: dynamin 1
  Uniprot ID: Q05193
  ENST ID: ENST00000627543
  CDS Start-End: 55-2610
gagccgggagcgctagcggcagccggatcgcagcctgcggggcccgccgcagccatgggcaaccgcggcatggaagatctcatcccgctggtcaaccggctgcaagacgccttctctgccatcggccagaacgcggacctcgacctgccgcagatcgctgtggtgggcggccagagcgccggcaagagctcggtgctcgagaatttcgtaggcagggacttcttgcctcgaggatctggcattgtcacccgacgtcccctggtcttgcagctggtcaatgcaaccacagaatatgccgagttcctgcactgcaagggaaagaaattcaccgacttcgaggaggtgcgccttgagatcgaggccgagaccgacagggtcaccggcaccaacaagggcatctcgccggtgcctatcaacctccgcgtctactcgccgcacgtgctgaacctgaccctggtggacctgcccggaatgaccaaggtcccggtgggggaccaacctcccgacatcgagttccagatccgagacatgcttatgcagtttgtcaccaaggagaactgcctcatcctggccgtgtcccccgccaactctgacctggccaattctgacgccctcaaggtcgccaaggaggtggacccccagggccagcgcaccatcggggtcatcaccaagctggacctgatggacgagggcacagatgcccgtgatgtgctggagaacaagctgctccccctgcgcagaggctacattggagtggtgaaccggagccagaaggacattgatggcaagaaggacattaccgccgccttggctgctgaacgaaagttcttcctctcccatccatcttatcgccacttggctgaccgtatgggcacgccctacctgcagaaggtcctcaatcagcaactgacgaaccacatccgggacacactgccggggctgcggaacaagctgcagagccagctactgtccattgagaaggaggtggaggaatacaagaacttccgccctgatgacccagctcgcaagaccaaggccctgctgcagatggtccagcagttcgccgtagactttgagaagcgcattgagggctcaggagatcagatcgacacctacgaactgtcagggggagcccgcattaaccgaatcttccacgagcgcttccctttcgagctggtcaagatggagtttgatgagaaggaactccgaagggagatcagctatgctatcaagaatatccatggcattagaacggggctgtttaccccagacatggcctttgagaccattgtgaaaaagcaggtgaagaagatccgagaaccgtgtctcaagtgtgtggacatggttatctcggagctaatcagcaccgttagacagtgcaccaagaagctccagcagtacccgcggctacgggaggagatggagcgcatcgtgaccacccacatccgggagcgcgagggccgcactaaggagcaggtcatgcttctcatcgatatcgagctggcttacatgaacaccaaccatgaggacttcataggctttgccaatgctcagcagaggagcaaccagatgaacaagaagaagacttcagggaaccaggatgagattctggtcatccgcaagggctggctgactatcaataatattggcatcatgaaagggggctccaaggagtactggtttgtgctgactgctgagaatctgtcctggtacaaggatgatgaggagaaagagaagaaatacatgctgtctgtggacaacctcaagctgcgggacgtggagaagggctttatgtcgagcaagcatatctttgccctctttaacacggagcagaggaatgtctacaaggattatcggcagctggagctagcctgtgagacacaggaggaggtggacagctggaaggcctccttcctgagggctggcgtgtaccctgagcgtgttggggacaaagagaaagccagcgagaccgaggagaatggctccgacagcttcatgcattccatggacccacagctggaacggcaagtggagaccatccggaatcttgtggactcatacatggccattgtcaacaagaccgtgagggacctcatgcccaagaccatcatgcacctcatgattaacaataccaaggagttcatcttctcggagctgctggccaacctgtactcgtgtggggaccagaacacgctgatggaggagtcggcggagcaggcacagcggcgcgacgagatgctgcgcatgtaccacgcactgaaggaggcgctcagcatcatcggcgacatcaacacgaccaccgtcagcacgcccatgcccccgcccgtggacgactcctggctgcaggtgcagagcgtaccggccggacgcaggtcgcccacgtccagccccacgccgcagcgccgagcccccgccgtgcccccagcccggcccgggtcgcggggccctgctcctgggcctccgcctgctgggtccgccctggggggggcgccccccgtgccctccaggccgggggcttcccctgaccctttcggccctccccctcaggtgccctcgcgccccaaccgcgccccgcccggggtccccagaatcactatcagtgacccctgaggagcgtcagccatggtaggtacatgcctcaccgcctgctgcatgaacggtgtgtctgccccgctgcactagctccacacggggcgcgcacctgggacctcagagccaggctccccgcccctcccttctgcagctgcagacttgctctttcctctttctgtccttgtgccgctggctctctcacctcccttccctgcgagcctcgggactcagtgccactgcccaaggcctccatggctgagcctggaggctcttggaacaggctccgcgcccaagctggcagacatgggtgctctctggagccgtcagagagggcagagagctcgtggtttatggtgtaaaggctgggagcttggagggggtcgtgtgtggggctggactctgaggcggccagaggcctaggaacgttatcctgggcacaccgtgcgtggtgtgcagtctgagtcatgctccctgggtagggcatccagctcccagcctgggagtgctgagagccaaatccaccgtagagcaggggtgagagtcagggtcccacctcctctatctgccggcaatccagtggtgacctagggtaaaagcttgagagtcccatacacacggtcatcccacgacatacctcacaggccaggcagggacacacagcccccttccctccctcccaggtaccgtcatagctgctagtgtgactgaaggcagtgtccctggccccagctgaagcaccgtagccagccagcgggctcacgcaccttggcctgttgctcctagggtcacttgtgccattcagccaaggggacgaccgtgcctgctggcccagctgagctccgcccagtgagcccaccccccattctcctgccactgactctcgctcttctgcttttcccagcaggaagggcccagcctcacctacgagacctgcagccccccgaccagctgaggctcccctcttagacttataagtctatggccactggcatccggctgcctgccctccctgcctcccccagggtcccttcagagggtcctgggttttctgaacacccagaggggcctccggcgctccctccagccatcccttttagtttcaccctcctggttcaagcagtgttctttctctatcaggcctggtggctgttgcatggggctccccaaggcaaggggtggccccaggccagtgggttggaagacagggtgaccagagaagagggaagcccgagggggccgagcatcagcctgaattgcgggtgccctgcctgggtgccgtgtgagaggccagcgtgtgtggggtggggagggccgccacagcccccaggcgctatctgtgaagctacggctcctccctccatcttcctcccctttcccttccagccccttttccaggaaccttgccacacccacacctgcagcctcccctccccggccctcccaccactgctgcggcgcggccggccccggccgtgtgctgcgcttgccttaccagctctctcctcgcttttctctcccgttttctctctgctttctctccaactgccagccgatcgggtcaggcaagtccatcccgtcctgagagccccaggccccccttcgacctctaaacagatccctcctcttctcggagacctccctttccaagcctgcctggacggctgttctgtgacttgacagtggctcccccagccccaaagccagcccccttcatctgtgacttaatctgttgtagtggtgagctgatacattcaggtgtgaccgttggtgaaaacttgtgccccttctgtggtatgcccttgccctgttctataaatatctataaatactcatatatatacacacctacacatggccaaccgcctcgcctctagcgctgggaatcagtcactgtgctatccttgtggagtcttgtggcccaactaccagagaacgctgtcccccgacatcccactccaaagtgtgccacctccagtgagcctccttgtcatgcccggcctgtggacagccagcccccgccatccctcccaccccctaccaagcatgggggtgctgtgcaggcagccgtgtggcctgacagtttctaccagtcctgctgtccctcggctgagaataaaacccatttctggatgatggggaatg

SEQ ID NO: 128395 - DNA, 3248 bp, Homo sapiens
  Payload ID: 5135
  Gene Symbol: DNM1
  Gene Name: dynamin 1
  ENST ID: ENST00000634267
  CDS Start-End: 120-2690
gaggggcgggggccccgcggcgcaggcagtctgggcgcgcggctgcagcggcggagccggagtcggagccgggagcgctagcggcagccggatcgcagcctgcggggcccgccgcagccatgggcaaccgcggcatggaagatctcatcccgctggtcaaccggctgcaagacgccttctctgccatcggccagaacgcggacctcgacctgccgcagatcgctgtggtgggcggccagagcgccggcaagagctcggtgctcgagaatttcgtaggcagggacttcttgcctcgaggatctggcattgtcacccgacgtcccctggtcttgcagctggtcaatgcaaccacagaatatgccgagttcctgcactgcaagggaaagaaattcaccgacttcgaggaggtgcgccttgagatcgaggccgagaccgacagggtcaccggcaccaacaagggcatctcgccggtgcctatcaacctccgcgtctactcgccgcacgtgctgaacctgaccctggtggacctgcccggaatgaccaaggtcccggtgggggaccaacctcccgacatcgagttccagatccgagacatgcttatgcagtttgtcaccaaggagaactgcctcatcctggccgtgtcccccgccaactctgacctggccaattctgacgccctcaaggtcgccaaggaggtggacccccagggccagcgcaccatcggggtcatcaccaagctggacctgatggacgagggcacagatgcccgtgatgtgctggagaacaagctgctccccctgcgcagaggctacattggagtggtgaaccggagccagaaggacattgatggcaagaaggacattaccgccgccttggctgctgaacgaaagttcttcctctcccatccatcttatcgccacttggctgaccgtatgggcacgccctacctgcagaaggtcctcaatcagcaactgacgaaccacatccgggacacactgccggggctgcggaacaagctgcagagccagctactgtccattgagaaggaggtggaggaatacaagaacttccgccctgatgacccagctcgcaagaccaaggccctgctgcagatggtccagcagttcgccgtagactttgagaagcgcattgagggctcaggagatcagatcgacacctacgaactgtcagggggagcccgcattaaccgaatcttccacgagcgcttccctttcgagctggtcaagatggagtttgatgagaaggaactccgaagggagatcagctatgctatcaagaatatccatggcattagaacggggctgtttaccccagacatggcctttgagaccattgtgaaaaagcaggtgaagaagatccgagaaccgtgtctcaagtgtgtggacatggttatctcggagctaatcagcaccgttagacagtgcaccaagaagctccagcagtacccgcggctacgggaggagatggagcgcatcgtgaccacccacatccgggagcgcgagggccgcactaaggagcaggtcatgcttctcatcgatatcgagctggcttacatgaacaccaaccatgaggacttcataggctttgccaatgctcagcagaggagcaaccagatgaacaagaagaagacttcagggaaccaggatgagattctggtcatccgcaagggctggctgactatcaataatattggcatcatgaaagggggctccaaggagtactggtttgtgctgactgctgagaatctgtcctggtacaaggatgatgaggagaaagagaagaaatacatgctgtctgtggacaacctcaagctgcgggacgtggagaagggctttatgtcgagcaagcatatctttgccctctttaacacggagcagaggaatgtctacaaggattatcggcagctggagctagcctgtgagacacaggaggaggtggacagctggaaggcctccttcctgagggctggcgtgtaccctgagcgtgttggggacaaagagaaagccagcgagaccgaggagaatggctccgacagcttcatgcattccatggacccacagctggaacggcaagtggagaccatccggaatcttgtggactcatacatggccattgtcaacaagaccgtgagggacctcatgcccaagaccatcatgcacctcatgattaacaataccaaggagttcatcttctcggagctgctggccaacctgtactcgtgtggggaccagaacacgctgatggaggagtcggcggagcaggcacagcggcgcgacgagatgctgcgcatgtaccacgcactgaaggaggcgctcagcatcatcggcgacatcaacacgaccaccgtcagcacgcccatgcccccgcccgtggacgactcctggctgcaggtgcagagcgtaccggccggacgcaggtcgcccacgtccagccccacgccgcagcgccgagcccccgccgtgcccccagcccggcccgggtcgcggggccctgctcctgggcctccgcctgctgggtccgccctggggggggcgccccccgtgccctccaggccgggggcttcccctgaccctttcggccctccccctcaggtgccctcgcgccccaaccgcgccccgcccggggtccccagccagccgatcgggtcaggcaagtccatcccgtcctgagagccccaggccccccttcgacctctaaacagatccctcctcttctcggagacctccctttccaagcctgcctggacggctgttctgtgacttgacagtggctcccccagccccaaagccagcccccttcatctgtgacttaatctgttgtagtggtgagctgatacattcaggtgtgaccgttggtgaaaacttgtgccccttctgtggtatgcccttgccctgttctataaatatctataaatactcatatatatacacacctacacatggccaaccgcctcgcctctagcgctgggaatcagtcactgtgctatccttgtggagtcttgtggcccaactaccagagaacgctgtcccccgacatcccactccaaagtgtgccacctccagtgagcctccttgtcatgcccggcctgtggacagccagcccccgccatccctcccaccccctaccaagcatgggggtgctgtgcaggcagccgtgtggcctgacagtttctaccagtcctgctgtccctcggctgagaataaaacccatttctggatgatggggaa

SEQ ID NO: 128396 - DNA, 3101 bp, Homo sapiens
  Payload ID: 5136
  Gene Symbol: DNM1L
  Gene Name: dynamin 1-like
  Uniprot ID: O00429
  ENST ID: ENST00000266481
  CDS Start-End: 62-2161
gggccccggccccattcattgccgtggccggcgggcactggggccccgtgttttcagagtcatggaggcgctaattcctgtcataaacaagctccaggacgtcttcaacacggtgggcgccgacatcatccagctgcctcaaatcgtcgtagtgggaacgcagagcagcggaaagagctcagtgctagaaagcctggtggggagggacctgcttcccagaggtactggaattgtcacccggagacctctcattctgcaactggtccatgtttcacaagaagataaacggaaaacaacaggagaagaaaatggggtggaagcagaagaatggggtaaatttcttcacaccaaaaataagctttacacggattttgatgaaattcgacaagaaattgaaaatgaaacagaaagaatttcaggaaataataagggagtaagccctgaaccaattcatcttaagattttttcacccaacgttgtcaatttgacacttgtggatttgccaggaatgaccaaggtgcctgtaggtgatcaacctaaggatattgagcttcaaatcagagagctcattcttcggttcatcagtaatcctaattccattatcctcgctgtcactgctgctaatacagatatggcaacatcagaggcacttaaaatttcaagagaggtagatccagatggtcgcagaaccctagctgtaatcactaaacttgatctcatggatgcgggtactgatgccatggatgtattgatgggaagggttattccagtcaaacttggaataattggagtagttaacaggagccagctagatattaacaacaagaagagtgtaactgattcaatccgtgatgagtatgcttttcttcaaaagaaatatccatctctggccaatagaaatggaacaaagtatcttgctaggactctaaacaggttactgatgcatcacatcagagattgtttaccagagttgaaaacaagaataaatgttctagctgctcagtatcagtctcttctaaatagctacggtgaacccgtggatgataaaagtgctactttactccaacttattaccaaatttgccacagaatattgtaacactattgaaggaactgcaaaatatattgaaacttcggagctatgcggtggtgctagaatttgttatattttccatgagacttttgggcgaaccttagaatctgttgatccacttggtggccttaacactattgacattttgactgccattagaaatgctactggtcctcgtcctgctttatttgtgcctgaggtttcatttgagttactggtgaagcggcaaatcaaacgtctagaagagcccagcctccgctgtgtggaactggttcatgaggaaatgcaaaggatcattcagcactgtagcaattacagtacacaggaattgttacgatttcctaaacttcatgatgccatagttgaagtggtgacttgtcttcttcgtaaaaggttgcctgttacaaatgaaatggtccataacttagtggcaattgaactggcttatatcaacacaaaacatccagactttgctgatgcttgtgggctaatgaacaataatatagaggaacaaaggagaaacaggctagccagagaattaccttcagctgtatcacgagacaaggttgcatctggaggtggtggggttggagatggtgttcaagaaccaaccacaggcaactggagaggaatgctgaaaacttcaaaagctgaagagttattagcagaagaaaaatcaaaacccattccaattatgccagccagtccacaaaaaggtcatgccgtgaacctgctagatgtgccagttcctgttgcacgaaaactatctgctcgggaacagcgagattgtgaggttattgaacgactcattaaatcatattttctcattgtcagaaagaatattcaagacagtgtgccaaaggcagtaatgcattttttggttaatcatgtgaaagacactcttcagagtgagctagtaggccagctgtataaatcatccttattggatgatcttctgacagaatctgaggacatggcacagcgcaggaaagaagcagctgatatgctaaaggcattacaaggagccagtcaaattattgctgaaatccgggagactcatctttggtgaagagaactatgtaatactgagactttgttgactcaaaacttgctagttactgcctacctgagtagaatcttatttatgaactcctgtgtattgcaatggtatgaatctgctcatgtggagactggctataaactgaaaagtgtattccaaattgcagaacacatcacacatttaatccaaataataaatggctgtttctaaagtttcccagtatatataaaatacatcaagtctgtcttgtgacagtttcatctgaacttaacttaaaaacaactgttaatgttctagttgtgcaaagcagtttgcctgtggataagatgacctgtgtaataatctttgttagtagtcttaaagctgctgccatagtcctccaagaagaaagcaccaagacaacatttcatatgactataatgcatgtactatataagctgatctggctttgaaagatgtgagttggcaagttcctcacatagagtcattgtattccacctgtccttcaatttagttttttctgagcttctttgcagcctttgatgtgtttttaagaaagctgaatgcacaagaggatctgtgacactgacatggctgtggtgtgcatactgtgtagttacatagcccttccaattctgggtccatttgcactagcaaattaaaatatgctttgattcatacttaaacctgaaagcaggaatgcctacattaattcctacattaaaaacagccatctacccttgattatctagaaagacttggtaatgatggtcagttccttttagatttcagaaaatcaaatgatgacctaaatttcccttaatttgcaaatacagtagtaattaaggtacatctctaaagtggagcacttacaccaggctctaagattcactttgaggtggaacttaaaaccagtgtactgtatgtatgcattggtaatagctacttt

SEQ ID NO: 128397 - DNA, 3229 bp, Homo sapiens
  Payload ID: 5136
  Gene Symbol: DNM1L
  Gene Name: dynamin 1-like
  ENST ID: ENST00000358214
  CDS Start-End: 73-2211
aggcgaactgtgggccccggccccattcattgccgtggccggcgggcactggggccccgtgttttcagagtcatggaggcgctaattcctgtcataaacaagctccaggacgtcttcaacacggtgggcgccgacatcatccagctgcctcaaatcgtcgtagtgggaacgcagagcagcggaaagagctcagtgctagaaagcctggtggggagggacctgcttcccagaggtactggaattgtcacccggagacctctcattctgcaactggtccatgtttcacaagaagataaacggaaaacaacaggagaagaaaatgaccctgctacatggaaaaactcaagacacctttctaaaggggtggaagcagaagaatggggtaaatttcttcacaccaaaaataagctttacacggattttgatgaaattcgacaagaaattgaaaatgaaacagaaagaatttcaggaaataataagggagtaagccctgaaccaattcatcttaagattttttcacccaacgttgtcaatttgacacttgtggatttgccaggaatgaccaaggtgcctgtaggtgatcaacctaaggatattgagcttcaaatcagagagctcattcttcggttcatcagtaatcctaattccattatcctcgctgtcactgctgctaatacagatatggcaacatcagaggcacttaaaatttcaagagaggtagatccagatggtcgcagaaccctagctgtaatcactaaacttgatctcatggatgcgggtactgatgccatggatgtattgatgggaagggttattccagtcaaacttggaataattggagtagttaacaggagccagctagatattaacaacaagaagagtgtaactgattcaatccgtgatgagtatgcttttcttcaaaagaaatatccatctctggccaatagaaatggaacaaagtatcttgctaggactctaaacaggttactgatgcatcacatcagagattgtttaccagagttgaaaacaagaataaatgttctagctgctcagtatcagtctcttctaaatagctacggtgaacccgtggatgataaaagtgctactttactccaacttattaccaaatttgccacagaatattgtaacactattgaaggaactgcaaaatatattgaaacttcggagctatgcggtggtgctagaatttgttatattttccatgagacttttgggcgaaccttagaatctgttgatccacttggtggccttaacactattgacattttgactgccattagaaatgctactggtcctcgtcctgctttatttgtgcctgaggtttcatttgagttactggtgaagcggcaaatcaaacgtctagaagagcccagcctccgctgtgtggaactggttcatgaggaaatgcaaaggatcattcagcactgtagcaattacagtacacaggaattgttacgatttcctaaacttcatgatgccatagttgaagtggtgacttgtcttcttcgtaaaaggttgcctgttacaaatgaaatggtccataacttagtggcaattgaactggcttatatcaacacaaaacatccagactttgctgatgcttgtgggctaatgaacaataatatagaggaacaaaggagaaacaggctagccagagaattaccttcagctgtatcacgagacaaggttgcatctggaggtggtggggttggagatggtgttcaagaaccaaccacaggcaactggagaggaatgctgaaaacttcaaaagctgaagagttattagcagaagaaaaatcaaaacccattccaattatgccagccagtccacaaaaaggtcatgccgtgaacctgctagatgtgccagttcctgttgcacgaaaactatctgctcgggaacagcgagattgtgaggttattgaacgactcattaaatcatattttctcattgtcagaaagaatattcaagacagtgtgccaaaggcagtaatgcattttttggttaatcatgtgaaagacactcttcagagtgagctagtaggccagctgtataaatcatccttattggatgatcttctgacagaatctgaggacatggcacagcgcaggaaagaagcagctgatatgctaaaggcattacaaggagccagtcaaattattgctgaaatccgggagactcatctttggtgaagagaactatgtaatactgagactttgttgactcaaaacttgctagttactgcctacctgagtagaatcttatttatgaactcctgtgtattgcaatggtatgaatctgctcatgtggagactggctataaactgaaaagtgtattccaaattgcagaacacatcacacatttaatccaaataataaatggctgtttctaaagtttcccagtatatataaaatacatcaagtctgtcttgtgacagtttcatctgaacttaacttaaaaacaactgttaatgttctagttgtgcaaagcagtttgcctgtggataagatgacctgtgtaataatctttgttagtagtcttaaagctgctgccatagtcctccaagaagaaagcaccaagacaacatttcatatgactataatgcatgtactatataagctgatctggctttgaaagatgtgagttggcaagttcctcacatagagtcattgtattccacctgtccttcaatttagttttttctgagcttctttgcagcctttgatgtgtttttaagaaagctgaatgcacaagaggatctgtgacactgacatggctgtggtgtgcatactgtgtagttacatagcccttccaattctgggtccatttgcactagcaaattaaaatatgctttgattcatacttaaacctgaaagcaggaatgcctacattaattcctacattaaaaacagccatctacccttgattatctagaaagacttggtaatgatggtcagttccttttagatttcagaaaatcaaatgatgacctaaatttcccttaatttgcaaatacagtagtaattaaggtacatctctaaagtggagcacttacaccaggctctaagattcactttgaggtggaacttaaaaccagtgtactgtatgtatgcattggtaatagctacttttgcttcatagcttcataccaacaaaatatatttattagaatagtatgaaagtactggaggagctgaaagaaaaacacc

SEQ ID NO: 128398 - DNA, 4397 bp, Homo sapiens
  Payload ID: 5136
  Gene Symbol: DNM1L
  Gene Name: dynamin 1-like
  Uniprot ID: O00429
  ENST ID: ENST00000381000
  CDS Start-End: 42-2258
gccgtggccggcgggcactggggccccgtgttttcagagtcatggaggcgctaattcctgtcataaacaagctccaggacgtcttcaacacggtgggcgccgacatcatccagctgcctcaaatcgtcgtagtgggaacgcagagcagcggaaagagctcagtgctagaaagcctggtggggagggacctgcttcccagaggtactggaattgtcacccggagacctctcattctgcaactggtccatgtttcacaagaagataaacggaaaacaacaggagaagaaaatgaccctgctacatggaaaaactcaagacacctttctaaaggggtggaagcagaagaatggggtaaatttcttcacaccaaaaataagctttacacggattttgatgaaattcgacaagaaattgaaaatgaaacagaaagaatttcaggaaataataagggagtaagccctgaaccaattcatcttaagattttttcacccaacgttgtcaatttgacacttgtggatttgccaggaatgaccaaggtgcctgtaggtgatcaacctaaggatattgagcttcaaatcagagagctcattcttcggttcatcagtaatcctaattccattatcctcgctgtcactgctgctaatacagatatggcaacatcagaggcacttaaaatttcaagagaggtagatccagatggtcgcagaaccctagctgtaatcactaaacttgatctcatggatgcgggtactgatgccatggatgtattgatgggaagggttattccagtcaaacttggaataattggagtagttaacaggagccagctagatattaacaacaagaagagtgtaactgattcaatccgtgatgagtatgcttttcttcaaaagaaatatccatctctggccaatagaaatggaacaaagtatcttgctaggactctaaacaggttactgatgcatcacatcagagattgtttaccagagttgaaaacaagaataaatgttctagctgctcagtatcagtctcttctaaatagctacggtgaacccgtggatgataaaagtgctactttactccaacttattaccaaatttgccacagaatattgtaacactattgaaggaactgcaaaatatattgaaacttcggagctatgcggtggtgctagaatttgttatattttccatgagacttttgggcgaaccttagaatctgttgatccacttggtggccttaacactattgacattttgactgccattagaaatgctactggtcctcgtcctgctttatttgtgcctgaggtttcatttgagttactggtgaagcggcaaatcaaacgtctagaagagcccagcctccgctgtgtggaactggttcatgaggaaatgcaaaggatcattcagcactgtagcaattacagtacacaggaattgttacgatttcctaaacttcatgatgccatagttgaagtggtgacttgtcttcttcgtaaaaggttgcctgttacaaatgaaatggtccataacttagtggcaattgaactggcttatatcaacacaaaacatccagactttgctgatgcttgtgggctaatgaacaataatatagaggaacaaaggagaaacaggctagccagagaattaccttcagctgtatcacgagacaagtcttctaaagttccaagtgctttggcacctgcctcccaggagccctcccccgctgcttctgctgaggctgatggcaaggttgcatctggaggtggtggggttggagatggtgttcaagaaccaaccacaggcaactggagaggaatgctgaaaacttcaaaagctgaagagttattagcagaagaaaaatcaaaacccattccaattatgccagccagtccacaaaaaggtcatgccgtgaacctgctagatgtgccagttcctgttgcacgaaaactatctgctcgggaacagcgagattgtgaggttattgaacgactcattaaatcatattttctcattgtcagaaagaatattcaagacagtgtgccaaaggcagtaatgcattttttggttaatcatgtgaaagacactcttcagagtgagctagtaggccagctgtataaatcatccttattggatgatcttctgacagaatctgaggacatggcacagcgcaggaaagaagcagctgatatgctaaaggcattacaaggagccagtcaaattattgctgaaatccgggagactcatctttggtgaagagaactatgtaatactgagactttgttgactcaaaacttgctagttactgcctacctgagtagaatcttatttatgaactcctgtgtattgcaatggtatgaatctgctcatgtggagactggctataaactgaaaagtgtattccaaattgcagaacacatcacacatttaatccaaataataaatggctgtttctaaagtttcccagtatatataaaatacatcaagtctgtcttgtgacagtttcatctgaacttaacttaaaaacaactgttaatgttctagttgtgcaaagcagtttgcctgtggataagatgacctgtgtaataatctttgttagtagtcttaaagctgctgccatagtcctccaagaagaaagcaccaagacaacatttcatatgactataatgcatgtactatataagctgatctggctttgaaagatgtgagttggcaagttcctcacatagagtcattgtattccacctgtccttcaatttagttttttctgagcttctttgcagcctttgatgtgtttttaagaaagctgaatgcacaagaggatctgtgacactgacatggctgtggtgtgcatactgtgtagttacatagcccttccaattctgggtccatttgcactagcaaattaaaatatgctttgattcatacttaaacctgaaagcaggaatgcctacattaattcctacattaaaaacagccatctacccttgattatctagaaagacttggtaatgatggtcagttccttttagatttcagaaaatcaaatgatgacctaaatttcccttaatttgcaaatacagtagtaattaaggtacatctctaaagtggagcacttacaccaggctctaagattcactttgaggtggaacttaaaaccagtgtactgtatgtatgcattggtaatagctacttttgcttcatagcttcataccaacaaaatatatttattagaatagtatgaaagtactggaggagctgaaagaaaaacacccaaggctgggcgtggtggcacacgcctgtaatcccagcactttgggaggccgaggcaggtggatcacctgaggttgggagttggagaccagcttgaccaacatggagaaaccccgtctctactaaaaatacaaaattggccgggcgtggtggcgcatgcctgtaatcccagctactcgggagggtgaggcaggagaattgcttgaccctgggaggtggaggttgtggtgagctaagatcgtgccattgcactccagccttggcaacaagagcgaaactccgtctcaaaaaaaaaaaataaaacaacacccagatagatacacatactccttcagacttacagacctaagctgcatttatggggtagtgatgaggtttagaacatatacatattttgttaaaattccccagatgattcttggtatgaacgactatattataaattttaagatgtacttagaaatccttaagacatctagccccgtctctaatagacaacacatttatattgcagatattacttttttttcagtttatgaccaggtatttatgaaggactattggcagggaaaatatgaatatgttaactttagcttatggcatcaatttactaaggaacaacaggctcaccaactgatgtcaaacataaaaacccccacatcagtctgatacgatatggtactactttgaatctgttactagtaccatcttgacagaggatacatgctcccaaaacgtttgttaccacacttaaaaatcactgccatcattaagcatcagtttcaaaattatagccattcatgatttactttttccagatgactatcattattctagtcctttgaatttgtaaggggaaaaaaaacaaaaacaaaaacttacgatgcacttttctccagcacatcagatttcaaattgaaaattaaagacatgctatggtaatgcacttgctagtactacacactttgtacaacaaaaaacagaggcaagaaacaacggaaagagaaaagccttcctttgttggcccttaaactgagtcaagatctgaaatgtagagatgatctctgacgatacctgtatgttcttattgtgtaaataaaattgctggtatgaaatgacact

SEQ ID NO: 128399 - DNA, 1008 bp, Homo sapiens
  Payload ID: 5136
  Gene Symbol: DNM1L
  Gene Name: dynamin 1-like
  ENST ID: ENST00000434676
  CDS Start-End: 45-515
attgccgtggccggcgggcactggggccccgtgttttcagagtcatggaggcgctaattcctgtcataaacaagctccaggacgtcttcaacacggtgggcgccgacatcatccagctgcctcaaatcgtcgtagtgggaacgcagagcagcggaaagagctcagtgctagaaagcctggtggggagggacctgcttcccagaggtactggaattgtcacccggagacctctcattctgcaactggtccatgtttcacaagaagataaacggaaaacaacaggagaagaaaatggggtggaagcagaagaatggggtaaatttcttcacaccaaaaataagctttacacggattttgatgaaattcgacaagaaattgaaaatgaaacagaaagaatttcaggaaataataagggagtaagccctgaaccaattcatcttaagattttttcacccaacgttgtcaatttgacacttgtggatttgccaggaatgaccaaggtcgcagaaccctagctgtaatcactaaacttgatctcatggatgcgggtactgatgccatggatgtattgatgggaagggttattccagtcaaacttggaataattggagtagttaacaggagccagctagatattaacaacaagaagagtgtaactgattcaatccgtgatgagtatgcttttcttcaaaagaaatatccatctctggccaatagaaatggaacaaagtatcttgctaggactctaaacaggttactgatgcatcacatcagagattgtttaccagagttgaaaacaagaataaatgttctagctgctcagtatcagtctcttctaaatagctacggtgaacccgtggatgataaaagtgctactttactccaacttattaccaaatttgccacagaatattgtaacactattgaaggaactgcaaaatatattgaaacttcggagctatgcggtggtgctagaatttgttatattttccatgagacttttgggcg

SEQ ID NO: 128400 - DNA, 1064 bp, Homo sapiens
  Payload ID: 5136
  Gene Symbol: DNM1L
  Gene Name: dynamin 1-like
  ENST ID: ENST00000413295
  CDS Start-End: 45-587
attgccgtggccggcgggcactggggccccgtgttttcagagtcatggaggcgctaattcctgtcataaacaagctccaggacgtcttcaacacggtgggcgccgacatcatccagctgcctcaaatcgtcgtagtgggaacgcagagcagcggaaagagctcagtgctagaaagcctggtggggagggacctgcttcccagaggtactggaattgtcacccggagacctctcattctgcaactggtccatgtttcacaagaagataaacggaaaacaacaggagaagaaaatggggtggaagcagaagaatggggtaaatttcttcacaccaaaaataagctttacacggattttgatgaaattcgacaagaaattgaaaatgaaacagaaagaatttcaggaaataataaggtgcctgtaggtgatcaacctaaggatattgagcttcaaatcagagagctcattcttcggttcatcagtaatcctaattccattatcctcgctgtcactgctgctaatacagatatggcaacatcagaggcacttaaaatttcaagagaggtagatccagatggagccagctagatattaacaacaagaagagtgtaactgattcaatccgtgatgagtatgcttttcttcaaaagaaatatccatctctggccaatagaaatggaacaaagtatcttgctaggactctaaacaggttactgatgcatcacatcagagattgtttaccagagttgaaaacaagaataaatgttctagctgctcagtatcagtctcttctaaatagctacggtgaacccgtggatgataaaagtgctactttactccaacttattaccaaatttgccacagaatattgtaacactattgaaggaactgcaaaatatattgaaacttcggagctatgcggtggtgctagaatttgttatattttccatgagacttttgggcgaaccttagaatctgttgatccacttggtggccttaacactattgacattttgactgccattagaaatgctactggtcctcgtcctgctttatttgtgcctg

SEQ ID NO: 128401 - DNA, 4211 bp, Homo sapiens
  Payload ID: 5136
  Gene Symbol: DNM1L
  Gene Name: dynamin 1-like
  Uniprot ID: O00429
  ENST ID: ENST00000414834
  CDS Start-End: 370-1971
agcgcatggcctgccgggagggggcaggtagccggcgggcccggtccaatgggtgccggcttccgaggagagggcggaggagaggaggaaggaggcgaactgtgggccccggccccattcattgccgtggccggcgggcactggggccccgtgttttcagagtcatggaggcgctaattcctgtcataaacaagctccaggacgtcttcaacacggtgggcgccgacatcatccagctgcctcaaatcgtcgtagtgggaacgcagagcagcggaaagagctcagtgctagaaagcctggtggggagggacctgcttcccagaggtactggaattgtcacccggagacctctcattctgcaactggtccatgtttcacaagaagataaacggaaaacaacaggagaagaaaatgaccctgctacatggaaaaactcaagacacctttctaaaggggtggaagcagaagaatggggtaaatttcttcacaccaaaaataaggagccagctagatattaacaacaagaagagtgtaactgattcaatccgtgatgagtatgcttttcttcaaaagaaatatccatctctggccaatagaaatggaacaaagtatcttgctaggactctaaacaggttactgatgcatcacatcagagattgtttaccagagttgaaaacaagaataaatgttctagctgctcagtatcagtctcttctaaatagctacggtgaacccgtggatgataaaagtgctactttactccaacttattaccaaatttgccacagaatattgtaacactattgaaggaactgcaaaatatattgaaacttcggagctatgcggtggtgctagaatttgttatattttccatgagacttttgggcgaaccttagaatctgttgatccacttggtggccttaacactattgacattttgactgccattagaaatgctactggtcctcgtcctgctttatttgtgcctgaggtttcatttgagttactggtgaagcggcaaatcaaacgtctagaagagcccagcctccgctgtgtggaactggttcatgaggaaatgcaaaggatcattcagcactgtagcaattacagtacacaggaattgttacgatttcctaaacttcatgatgccatagttgaagtggtgacttgtcttcttcgtaaaaggttgcctgttacaaatgaaatggtccataacttagtggcaattgaactggcttatatcaacacaaaacatccagactttgctgatgcttgtgggctaatgaacaataatatagaggaacaaaggagaaacaggctagccagagaattaccttcagctgtatcacgagacaagtcttctaaagttccaagtgctttggcacctgcctcccaggagccctcccccgctgcttctgctgaggctgatggcaagttaattcaggacagcagaagagaaactaaaaatgttgcatctggaggtggtggggttggagatggtgttcaagaaccaaccacaggcaactggagaggaatgctgaaaacttcaaaagctgaagagttattagcagaagaaaaatcaaaacccattccaattatgccagccagtccacaaaaaggtcatgccgtgaacctgctagatgtgccagttcctgttgcacgaaaactatctgctcgggaacagcgagattgtgaggttattgaacgactcattaaatcatattttctcattgtcagaaagaatattcaagacagtgtgccaaaggcagtaatgcattttttggttaatcatgtgaaagacactcttcagagtgagctagtaggccagctgtataaatcatccttattggatgatcttctgacagaatctgaggacatggcacagcgcaggaaagaagcagctgatatgctaaaggcattacaaggagccagtcaaattattgctgaaatccgggagactcatctttggtgaagagaactatgtaatactgagactttgttgactcaaaacttgctagttactgcctacctgagtagaatcttatttatgaactcctgtgtattgcaatggtatgaatctgctcatgtggagactggctataaactgaaaagtgtattccaaattgcagaacacatcacacatttaatccaaataataaatggctgtttctaaagtttcccagtatatataaaatacatcaagtctgtcttgtgacagtttcatctgaacttaacttaaaaacaactgttaatgttctagttgtgcaaagcagtttgcctgtggataagatgacctgtgtaataatctttgttagtagtcttaaagctgctgccatagtcctccaagaagaaagcaccaagacaacatttcatatgactataatgcatgtactatataagctgatctggctttgaaagatgtgagttggcaagttcctcacatagagtcattgtattccacctgtccttcaatttagttttttctgagcttctttgcagcctttgatgtgtttttaagaaagctgaatgcacaagaggatctgtgacactgacatggctgtggtgtgcatactgtgtagttacatagcccttccaattctgggtccatttgcactagcaaattaaaatatgctttgattcatacttaaacctgaaagcaggaatgcctacattaattcctacattaaaaacagccatctacccttgattatctagaaagacttggtaatgatggtcagttccttttagatttcagaaaatcaaatgatgacctaaatttcccttaatttgcaaatacagtagtaattaaggtacatctctaaagtggagcacttacaccaggctctaagattcactttgaggtggaacttaaaaccagtgtactgtatgtatgcattggtaatagctacttttgcttcatagcttcataccaacaaaatatatttattagaatagtatgaaagtactggaggagctgaaagaaaaacacccaaggctgggcgtggtggcacacgcctgtaatcccagcactttgggaggccgaggcaggtggatcacctgaggttgggagttggagaccagcttgaccaacatggagaaaccccgtctctactaaaaatacaaaattggccgggcgtggtggcgcatgcctgtaatcccagctactcgggagggtgaggcaggagaattgcttgaccctgggaggtggaggttgtggtgagctaagatcgtgccattgcactccagccttggcaacaagagcgaaactccgtctcaaaaaaaaaaaataaaacaacacccagatagatacacatactccttcagacttacagacctaagctgcatttatggggtagtgatgaggtttagaacatatacatattttgttaaaattccccagatgattcttggtatgaacgactatattataaattttaagatgtacttagaaatccttaagacatctagccccgtctctaatagacaacacatttatattgcagatattacttttttttcagtttatgaccaggtatttatgaaggactattggcagggaaaatatgaatatgttaactttagcttatggcatcaatttactaaggaacaacaggctcaccaactgatgtcaaacataaaaacccccacatcagtctgatacgatatggtactactttgaatctgttactagtaccatcttgacagaggatacatgctcccaaaacgtttgttaccacacttaaaaatcactgccatcattaagcatcagtttcaaaattatagccattcatgatttactttttccagatgactatcattattctagtcctttgaatttgtaaggggaaaaaaaacaaaaacaaaaacttacgatgcacttttctccagcacatcagatttcaaattgaaaattaaagacatgctatggtaatgcacttgctagtactacacactttgtacaacaaaaaacagaggcaagaaacaacggaaagagaaaagccttcctttgttggcccttaaactgagtcaagatctgaaatgtagagatgatctctgacgatacctgtatgttcttattgtgtaaataaaattgctggtatgaaatgacactaaagtttgtcaaaaaatgaattcttaacttttctcccagagaaagggagacaaaaggagctttttaatacctaatctactttggaacataaccgtatagag

SEQ ID NO: 128402 - DNA, 4439 bp, Homo sapiens
  Payload ID: 5136
  Gene Symbol: DNM1L
  Gene Name: dynamin 1-like
  Uniprot ID: O00429
  ENST ID: ENST00000452533
  CDS Start-End: 165-2297
agcgcatggcctgccgggagggggcaggtagccggcgggcccggtccaatgggtgccggcttccgaggagagggcggaggagaggaggaaggaggcgaactgtgggccccggccccattcattgccgtggccggcgggcactggggccccgtgttttcagagtcatggaggcgctaattcctgtcataaacaagctccaggacgtcttcaacacggtgggcgccgacatcatccagctgcctcaaatcgtcgtagtgggaacgcagagcagcggaaagagctcagtgctagaaagcctggtggggagggacctgcttcccagaggtactggaattgtcacccggagacctctcattctgcaactggtccatgtttcacaagaagataaacggaaaacaacaggagaagaaaatggggtggaagcagaagaatggggtaaatttcttcacaccaaaaataagctttacacggattttgatgaaattcgacaagaaattgaaaatgaaacagaaagaatttcaggaaataataagggagtaagccctgaaccaattcatcttaagattttttcacccaacgttgtcaatttgacacttgtggatttgccaggaatgaccaaggtgcctgtaggtgatcaacctaaggatattgagcttcaaatcagagagctcattcttcggttcatcagtaatcctaattccattatcctcgctgtcactgctgctaatacagatatggcaacatcagaggcacttaaaatttcaagagaggtagatccagatggtcgcagaaccctagctgtaatcactaaacttgatctcatggatgcgggtactgatgccatggatgtattgatgggaagggttattccagtcaaacttggaataattggagtagttaacaggagccagctagatattaacaacaagaagagtgtaactgattcaatccgtgatgagtatgcttttcttcaaaagaaatatccatctctggccaatagaaatggaacaaagtatcttgctaggactctaaacaggttactgatgcatcacatcagagattgtttaccagagttgaaaacaagaataaatgttctagctgctcagtatcagtctcttctaaatagctacggtgaacccgtggatgataaaagtgctactttactccaacttattaccaaatttgccacagaatattgtaacactattgaaggaactgcaaaatatattgaaacttcggagctatgcggtggtgctagaatttgttatattttccatgagacttttgggcgaaccttagaatctgttgatccacttggtggccttaacactattgacattttgactgccattagaaatgctactggtcctcgtcctgctttatttgtgcctgaggtttcatttgagttactggtgaagcggcaaatcaaacgtctagaagagcccagcctccgctgtgtggaactggttcatgaggaaatgcaaaggatcattcagcactgtagcaattacagtacacaggaattgttacgatttcctaaacttcatgatgccatagttgaagtggtgacttgtcttcttcgtaaaaggttgcctgttacaaatgaaatggtccataacttagtggcaattgaactggcttatatcaacacaaaacatccagactttgctgatgcttgtgggctaatgaacaataatatagaggaacaaaggagaaacaggctagccagagaattaccttcagctgtatcacgagacaagttaattcaggacagcagaagagaaactaaaaatgttgcatctggaggtggtggggttggagatggtgttcaagaaccaaccacaggcaactggagaggaatgctgaaaacttcaaaagctgaagagttattagcagaagaaaaatcaaaacccattccaattatgccagccagtccacaaaaaggtcatgccgtgaacctgctagatgtgccagttcctgttgcacgaaaactatctgctcgggaacagcgagattgtgaggttattgaacgactcattaaatcatattttctcattgtcagaaagaatattcaagacagtgtgccaaaggcagtaatgcattttttggttaatcatgtgaaagacactcttcagagtgagctagtaggccagctgtataaatcatccttattggatgatcttctgacagaatctgaggacatggcacagcgcaggaaagaagcagctgatatgctaaaggcattacaaggagccagtcaaattattgctgaaatccgggagactcatctttggtgaagagaactatgtaatactgagactttgttgactcaaaacttgctagttactgcctacctgagtagaatcttatttatgaactcctgtgtattgcaatggtatgaatctgctcatgtggagactggctataaactgaaaagtgtattccaaattgcagaacacatcacacatttaatccaaataataaatggctgtttctaaagtttcccagtatatataaaatacatcaagtctgtcttgtgacagtttcatctgaacttaacttaaaaacaactgttaatgttctagttgtgcaaagcagtttgcctgtggataagatgacctgtgtaataatctttgttagtagtcttaaagctgctgccatagtcctccaagaagaaagcaccaagacaacatttcatatgactataatgcatgtactatataagctgatctggctttgaaagatgtgagttggcaagttcctcacatagagtcattgtattccacctgtccttcaatttagttttttctgagcttctttgcagcctttgatgtgtttttaagaaagctgaatgcacaagaggatctgtgacactgacatggctgtggtgtgcatactgtgtagttacatagcccttccaattctgggtccatttgcactagcaaattaaaatatgctttgattcatacttaaacctgaaagcaggaatgcctacattaattcctacattaaaaacagccatctacccttgattatctagaaagacttggtaatgatggtcagttccttttagatttcagaaaatcaaatgatgacctaaatttcccttaatttgcaaatacagtagtaattaaggtacatctctaaagtggagcacttacaccaggctctaagattcactttgaggtggaacttaaaaccagtgtactgtatgtatgcattggtaatagctacttttgcttcatagcttcataccaacaaaatatatttattagaatagtatgaaagtactggaggagctgaaagaaaaacacccaaggctgggcgtggtggcacacgcctgtaatcccagcactttgggaggccgaggcaggtggatcacctgaggttgggagttggagaccagcttgaccaacatggagaaaccccgtctctactaaaaatacaaaattggccgggcgtggtggcgcatgcctgtaatcccagctactcgggagggtgaggcaggagaattgcttgaccctgggaggtggaggttgtggtgagctaagatcgtgccattgcactccagccttggcaacaagagcgaaactccgtctcaaaaaaaaaaaataaaacaacacccagatagatacacatactccttcagacttacagacctaagctgcatttatggggtagtgatgaggtttagaacatatacatattttgttaaaattccccagatgattcttggtatgaacgactatattataaattttaagatgtacttagaaatccttaagacatctagccccgtctctaatagacaacacatttatattgcagatattacttttttttcagtttatgaccaggtatttatgaaggactattggcagggaaaatatgaatatgttaactttagcttatggcatcaatttactaaggaacaacaggctcaccaactgatgtcaaacataaaaacccccacatcagtctgatacgatatggtactactttgaatctgttactagtaccatcttgacagaggatacatgctcccaaaacgtttgttaccacacttaaaaatcactgccatcattaagcatcagtttcaaaattatagccattcatgatttactttttccagatgactatcattattctagtcctttgaatttgtaaggggaaaaaaaacaaaaacaaaaacttacgatgcacttttctccagcacatcagatttcaaattgaaaattaaagacatgctatggtaatgcacttgctagtactacacactttgtacaacaaaaaacagaggcaagaaacaacggaaagagaaaagccttcctttgttggcccttaaactgagtcaagatctgaaatgtagagatgatctctgacgatacctgtatgttcttattgtgtaaataaaattgctggtatgaaatgacactaaa

SEQ ID NO: 128403 - DNA, 550 bp, Homo sapiens
  Payload ID: 5136
  Gene Symbol: DNM1L
  Gene Name: dynamin 1-like
  ENST ID: ENST00000550154
  CDS Start-End: 45-550
attgccgtggccggcgggcactggggccccgtgttttcagagtcatggaggcgctaattcctgtcataaacaagctccaggacgtcttcaacacggtgggcgccgacatcatccagctgcctcaaatcgtcgtagtgggaacgcagagcagcggaaagagctcagtgctagaaagcctggtggggagggacctgcttcccagaggtactggaattgtcacccggagacctctcattctgcaactggtccatgtttcacaagaagataaacggaaaacaacaggagaagaaaatggggtggaagcagaagaatggggtaaatttcttcacaccaaaaataagggagtaagccctgaaccaattcatcttaagattttttcacccaacgttgtcaatttgacacttgtggatttgccaggaatgaccaaggtgcctgtaggtgatcaacctaaggatattgagcttcaaatcagagagctcattcttcggttcatcagtaatcctaattccattatcctcgctgtcactgctgctaatacagatatggcaac

SEQ ID NO: 128404 - DNA, 813 bp, Homo sapiens
  Payload ID: 5136
  Gene Symbol: DNM1L
  Gene Name: dynamin 1-like
  ENST ID: ENST00000548750
  CDS Start-End: 29-813
ggcactggggccccgtgttttcagagtcatggaggcgctaattcctgtcataaacaagctccaggacgtcttcaacacggtgggcgccgacatcatccagctgcctcaaatcgtcgtagtgggaacgcagagcagcggaaagagctcagtgctagaaagcctggtggggagggacctgcttcccagaggtactggaattgtcacccggagacctctcattctgcaactggtccatgtttcacaagaagataaacggaaaacaacaggagaagaaaatggggtggaagcagaagaatggggtaaatttcttcacaccaaaaataagctttacacggattttgatgaaattcgacaagaaattgaaaatgaaacagaaagaatttcaggaaataataaggtgcctgtaggtgatcaacctaaggatattgagcttcaaatcagagagctcattcttcggttcatcagtaatcctaattccattatcctcgctgtcactgctgctaatacagatatggcaacatcagaggcacttaaaatttcaagagaggtagatccagatggtcgcagaaccctagctgtaatcactaaacttgatctcatggatgcgggtactgatgccatggatgtattgatgggaagggttattccagtcaaacttggaataattggagtagttaacaggagccagctagatattaacaacaagaagagtgtaactgattcaatccgtgatgagtatgcttttcttcaaaagaaatatccatctctggccaatagaaatggaacaaagtatcttgctaggactctaaacag

SEQ ID NO: 128405 - DNA, 560 bp, Homo sapiens
  Payload ID: 5136
  Gene Symbol: DNM1L
  Gene Name: dynamin 1-like
  ENST ID: ENST00000551476
  CDS Start-End: 45-560
attgccgtggccggcgggcactggggccccgtgttttcagagtcatggaggcgctaattcctgtcataaacaagctccaggacgtcttcaacacggtgggcgccgacatcatccagctgcctcaaatcgtcgtagtgggaacgcagagcagcggaaagagctcagtgctagaaagcctggtggggagggacctgcttcccagagaccctgctacatggaaaaactcaagacacctttctaaaggggtggaagcagaagaatggggtaaatttcttcacaccaaaaataagctttacacggattttgatgaaattcgacaagaaattgaaaatgaaacagaaagaatttcaggaaataataagggagtaagccctgaaccaattcatcttaagattttttcacccaacgttgtcaatttgacacttgtggatttgccaggaatgaccaaggtgcctgtaggtgatcaacctaaggatattgagcttcaaatcagagagctcattcttcggttcatcagtaatcctaattccattatcctcgctgtcactgctgctaataca

SEQ ID NO: 128406 - DNA, 2661 bp, Homo sapiens
  Payload ID: 5136
  Gene Symbol: DNM1L
  Gene Name: dynamin 1-like
  ENST ID: ENST00000546757
  CDS Start-End: 1-165
agcagcggaaagagctcagtgctagaaagcctggtggggagggacctgcttcccagaggtactggaattgtcacccggagacctctcattctgcaactggtccatgtttcacaagaagataaacggaaaacaacaggagaagaaaatgctttacacggattttgatgaaattcgacaagaaattgaaaatgaaacagaaagaatttcaggaaataataagggagtaagccctgaaccaattcatcttaagattttttcacccaacgttgtcaatttgacacttgtggatttgccaggaatgaccaaggtgcctgtaggtgatcaacctaaggatattgagcttcaaatcagagagctcattcttcggttcatcagtaatcctaattccattatcctcgctgtcactgctgctaatacagatatggcaacatcagaggcacttaaaatttcaagagaggtagatccagatggtcgcagaaccctagctgtaatcactaaacttgatctcatggatgcgggtactgatgccatggatgtattgatgggaagggttattccagtcaaacttggaataattggagtagttaacaggagccagctagatattaacaacaagaagagtgtaactgattcaatccgtgatgagtatgcttttcttcaaaagaaatatccatctctggccaatagaaatggaacaaagtatcttgctaggactctaaacaggttactgatgcatcacatcagagattgtttaccagagttgaaaacaagaataaatgttctagctgctcagtatcagtctcttctaaatagctacggtgaacccgtggatgataaaagtgctactttactccaacttattaccaaatttgccacagaatattgtaacactattgaaggaactgcaaaatatattgaaacttcggagctatgcggtggtgctagaatttgttatattttccatgagacttttgggcgaaccttagaatctgttgatccacttggtggccttaacactattgacattttgactgccattagaaatgctactggtcctcgtcctgctttatttgtgcctgaggtttcatttgagttactggtgaagcggcaaatcaaacgtctagaagagcccagcctccgctgtgtggaactggttcatgaggaaatgcaaaggatcattcagcactgtagcaattacagtacacaggaattgttacgatttcctaaacttcatgatgccatagttgaagtggtgacttgtcttcttcgtaaaaggttgcctgttacaaatgaaatggtccataacttagtggcaattgaactggcttatatcaacacaaaacatccagactttgctgatgcttgtgggctaatgaacaataatatagaggaacaaaggagaaacaggctagccagagaattaccttcagctgtatcacgagacaagttaattcaggacagcagaagagaaactaaaaatgttgcatctggaggtggtggggttggagatggtgttcaagaaccaaccacaggcaactggagaggaatgctgaaaacttcaaaagctgaagagttattagcagaagaaaaatcaaaacccattccaattatgccagccagtccacaaaaaggtcatgccgtgaacctgctagatgtgccagttcctgttgcacgaaaactatctgctcgggaacagcgagattgtgaggttattgaacgactcattaaatcatattttctcattgtcagaaagaatattcaagacagtgtgccaaaggcagtaatgcattttttggttaatcatgtgaaagacactcttcagagtgagctagtaggccagctgtataaatcatccttattggatgatcttctgacagaatctgaggacatggcacagcgcaggaaagaagcagctgatatgctaaaggcattacaaggagccagtcaaattattgctgaaatccgggagactcatctttggtgaagagaactatgtaatactgagactttgttgactcaaaacttgctagttactgcctacctgagtagaatcttatttatgaactcctgtgtattgcaatggtatgaatctgctcatgtggagactggctataaactgaaaagtgtattccaaattgcagaacacatcacacatttaatccaaataataaatggctgtttctaaagtttcccagtatatataaaatacatcaagtctgtcttgtgacagtttcatctgaacttaacttaaaaacaactgttaatgttctagttgtgcaaagcagtttgcctgtggataagatgacctgtgtaataatctttgttagtagtcttaaagctgctgccatagtcctccaagaagaaagcaccaagacaacatttcatatgactataatgcatgtactatataagctgatctggctttgaaagatgtgagttggcaagttcctcacatagagtcattgtattccacctgtccttcaatttagttttttctgagcttctttgcagcctttgatgtgtttttaagaaagctgaatgcacaagaggatctgtgacactgacatggctgtggtgtgcatactgtgtagttacatagcccttccaattctgggtccatttgcactagcaaattaaaatatgctttgattcatacttaaa

SEQ ID NO: 128407 - DNA, 2393 bp, Homo sapiens
  Payload ID: 5136
  Gene Symbol: DNM1L
  Gene Name: dynamin 1-like
  Uniprot ID: O00429
  ENST ID: ENST00000547312
  CDS Start-End: 45-2222
attgccgtggccggcgggcactggggccccgtgttttcagagtcatggaggcgctaattcctgtcataaacaagctccaggacgtcttcaacacggtgggcgccgacatcatccagctgcctcaaatcgtcgtagtgggaacgcagagcagcggaaagagctcagtgctagaaagcctggtggggagggacctgcttcccagaggtactggaattgtcacccggagacctctcattctgcaactggtccatgtttcacaagaagataaacggaaaacaacaggagaagaaaatggggtggaagcagaagaatggggtaaatttcttcacaccaaaaataagctttacacggattttgatgaaattcgacaagaaattgaaaatgaaacagaaagaatttcaggaaataataagggagtaagccctgaaccaattcatcttaagattttttcacccaacgttgtcaatttgacacttgtggatttgccaggaatgaccaaggtgcctgtaggtgatcaacctaaggatattgagcttcaaatcagagagctcattcttcggttcatcagtaatcctaattccattatcctcgctgtcactgctgctaatacagatatggcaacatcagaggcacttaaaatttcaagagaggtagatccagatggtcgcagaaccctagctgtaatcactaaacttgatctcatggatgcgggtactgatgccatggatgtattgatgggaagggttattccagtcaaacttggaataattggagtagttaacaggagccagctagatattaacaacaagaagagtgtaactgattcaatccgtgatgagtatgcttttcttcaaaagaaatatccatctctggccaatagaaatggaacaaagtatcttgctaggactctaaacaggttactgatgcatcacatcagagattgtttaccagagttgaaaacaagaataaatgttctagctgctcagtatcagtctcttctaaatagctacggtgaacccgtggatgataaaagtgctactttactccaacttattaccaaatttgccacagaatattgtaacactattgaaggaactgcaaaatatattgaaacttcggagctatgcggtggtgctagaatttgttatattttccatgagacttttgggcgaaccttagaatctgttgatccacttggtggccttaacactattgacattttgactgccattagaaatgctactggtcctcgtcctgctttatttgtgcctgaggtttcatttgagttactggtgaagcggcaaatcaaacgtctagaagagcccagcctccgctgtgtggaactggttcatgaggaaatgcaaaggatcattcagcactgtagcaattacagtacacaggaattgttacgatttcctaaacttcatgatgccatagttgaagtggtgacttgtcttcttcgtaaaaggttgcctgttacaaatgaaatggtccataacttagtggcaattgaactggcttatatcaacacaaaacatccagactttgctgatgcttgtgggctaatgaacaataatatagaggaacaaaggagaaacaggctagccagagaattaccttcagctgtatcacgagacaagtcttctaaagttccaagtgctttggcacctgcctcccaggagccctcccccgctgcttctgctgaggctgatggcaaggttgcatctggaggtggtggggttggagatggtgttcaagaaccaaccacaggcaactggagaggaatgctgaaaacttcaaaagctgaagagttattagcagaagaaaaatcaaaacccattccaattatgccagccagtccacaaaaaggtcatgccgtgaacctgctagatgtgccagttcctgttgcacgaaaactatctgctcgggaacagcgagattgtgaggttattgaacgactcattaaatcatattttctcattgtcagaaagaatattcaagacagtgtgccaaaggcagtaatgcattttttggttaatcatgtgaaagacactcttcagagtgagctagtaggccagctgtataaatcatccttattggatgatcttctgacagaatctgaggacatggcacagcgcaggaaagaagcagctgatatgctaaaggcattacaaggagccagtcaaattattgctgaaatccgggagactcatctttggtgaagagaactatgtaatactgagactttgttgactcaaaacttgctagttactgcctacctgagtagaatcttatttatgaactcctgtgtattgcaatggtatgaatctgctcatgtggagactggctataaactgaaaagtgtattccaaattgcagaacacatcacacat

SEQ ID NO: 128408 - DNA, 450 bp, Homo sapiens
  Payload ID: 5136
  Gene Symbol: DNM1L
  Gene Name: dynamin 1-like
  ENST ID: ENST00000547078
  CDS Start-End: 1-146
agcactgtagcaattacagtacacaggaattgttacgatttcctaaacttcatgatgccatagttgaagtggtgacttgtcttcttcgtaaaaggttgcctgttacaaatgaaatgtgcatttgggtccttggctcaggatggtgaaccccgtggaggtttactaagagtacaaaaccatccttggaatgtccataacttagtggcaattgaactggcttatatcaacacaaaacatccagactttgctgatgcttgtgggctaatgaacaataatatagaggaacaaaggagaaacaggctagccagagaattaccttcagctgtatcacgagacaagtcttctaaagttccaagtgctttggcacctgcctcccaggagccctcccccgctgcttctgctgaggctgatggcaagttaattcaggacagcagaagagaaactaaaaat

SEQ ID NO: 128409 - DNA, 2097 bp, Homo sapiens
  Payload ID: 5136
  Gene Symbol: DNM1L
  Gene Name: dynamin 1-like
  ENST ID: ENST00000546649
  CDS Start-End: 45-398
attgccgtggccggcgggcactggggccccgtgttttcagagtcatggaggcgctaattcctgtcataaacaagctccaggacgtcttcaacacggtgggcgccgacatcatccagctgcctcaaatcgtcgtagtgggaacgcagagcagcggaaagagctcagtgctagaaagcctggtggggagggacctgcttcccagaggtactggaattgtcacccggagacctctcattctgcaactggtccatgtttcacaagaagataaacggaaaacaacaggagaagaaaatgaccctgctacatggaaaaactcaagacacctttctaaaggggtggaagcagaagaatggggtaaatttcttcacaccaaaaataaggagccagctagatattaacaacaagaagagtgtaactgattcaatccgtgatgagtatgcttttcttcaaaagaaatatccatctctggccaatagaaatggaacaaagtatcttgctaggactctaaacaggttactgatgcatcacatcagagattgtttaccagagttgaaaacaagaataaatgttctagctgctcagtatcagtctcttctaaatagctacggtgaacccgtggatgataaaagtgctactttactccaacttattaccaaatttgccacagaatattgtaacactattgaaggaactgcaaaatatattgaaacttcggagctatgcggtggtgctagaatttgttatattttccatgagacttttgggcgaaccttagaatctgttgatccacttggtggccttaacactattgacattttgactgccattagaaatgctactggtcctcgtcctgctttatttgtgcctgaggtttcatttgagttactggtgaagcggcaaatcaaacgtctagaagagcccagcctccgctgtgtggaactggttcatgaggaaatgcaaaggatcattcagcactgtagcaattacagtacacaggaattgttacgatttcctaaacttcatgatgccatagttgaagtggtgacttgtcttcttcgtaaaaggttgcctgttacaaatgaaatggtccataacttagtggcaattgaactggcttatatcaacacaaaacatccagactttgctgatgcttgtgggctaatgaacaataatatagaggaacaaaggagaaacaggctagccagagaattaccttcagctgtatcacgagacaagtcttctaaagttccaagtgctttggcacctgcctcccaggagccctcccccgctgcttctgctgaggctgatggcaagttaattcaggacagcagaagagaaactaaaaatgttgcatctggaggtggtggggttggagatggtgttcaagaaccaaccacaggcaactggagaggaatgctgaaaacttcaaaagctgaagagttattagcagaagaaaaatcaaaacccattccaattatgccagccagtccacaaaaaggtcatgccgtgaacctgctagatgtgccagttcctgttgcacgaaaactatctgctcgggaacagcgagattgtgaggttattgaacgactcattaaatcatattttctcattgtcagaaagaatattcaagacagtgtgccaaaggcagtaatgcattttttggttaatcatgtgaaagacactcttcagagtgagctagtaggccagctgtataaatcatccttattggatgatcttctgacagaatctgaggacatggcacagcgcaggaaagaagcagctgatatgctaaaggcattacaaggagccagtcaaattattgctgaaatccgggagactcatctttggtgaagagaactatgtaatactgagactttgttgactcaaaacttgctagttactgcctacctgagtagaatcttatttatgaactcctgtgtattgcaatggtatgaatctgctcatgtggagactggctataaactgaaaagtgtattccaaattgcagaacacatcacacatttaatccaaataataaatggctgtttctaaagtttcccagtatatataaaatacatcaagtctgtcttgtgacag

SEQ ID NO: 128410 - DNA, 2699 bp, Homo sapiens
  Payload ID: 5136
  Gene Symbol: DNM1L
  Gene Name: dynamin 1-like
  Uniprot ID: O00429
  ENST ID: ENST00000553257
  CDS Start-End: 78-2327
gaaggaggcgaactgtgggccccggccccattcattgccgtggccggcgggcactggggccccgtgttttcagagtcatggaggcgctaattcctgtcataaacaagctccaggacgtcttcaacacggtgggcgccgacatcatccagctgcctcaaatcgtcgtagtgggaacgcagagcagcggaaagagctcagtgctagaaagcctggtggggagggacctgcttcccagaggtactggaattgtcacccggagacctctcattctgcaactggtccatgtttcacaagaagataaacggaaaacaacaggagaagaaaatgaccctgctacatggaaaaactcaagacacctttctaaaggggtggaagcagaagaatggggtaaatttcttcacaccaaaaataagctttacacggattttgatgaaattcgacaagaaattgaaaatgaaacagaaagaatttcaggaaataataagggagtaagccctgaaccaattcatcttaagattttttcacccaacgttgtcaatttgacacttgtggatttgccaggaatgaccaaggtgcctgtaggtgatcaacctaaggatattgagcttcaaatcagagagctcattcttcggttcatcagtaatcctaattccattatcctcgctgtcactgctgctaatacagatatggcaacatcagaggcacttaaaatttcaagagaggtagatccagatggtcgcagaaccctagctgtaatcactaaacttgatctcatggatgcgggtactgatgccatggatgtattgatgggaagggttattccagtcaaacttggaataattggagtagttaacaggagccagctagatattaacaacaagaagagtgtaactgattcaatccgtgatgagtatgcttttcttcaaaagaaatatccatctctggccaatagaaatggaacaaagtatcttgctaggactctaaacaggttactgatgcatcacatcagagattgtttaccagagttgaaaacaagaataaatgttctagctgctcagtatcagtctcttctaaatagctacggtgaacccgtggatgataaaagtgctactttactccaacttattaccaaatttgccacagaatattgtaacactattgaaggaactgcaaaatatattgaaacttcggagctatgcggtggtgctagaatttgttatattttccatgagacttttgggcgaaccttagaatctgttgatccacttggtggccttaacactattgacattttgactgccattagaaatgctactggtcctcgtcctgctttatttgtgcctgaggtttcatttgagttactggtgaagcggcaaatcaaacgtctagaagagcccagcctccgctgtgtggaactggttcatgaggaaatgcaaaggatcattcagcactgtagcaattacagtacacaggaattgttacgatttcctaaacttcatgatgccatagttgaagtggtgacttgtcttcttcgtaaaaggttgcctgttacaaatgaaatggtccataacttagtggcaattgaactggcttatatcaacacaaaacatccagactttgctgatgcttgtgggctaatgaacaataatatagaggaacaaaggagaaacaggctagccagagaattaccttcagctgtatcacgagacaagtcttctaaagttccaagtgctttggcacctgcctcccaggagccctcccccgctgcttctgctgaggctgatggcaagttaattcaggacagcagaagagaaactaaaaatgttgcatctggaggtggtggggttggagatggtgttcaagaaccaaccacaggcaactggagaggaatgctgaaaacttcaaaagctgaagagttattagcagaagaaaaatcaaaacccattccaattatgccagccagtccacaaaaaggtcatgccgtgaacctgctagatgtgccagttcctgttgcacgaaaactatctgctcgggaacagcgagattgtgaggttattgaacgactcattaaatcatattttctcattgtcagaaagaatattcaagacagtgtgccaaaggcagtaatgcattttttggttaatcatgtgaaagacactcttcagagtgagctagtaggccagctgtataaatcatccttattggatgatcttctgacagaatctgaggacatggcacagcgcaggaaagaagcagctgatatgctaaaggcattacaaggagccagtcaaattattgctgaaatccgggagactcatctttggtgaagagaactatgtaatactgagactttgttgactcaaaacttgctagttactgcctacctgagtagaatcttatttatgaactcctgtgtattgcaatggtatgaatctgctcatgtggagactggctataaactgaaaagtgtattccaaattgcagaacacatcacacatttaatccaaataataaatggctgtttctaaagtttcccagtatatataaaatacatcaagtctgtcttgtgacagtttcatctgaacttaacttaaaaacaactgttaatgttctagttgtgcaaagcagtttgcctgtggataagatgacctgtgtaataatctttgttagtagtcttaaagctgctgccatagtcctcc

SEQ ID NO: 128411 - DNA, 2487 bp, Homo sapiens
  Payload ID: 5136
  Gene Symbol: DNM1L
  Gene Name: dynamin 1-like
  Uniprot ID: O00429
  ENST ID: ENST00000549701
  CDS Start-End: 75-2285
ggaggcgaactgtgggccccggccccattcattgccgtggccggcgggcactggggccccgtgttttcagagtcatggaggcgctaattcctgtcataaacaagctccaggacgtcttcaacacggtgggcgccgacatcatccagctgcctcaaatcgtcgtagtgggaacgcagagcagcggaaagagctcagtgctagaaagcctggtggggagggacctgcttcccagaggtactggaattgtcacccggagacctctcattctgcaactggtccatgtttcacaagaagataaacggaaaacaacaggagaagaaaatggggtggaagcagaagaatggggtaaatttcttcacaccaaaaataagctttacacggattttgatgaaattcgacaagaaattgaaaatgaaacagaaagaatttcaggaaataataagggagtaagccctgaaccaattcatcttaagattttttcacccaacgttgtcaatttgacacttgtggatttgccaggaatgaccaaggtgcctgtaggtgatcaacctaaggatattgagcttcaaatcagagagctcattcttcggttcatcagtaatcctaattccattatcctcgctgtcactgctgctaatacagatatggcaacatcagaggcacttaaaatttcaagagaggtagatccagatggtcgcagaaccctagctgtaatcactaaacttgatctcatggatgcgggtactgatgccatggatgtattgatgggaagggttattccagtcaaacttggaataattggagtagttaacaggagccagctagatattaacaacaagaagagtgtaactgattcaatccgtgatgagtatgcttttcttcaaaagaaatatccatctctggccaatagaaatggaacaaagtatcttgctaggactctaaacaggttactgatgcatcacatcagagattgtttaccagagttgaaaacaagaataaatgttctagctgctcagtatcagtctcttctaaatagctacggtgaacccgtggatgataaaagtgctactttactccaacttattaccaaatttgccacagaatattgtaacactattgaaggaactgcaaaatatattgaaacttcggagctatgcggtggtgctagaatttgttatattttccatgagacttttgggcgaaccttagaatctgttgatccacttggtggccttaacactattgacattttgactgccattagaaatgctactggtcctcgtcctgctttatttgtgcctgaggtttcatttgagttactggtgaagcggcaaatcaaacgtctagaagagcccagcctccgctgtgtggaactggttcatgaggaaatgcaaaggatcattcagcactgtagcaattacagtacacaggaattgttacgatttcctaaacttcatgatgccatagttgaagtggtgacttgtcttcttcgtaaaaggttgcctgttacaaatgaaatggtccataacttagtggcaattgaactggcttatatcaacacaaaacatccagactttgctgatgcttgtgggctaatgaacaataatatagaggaacaaaggagaaacaggctagccagagaattaccttcagctgtatcacgagacaagtcttctaaagttccaagtgctttggcacctgcctcccaggagccctcccccgctgcttctgctgaggctgatggcaagttaattcaggacagcagaagagaaactaaaaatgttgcatctggaggtggtggggttggagatggtgttcaagaaccaaccacaggcaactggagaggaatgctgaaaacttcaaaagctgaagagttattagcagaagaaaaatcaaaacccattccaattatgccagccagtccacaaaaaggtcatgccgtgaacctgctagatgtgccagttcctgttgcacgaaaactatctgctcgggaacagcgagattgtgaggttattgaacgactcattaaatcatattttctcattgtcagaaagaatattcaagacagtgtgccaaaggcagtaatgcattttttggttaatcatgtgaaagacactcttcagagtgagctagtaggccagctgtataaatcatccttattggatgatcttctgacagaatctgaggacatggcacagcgcaggaaagaagcagctgatatgctaaaggcattacaaggagccagtcaaattattgctgaaatccgggagactcatctttggtgaagagaactatgtaatactgagactttgttgactcaaaacttgctagttactgcctacctgagtagaatcttatttatgaactcctgtgtattgcaatggtatgaatctgctcatgtggagactggctataaactgaaaagtgtattccaaattgcagaacacatcacacatttaatccaaataataaatggctgtttctaaa

SEQ ID NO: 128412 - DNA, 538 bp, Homo sapiens
  Payload ID: 5136
  Gene Symbol: DNM1L
  Gene Name: dynamin 1-like
  ENST ID: ENST00000551643
  CDS Start-End: 45-338
attgccgtggccggcgggcactggggccccgtgttttcagagtcatggaggcgctaattcctgtcataaacaagctccaggacgtcttcaacacggtgggcgccgacatcatccagctgcctcaaatcgtcgtagtgggaacgcagagcagcggaaagagctcagtgctagaaagcctggtggggagggacctgcttcccagaggtactggaattgtcacccggagacctctcattctgcaactggtccatgtttcacaagaagataaacggaaaacaacaggagaagaaaatgttccaagggaaaacagtcttgaccctgggggaaaatcaccttgaaagtgtgtgtaaattacaaagcagctagctctataataatgagagagctctttaaaggaacagcaagttgtggctctacaggggtggaagcagaagaatggggtaaatttcttcacaccaaaaataagctttacacggattttgatgaaattcgacaagaaattgaaaatgaaacagaaagaatttcaggaaataataag

SEQ ID NO: 128413 - DNA, 3541 bp, Homo sapiens
  Payload ID: 5137
  Gene Symbol: DNM2
  Gene Name: dynamin 2
  Uniprot ID: P50570
  ENST ID: ENST00000355667
  CDS Start-End: 81-2693
cagacgccgcggggccaggtcgttgagggtcggcggcgggcgaggagcgcagggcgctcgggccgggggccgccggcgccatgggcaaccgcgggatggaagagctgatcccgctggtcaacaaactgcaggacgccttcagctccatcggccagagctgccacctggacctgccgcagatcgctgtagtgggcggccagagcgccggcaagagctcggtgctggagaacttcgtgggccgggacttccttccccgcggttcaggaatcgtcacccggcggcctctcattctgcagctcatcttctcaaaaacagaacatgccgagtttttgcactgcaagtccaaaaagtttacagactttgatgaagtccggcaggagattgaagcagagaccgacagggtcacggggaccaacaaaggcatctccccagtgcccatcaaccttcgagtctactcgccacacgtgttgaacttgaccctcatcgacctcccgggtatcaccaaggtgcctgtgggcgaccagcctccagacatcgagtaccagatcaaggacatgatcctgcagttcatcagccgggagagcagcctcattctggctgtcacgcccgccaacatggacctggccaactccgacgccctcaagctggccaaggaagtcgatccccaaggcctacggaccatcggtgtcatcaccaagcttgacctgatggacgagggcaccgacgccagggacgtcttggagaacaagttgctcccgttgagaagaggctacattggcgtggtgaaccgcagccagaaggatattgagggcaagaaggacatccgtgcagcactggcagctgagaggaagttcttcctctcccacccggcctaccggcacatggccgaccgcatgggcacgccacatctgcagaagacgctgaatcagcaactgaccaaccacatccgggagtcgctgccggccctacgtagcaaactacagagccagctgctgtccctggagaaggaggtggaggagtacaagaactttcggcccgacgaccccacccgcaaaaccaaagccctgctgcagatggtccagcagtttggggtggattttgagaagaggatcgagggctcaggagatcaggtggacactctggagctctccgggggcgcccgaatcaatcgcatcttccacgagcggttcccatttgagctggtgaagatggagtttgacgagaaggacttacgacgggagatcagctatgccattaagaacatccatggagtcaggaccgggcttttcaccccggacttggcattcgaggccattgtgaaaaagcaggtcgtcaagctgaaagagccctgtctgaaatgtgtcgacctggttatccaggagctaatcaatacagttaggcagtgtaccagtaagctcagttcctacccccggttgcgagaggagacagagcgaatcgtcaccacttacatccgggaacgggaggggagaacgaaggaccagattcttctgctgatcgacattgagcagtcctacatcaacacgaaccatgaggacttcatcgggtttgccaatgcccagcagaggagcacgcagctgaacaagaagagagccatccccaatcagggggagatcctggtgatccgcaggggctggctgaccatcaacaacatcagcctgatgaaaggcggctccaaggagtactggtttgtgctgactgccgagtcactgtcctggtacaaggatgaggaggagaaagagaagaagtacatgctgcctctggacaacctcaagatccgtgatgtggagaagggcttcatgtccaacaagcacgtcttcgccatcttcaacacggagcagagaaacgtctacaaggacctgcggcagatcgagctggcctgtgactcccaggaagacgtggacagctggaaggcctcgttcctccgagctggcgtctaccccgagaaggaccaggcagaaaacgaggatggggcccaggagaacaccttctccatggacccccaactggagcggcaggtggagaccattcgcaacctggtggactcatacgtggccatcatcaacaagtccatccgcgacctcatgccaaagaccatcatgcacctcatgatcaacaatacgaaggccttcatccaccacgagctgctggcctacctatactcctcggcagaccagagcagcctcatggaggagtcggctgaccaggcacagcggcgggacgacatgctgcgcatgtaccatgccctcaaggaggcgctcaacatcatcggtgacatcagcaccagcactgtgtccacgcctgtacccccgcctgtcgatgacacctggctccagagcgccagcagccacagccccactccacagcgccgaccggtgtccagcatacacccccctggccggcccccagcagtgaggggccccactccagggccccccctgattcctgttcccgtgggggcagcagcctccttctcggcgcccccaatcccatcccggcctggaccccagagcgtgtttgccaacagtgacctcttcccagccccgcctcagatcccatctcggccagttcggatccccccagggattcccccaggagtgcccagcagaagaccccctgctgcgcccagccggcccaccattatccgcccagccgagccatccctgctcgactaggcctcgaggggggcgtgctctcgggggggcctcacgcacccgcggcgcaggagcttcagtggtctggggccctccgccgcccctatgctgggaccaggctcccagtgggcagccctggcctcttccttaacgctggccccggtccagggccggcccctgtgcctggctggacaccgcactgcgcaaaggggccctggagctccaggcagggggcgctggggtgttgcactttgggggatggagtctcagggtggcagaggggggaccagaacccttgacaccatcctgaatgaggggtccagcctgggggggactctaccaaggtcttcttgggctgggaaagcccatgtagggcaggccttctataagtgcgggcaccaagggcgcctacatccccaggccttgctggggtgcaggggtatatcaacttcccattagcaggagctccccagcggcaagcctggcccagtgggctcggtagtgcccagctggcaggcctgaggtgtacatagtccttcccggccatattaaccacacagcctgagcctggcccagcctcggctgccagaggtgcctttgctaggcccggagccgttggcccgggccggccttgccctattcctctcctcctcctcctcctgggtcccccagggtggctgggcttgggctatgtgggtggtggtggcggggggtcttgggggcctctcagctcccgcccatgcctccctgatgggtgggcccagggcggcctctctctgaggagacctcacccactcctcgctcagtttgaccactgtaagtgcctgcactctgtattctattaataaactaaaataaagggaagacgc

SEQ ID NO: 128414 - DNA, 3588 bp, Homo sapiens
  Payload ID: 5137
  Gene Symbol: DNM2
  Gene Name: dynamin 2
  Uniprot ID: P50570
  ENST ID: ENST00000359692
  CDS Start-End: 151-2751
gcggcgaccgtgaggccgagccgggagcgggcgtcttgccgaggcccgggcgggcggggagcaacggctacagacgccgcggggccaggtcgttgagggtcggcggcgggcgaggagcgcagggcgctcgggccgggggccgccggcgccatgggcaaccgcgggatggaagagctgatcccgctggtcaacaaactgcaggacgccttcagctccatcggccagagctgccacctggacctgccgcagatcgctgtagtgggcggccagagcgccggcaagagctcggtgctggagaacttcgtgggccgggacttccttccccgcggttcaggaatcgtcacccggcggcctctcattctgcagctcatcttctcaaaaacagaacatgccgagtttttgcactgcaagtccaaaaagtttacagactttgatgaagtccggcaggagattgaagcagagaccgacagggtcacggggaccaacaaaggcatctccccagtgcccatcaaccttcgagtctactcgccacacgtgttgaacttgaccctcatcgacctcccgggtatcaccaaggtgcctgtgggcgaccagcctccagacatcgagtaccagatcaaggacatgatcctgcagttcatcagccgggagagcagcctcattctggctgtcacgcccgccaacatggacctggccaactccgacgccctcaagctggccaaggaagtcgatccccaaggcctacggaccatcggtgtcatcaccaagcttgacctgatggacgagggcaccgacgccagggacgtcttggagaacaagttgctcccgttgagaagaggctacattggcgtggtgaaccgcagccagaaggatattgagggcaagaaggacatccgtgcagcactggcagctgagaggaagttcttcctctcccacccggcctaccggcacatggccgaccgcatgggcacgccacatctgcagaagacgctgaatcagcaactgaccaaccacatccgggagtcgctgccggccctacgtagcaaactacagagccagctgctgtccctggagaaggaggtggaggagtacaagaactttcggcccgacgaccccacccgcaaaaccaaagccctgctgcagatggtccagcagtttggggtggattttgagaagaggatcgagggctcaggagatcaggtggacactctggagctctccgggggcgcccgaatcaatcgcatcttccacgagcggttcccatttgagctggtgaagatggagtttgacgagaaggacttacgacgggagatcagctatgccattaagaacatccatggagtcaggaccgggcttttcaccccggacttggcattcgaggccattgtgaaaaagcaggtcgtcaagctgaaagagccctgtctgaaatgtgtcgacctggttatccaggagctaatcaatacagttaggcagtgtaccagtaagctcagttcctacccccggttgcgagaggagacagagcgaatcgtcaccacttacatccgggaacgggaggggagaacgaaggaccagattcttctgctgatcgacattgagcagtcctacatcaacacgaaccatgaggacttcatcgggtttgccaatgcccagcagaggagcacgcagctgaacaagaagagagccatccccaatcaggtgatccgcaggggctggctgaccatcaacaacatcagcctgatgaaaggcggctccaaggagtactggtttgtgctgactgccgagtcactgtcctggtacaaggatgaggaggagaaagagaagaagtacatgctgcctctggacaacctcaagatccgtgatgtggagaagggcttcatgtccaacaagcacgtcttcgccatcttcaacacggagcagagaaacgtctacaaggacctgcggcagatcgagctggcctgtgactcccaggaagacgtggacagctggaaggcctcgttcctccgagctggcgtctaccccgagaaggaccaggcagaaaacgaggatggggcccaggagaacaccttctccatggacccccaactggagcggcaggtggagaccattcgcaacctggtggactcatacgtggccatcatcaacaagtccatccgcgacctcatgccaaagaccatcatgcacctcatgatcaacaatacgaaggccttcatccaccacgagctgctggcctacctatactcctcggcagaccagagcagcctcatggaggagtcggctgaccaggcacagcggcgggacgacatgctgcgcatgtaccatgccctcaaggaggcgctcaacatcatcggtgacatcagcaccagcactgtgtccacgcctgtacccccgcctgtcgatgacacctggctccagagcgccagcagccacagccccactccacagcgccgaccggtgtccagcatacacccccctggccggcccccagcagtgaggggccccactccagggccccccctgattcctgttcccgtgggggcagcagcctccttctcggcgcccccaatcccatcccggcctggaccccagagcgtgtttgccaacagtgacctcttcccagccccgcctcagatcccatctcggccagttcggatccccccagggattcccccaggagtgcccagcagaagaccccctgctgcgcccagccggcccaccattatccgcccagccgagccatccctgctcgactaggcctcgaggggggcgtgctctcgggggggcctcacgcacccgcggcgcaggagcttcagtggtctggggccctccgccgcccctatgctgggaccaggctcccagtgggcagccctggcctcttccttaacgctggccccggtccagggccggcccctgtgcctggctggacaccgcactgcgcaaaggggccctggagctccaggcagggggcgctggggtgttgcactttgggggatggagtctcagggtggcagaggggggaccagaacccttgacaccatcctgaatgaggggtccagcctgggggggactctaccaaggtcttcttgggctgggaaagcccatgtagggcaggccttctataagtgcgggcaccaagggcgcctacatccccaggccttgctggggtgcaggggtatatcaacttcccattagcaggagctccccagcggcaagcctggcccagtgggctcggtagtgcccagctggcaggcctgaggtgtacatagtccttcccggccatattaaccacacagcctgagcctggcccagcctcggctgccagaggtgcctttgctaggcccggagccgttggcccgggccggccttgccctattcctctcctcctcctcctcctgggtcccccagggtggctgggcttgggctatgtgggtggtggtggcggggggtcttgggggcctctcagctcccgcccatgcctccctgatgggtgggcccagggcggcctctctctgaggagacctcacccactcctcgctcagtttgaccactgtaagtgcctgcactctgtattctattaataaactaaaataa

SEQ ID NO: 128415 - DNA, 3581 bp, Homo sapiens
  Payload ID: 5137
  Gene Symbol: DNM2
  Gene Name: dynamin 2
  Uniprot ID: P50570
  ENST ID: ENST00000389253
  CDS Start-End: 113-2725
ccgaggcccgggcgggcggggagcaacggctacagacgccgcggggccaggtcgttgagggtcggcggcgggcgaggagcgcagggcgctcgggccgggggccgccggcgccatgggcaaccgcgggatggaagagctgatcccgctggtcaacaaactgcaggacgccttcagctccatcggccagagctgccacctggacctgccgcagatcgctgtagtgggcggccagagcgccggcaagagctcggtgctggagaacttcgtgggccgggacttccttccccgcggttcaggaatcgtcacccggcggcctctcattctgcagctcatcttctcaaaaacagaacatgccgagtttttgcactgcaagtccaaaaagtttacagactttgatgaagtccggcaggagattgaagcagagaccgacagggtcacggggaccaacaaaggcatctccccagtgcccatcaaccttcgagtctactcgccacacgtgttgaacttgaccctcatcgacctcccgggtatcaccaaggtgcctgtgggcgaccagcctccagacatcgagtaccagatcaaggacatgatcctgcagttcatcagccgggagagcagcctcattctggctgtcacgcccgccaacatggacctggccaactccgacgccctcaagctggccaaggaagtcgatccccaaggcctacggaccatcggtgtcatcaccaagcttgacctgatggacgagggcaccgacgccagggacgtcttggagaacaagttgctcccgttgagaagaggctacattggcgtggtgaaccgcagccagaaggatattgagggcaagaaggacatccgtgcagcactggcagctgagaggaagttcttcctctcccacccggcctaccggcacatggccgaccgcatgggcacgccacatctgcagaagacgctgaatcagcaactgaccaaccacatccgggagtcgctgccggccctacgtagcaaactacagagccagctgctgtccctggagaaggaggtggaggagtacaagaactttcggcccgacgaccccacccgcaaaaccaaagccctgctgcagatggtccagcagtttggggtggattttgagaagaggatcgagggctcaggagatcaggtggacactctggagctctccgggggcgcccgaatcaatcgcatcttccacgagcggttcccatttgagctggtgaagatggagtttgacgagaaggacttacgacgggagatcagctatgccattaagaacatccatggagtcaggacggggctcttcacccccgacatggcctttgaagccattgtgaaaaaacagattgtaaaactcaaagagccgagtttgaagtgtgttgatctcgtggtctcagagctggccacggtcataaaaaagtgtgccgagaagctcagttcctacccccggttgcgagaggagacagagcgaatcgtcaccacttacatccgggaacgggaggggagaacgaaggaccagattcttctgctgatcgacattgagcagtcctacatcaacacgaaccatgaggacttcatcgggtttgccaatgcccagcagaggagcacgcagctgaacaagaagagagccatccccaatcagggggagatcctggtgatccgcaggggctggctgaccatcaacaacatcagcctgatgaaaggcggctccaaggagtactggtttgtgctgactgccgagtcactgtcctggtacaaggatgaggaggagaaagagaagaagtacatgctgcctctggacaacctcaagatccgtgatgtggagaagggcttcatgtccaacaagcacgtcttcgccatcttcaacacggagcagagaaacgtctacaaggacctgcggcagatcgagctggcctgtgactcccaggaagacgtggacagctggaaggcctcgttcctccgagctggcgtctaccccgagaaggaccaggcagaaaacgaggatggggcccaggagaacaccttctccatggacccccaactggagcggcaggtggagaccattcgcaacctggtggactcatacgtggccatcatcaacaagtccatccgcgacctcatgccaaagaccatcatgcacctcatgatcaacaatacgaaggccttcatccaccacgagctgctggcctacctatactcctcggcagaccagagcagcctcatggaggagtcggctgaccaggcacagcggcgggacgacatgctgcgcatgtaccatgccctcaaggaggcgctcaacatcatcggtgacatcagcaccagcactgtgtccacgcctgtacccccgcctgtcgatgacacctggctccagagcgccagcagccacagccccactccacagcgccgaccggtgtccagcatacacccccctggccggcccccagcagtgaggggccccactccagggccccccctgattcctgttcccgtgggggcagcagcctccttctcggcgcccccaatcccatcccggcctggaccccagagcgtgtttgccaacagtgacctcttcccagccccgcctcagatcccatctcggccagttcggatccccccagggattcccccaggagtgcccagcagaagaccccctgctgcgcccagccggcccaccattatccgcccagccgagccatccctgctcgactaggcctcgaggggggcgtgctctcgggggggcctcacgcacccgcggcgcaggagcttcagtggtctggggccctccgccgcccctatgctgggaccaggctcccagtgggcagccctggcctcttccttaacgctggccccggtccagggccggcccctgtgcctggctggacaccgcactgcgcaaaggggccctggagctccaggcagggggcgctggggtgttgcactttgggggatggagtctcagggtggcagaggggggaccagaacccttgacaccatcctgaatgaggggtccagcctgggggggactctaccaaggtcttcttgggctgggaaagcccatgtagggcaggccttctataagtgcgggcaccaagggcgcctacatccccaggccttgctggggtgcaggggtatatcaacttcccattagcaggagctccccagcggcaagcctggcccagtgggctcggtagtgcccagctggcaggcctgaggtgtacatagtccttcccggccatattaaccacacagcctgagcctggcccagcctcggctgccagaggtgcctttgctaggcccggagccgttggcccgggccggccttgccctattcctctcctcctcctcctcctgggtcccccagggtggctgggcttgggctatgtgggtggtggtggcggggggtcttgggggcctctcagctcccgcccatgcctccctgatgggtgggcccagggcggcctctctctgaggagacctcacccactcctcgctcagtttgaccactgtaagtgcctgcactctgtattctattaataaactaaaataaagggaagacgctgctggtg

SEQ ID NO: 128416 - DNA, 3013 bp, Homo sapiens
  Payload ID: 5137
  Gene Symbol: DNM2
  Gene Name: dynamin 2
  Uniprot ID: P50570
  ENST ID: ENST00000408974
  CDS Start-End: 36-2636
agcgcagggcgctcgggccgggggccgccggcgccatgggcaaccgcgggatggaagagctgatcccgctggtcaacaaactgcaggacgccttcagctccatcggccagagctgccacctggacctgccgcagatcgctgtagtgggcggccagagcgccggcaagagctcggtgctggagaacttcgtgggccgggacttccttccccgcggttcaggaatcgtcacccggcggcctctcattctgcagctcatcttctcaaaaacagaacatgccgagtttttgcactgcaagtccaaaaagtttacagactttgatgaagtccggcaggagattgaagcagagaccgacagggtcacggggaccaacaaaggcatctccccagtgcccatcaaccttcgagtctactcgccacacgtgttgaacttgaccctcatcgacctcccgggtatcaccaaggtgcctgtgggcgaccagcctccagacatcgagtaccagatcaaggacatgatcctgcagttcatcagccgggagagcagcctcattctggctgtcacgcccgccaacatggacctggccaactccgacgccctcaagctggccaaggaagtcgatccccaaggcctacggaccatcggtgtcatcaccaagcttgacctgatggacgagggcaccgacgccagggacgtcttggagaacaagttgctcccgttgagaagaggctacattggcgtggtgaaccgcagccagaaggatattgagggcaagaaggacatccgtgcagcactggcagctgagaggaagttcttcctctcccacccggcctaccggcacatggccgaccgcatgggcacgccacatctgcagaagacgctgaatcagcaactgaccaaccacatccgggagtcgctgccggccctacgtagcaaactacagagccagctgctgtccctggagaaggaggtggaggagtacaagaactttcggcccgacgaccccacccgcaaaaccaaagccctgctgcagatggtccagcagtttggggtggattttgagaagaggatcgagggctcaggagatcaggtggacactctggagctctccgggggcgcccgaatcaatcgcatcttccacgagcggttcccatttgagctggtgaagatggagtttgacgagaaggacttacgacgggagatcagctatgccattaagaacatccatggagtcaggacggggctcttcacccccgacatggcctttgaagccattgtgaaaaaacagattgtaaaactcaaagagccgagtttgaagtgtgttgatctcgtggtctcagagctggccacggtcataaaaaagtgtgccgagaagctcagttcctacccccggttgcgagaggagacagagcgaatcgtcaccacttacatccgggaacgggaggggagaacgaaggaccagattcttctgctgatcgacattgagcagtcctacatcaacacgaaccatgaggacttcatcgggtttgccaatgcccagcagaggagcacgcagctgaacaagaagagagccatccccaatcaggtgatccgcaggggctggctgaccatcaacaacatcagcctgatgaaaggcggctccaaggagtactggtttgtgctgactgccgagtcactgtcctggtacaaggatgaggaggagaaagagaagaagtacatgctgcctctggacaacctcaagatccgtgatgtggagaagggcttcatgtccaacaagcacgtcttcgccatcttcaacacggagcagagaaacgtctacaaggacctgcggcagatcgagctggcctgtgactcccaggaagacgtggacagctggaaggcctcgttcctccgagctggcgtctaccccgagaaggaccaggcagaaaacgaggatggggcccaggagaacaccttctccatggacccccaactggagcggcaggtggagaccattcgcaacctggtggactcatacgtggccatcatcaacaagtccatccgcgacctcatgccaaagaccatcatgcacctcatgatcaacaatacgaaggccttcatccaccacgagctgctggcctacctatactcctcggcagaccagagcagcctcatggaggagtcggctgaccaggcacagcggcgggacgacatgctgcgcatgtaccatgccctcaaggaggcgctcaacatcatcggtgacatcagcaccagcactgtgtccacgcctgtacccccgcctgtcgatgacacctggctccagagcgccagcagccacagccccactccacagcgccgaccggtgtccagcatacacccccctggccggcccccagcagtgaggggccccactccagggccccccctgattcctgttcccgtgggggcagcagcctccttctcggcgcccccaatcccatcccggcctggaccccagagcgtgtttgccaacagtgacctcttcccagccccgcctcagatcccatctcggccagttcggatccccccagggattcccccaggagtgcccagcagaagaccccctgctgcgcccagccggcccaccattatccgcccagccgagccatccctgctcgactaggcctcgaggggggcgtgctctcgggggggcctcacgcacccgcggcgcaggagcttcagtggtctggggccctccgccgcccctatgctgggaccaggctcccagtgggcagccctggcctcttccttaacgctggccccggtccagggccggcccctgtgcctggctggacaccgcactgcgcaaaggggccctggagctccaggcagggggcgctggggtgttgcactttgggggatggagtctcagggtggcagaggggggaccagaacccttgacaccatcctgaatgaggggtccagcctgggggggactctaccaaggtcttcttgggctgggaaagcccatgtagggcaggccttctataagtgcgggca

SEQ ID NO: 128417 - DNA, 868 bp, Homo sapiens
  Payload ID: 5137
  Gene Symbol: DNM2
  Gene Name: dynamin 2
  ENST ID: ENST00000587830
  CDS Start-End: 1-868
cgtgcagcactggcagctgagaggaagttcttcctctcccacccggcctaccggcacatggccgaccgcatgggcacgccacatctgcagaagacgctgaatcagcaactgaccaaccacatccgggagtcgctgccggccctacgtagcaaactacagagccagctgctgtccctggagaaggaggtggaggagtacaagaactttcggcccgacgaccccacccgcaaaaccaaagccctgctgcagatggtccagcagtttggggtggattttgagaagaggatcgagggctcaggagatcaggtggacactctggagctctccgggggcgcccgaatcaatcgcatcttccacgagcggttcccatttgagctggtgaagatggagtttgacgagaaggacttacgacgggagatcagctatgccattaagaacatccatggagtcaggacggggctcttcacccccgacatggcctttgaagccattgtgaaaaaacagattgtaaaactcaaagagccgagtttgaagtgtgttgatctcgtggtctcagagctggccacggtcataaaaaagtgtgccgagaagctcagttcctacccccggttgcgagaggagacagagcgaatcgtcaccacttacatccgggaacgggaggggagaacgaaggaccagattcttctgctgatcgacattgagcagtcctacatcaacacgaaccatgaggacttcatcgggtttgccaactgttactatactgagcagctggtgacctgtgcccagcagaggagcacgcagctgaacaagaagagagccatccccaatcaggtgatccgcaggggctggctgaccatcaacaacatca

SEQ ID NO: 128418 - DNA, 538 bp, Homo sapiens
  Payload ID: 5137
  Gene Symbol: DNM2
  Gene Name: dynamin 2
  ENST ID: ENST00000591818
  CDS Start-End: 1-510
ccagttcggatccccccagggattcccccaggagtgcccaggggctacgtgggcaccgggcgcttgtcctggaagaagcgcttgagcgtgcagacctgcagcacagccaccagcagcagcaccgccacgttgacagctgaccagaagttgacccgctccaagttgccctcttgcaggttgcggtcacgtgcctcgaaggcccgcagtagcgtgagcatctggatgctgcgctccagccgggtccgcatggtctcaatggactcctacagggcagcgggaggggaagggtcaggcctccctccacccatcagggagcagagaccaaaaaaaccgggggatacggagggaggctgtattaaccctgggaggtacagctgcaaacacagacttgttcaggctaagttcaaatcctcaccctgccactcactggctgtgaccatgagcaacttaattaacctatctgagcctgtttcctcttctataagcttccaaattgctgtgaacatttaatgcctaaataaatgtacaaggatgagca

SEQ ID NO: 128419 - DNA, 565 bp, Homo sapiens
  Payload ID: 5137
  Gene Symbol: DNM2
  Gene Name: dynamin 2
  ENST ID: ENST00000589106
  CDS Start-End: 1-413
cggctgaccaggcacagcggcgggacgacatgctgcgcatgtaccatgccctcaaggaggcgctcaacatcatcggtgacatcagcaccagcactgtgtccacgcctgtacccccgcctgtcgatgacacctggctccagagcgccagcagccacagccccactccacagcgccgaccggtgtccagcatacacccccctggccggcccccagcagtgaggggccccactccagggccccccctgattcctgttcccgtgggggcagcagcctccttctcggcgcccccaatcccatcccggcctggaccccagagcgtgtttgccaacagtgacctcttcccagccccgcctcagatcccatctcggccagttcggatccccccagggattcccccaggagtgcccaggtaaggccaaccccctgccctccaccccaactgcctgcaccctggggtctctcctcctgtctcacttcctcccagtgagctctcactacgtgcccagctgctggagtggaggaatcgtcctcatccctatttggcttgcgaggaaacaggcccaga

SEQ ID NO: 128420 - DNA, 551 bp, Homo sapiens
  Payload ID: 5137
  Gene Symbol: DNM2
  Gene Name: dynamin 2
  ENST ID: ENST00000586939
  CDS Start-End: 400-551
ctgggcagaggactccctgcaggggctccggagcaggcccgggccccaggggcggtgtcacgggccagggcgccgtaggacaggagggacttccttccccgcggttcaggaatcgtcacccggcggcctctcattctgcagctcatcttctcaaaaacagaacatgccgagtttttgcactgcaagtccaaaaagtttacagactttgatgaagtccggcaggagattgaagcagagaccgacagggtcacggggaccaacaaaggcatctccccagtgcccatcaaccttcgagtctactcgccacacgtgttgaacttgaccctcatcgacctcccgggtatcaccaaggtgcctgtgggcgaccagcctccagacatcgagtaccagatcaaggacatgatcctgcagttcatcagccgggagagcagcctcattctggctgtcacgcccgccaacatggacctggccaactccgacgccctcaagctggccaaggaagtcgatccccaaggcctacggaccatcggtgtcatcaccaagcttgacct

SEQ ID NO: 128421 - DNA, 2774 bp, Homo sapiens
  Payload ID: 5137
  Gene Symbol: DNM2
  Gene Name: dynamin 2
  Uniprot ID: P50570
  ENST ID: ENST00000585892
  CDS Start-End: 165-2774
gagaaccggatgaggcggcgaccgtgaggccgagccgggagcgggcgtcttgccgaggcccgggcgggcggggagcaacggctacagacgccgcggggccaggtcgttgagggtcggcggcgggcgaggagcgcagggcgctcgggccgggggccgccggcgccatgggcaaccgcgggatggaagagctgatcccgctggtcaacaaactgcaggacgccttcagctccatcggccagagctgccacctggacctgccgcagatcgctgtagtgggcggccagagcgccggcaagagctcggtgctggagaacttcgtgggccgggacttccttccccgcggttcaggaatcgtcacccggcggcctctcattctgcagctcatcttctcaaaaacagaacatgccgagtttttgcactgcaagtccaaaaagtttacagactttgatgaagtccggcaggagattgaagcagagaccgacagggtcacggggaccaacaaaggcatctccccagtgcccatcaaccttcgagtctactcgccacacgtgttgaacttgaccctcatcgacctcccgggtatcaccaaggtgcctgtgggcgaccagcctccagacatcgagtaccagatcaaggacatgatcctgcagttcatcagccgggagagcagcctcattctggctgtcacgcccgccaacatggacctggccaactccgacgccctcaagctggccaaggaagtcgatccccaaggcctacggaccatcggtgtcatcaccaagcttgacctgatggacgagggcaccgacgccagggacgtcttggagaacaagttgctcccgttgagaagaggctacattggcgtggtgaaccgcagccagaaggatattgagggcaagaaggacatccgtgcagcactggcagctgagaggaagttcttcctctcccacccggcctaccggcacatggccgaccgcatgggcacgccacatctgcagaagacgctgaatcagcaactgaccaaccacatccgggagtcgctgccggccctacgtagcaaactacagagccagctgctgtccctggagaaggaggtggaggagtacaagaactttcggcccgacgaccccacccgcaaaaccaaagccctgctgcagatggtccagcagtttggggtggattttgagaagaggatcgagggctcaggagatcaggtggacactctggagctctccgggggcgcccgaatcaatcgcatcttccacgagcggttcccatttgagctggtgaagatggagtttgacgagaaggacttacgacgggagatcagctatgccattaagaacatccatggagtcaggaccgggcttttcaccccggacttggcattcgaggccattgtgaaaaagcaggtcgtcaagctgaaagagccctgtctgaaatgtgtcgacctggttatccaggagctaatcaatacagttaggcagtgtaccagtaagctcagttcctacccccggttgcgagaggagacagagcgaatcgtcaccacttacatccgggaacgggaggggagaacgaaggaccagattcttctgctgatcgacattgagcagtcctacatcaacacgaaccatgaggacttcatcgggtttgccaatgcccagcagaggagcacgcagctgaacaagaagagagccatccccaatcagggggagatcctggtgatccgcaggggctggctgaccatcaacaacatcagcctgatgaaaggcggctccaaggagtactggtttgtgctgactgccgagtcactgtcctggtacaaggatgaggaggagaaagagaagaagtacatgctgcctctggacaacctcaagatccgtgatgtggagaagggcttcatgtccaacaagcacgtcttcgccatcttcaacacggagcagagaaacgtctacaaggacctgcggcagatcgagctggcctgtgactcccaggaagacgtggacagctggaaggcctcgttcctccgagctggcgtctaccccgagaaggaccaggcagaaaacgaggatggggcccaggagaacaccttctccatggacccccaactggagcggcaggtggagaccattcgcaacctggtggactcatacgtggccatcatcaacaagtccatccgcgacctcatgccaaagaccatcatgcacctcatgatcaacaatacgaaggccttcatccaccacgagctgctggcctacctatactcctcggcagaccagagcagcctcatggaggagtcggctgaccaggcacagcggcgggacgacatgctgcgcatgtaccatgccctcaaggaggcgctcaacatcatcggtgacatcagcaccagcactgtgtccacgcctgtacccccgcctgtcgatgacacctggctccagagcgccagcagccacagccccactccacagcgccgaccggtgtccagcatacacccccctggccggcccccagcagtgaggggccccactccagggccccccctgattcctgttcccgtgggggcagcagcctccttctcggcgcccccaatcccatcccggcctggaccccagagcgtgtttgccaacagtgacctcttcccagccccgcctcagatcccatctcggccagttcggatccccccagggattcccccaggagtgcccagaagaccccctgctgcgcccagccggcccaccattatccgcccagccgagccatccctgctcgactag

SEQ ID NO: 128422 - DNA, 3280 bp, Homo sapiens
  Payload ID: 5138
  Gene Symbol: DNM3
  Gene Name: dynamin 3
  Uniprot ID: Q9UQ16
  ENST ID: ENST00000355305
  CDS Start-End: 158-2767
agccaagcggcgggctggcggcgggctccgacgtctgcgccaggacctggctggctgagcccggcgcagcagcagcagccagggcagcgcggcccctactccctgtcaggtcgtagaggcgagcagggaccagctggtcgccggcccctcgggcaagatggggaaccgggagatggaggagctgatcccgctggtgaaccgtctgcaggacgcgttttcggcgctgggacagagctgcctgctggagctgccgcagatcgccgtggtgggcggccagagcgccggcaagagctcggtgctcgagaacttcgtgggcagggactttctccctcgagggtcgggcattgtaacaagacgacctcttgtgctgcagcttgttacttctaaagcagaatatgccgagtttctacattgcaaaggaaagaaatttacagattttgatgaagttcgccttgagattgaagcagaaacagatcgcgtgactggaatgaataaaggcatttcctccatacccattaatttacgagtctattccccacacgtgttaaatctaacccttattgatctacctggaataactaaagtgcctgtgggagatcagccaccagatatcgagtatcagatcagagaaatgattatgcagttcatcacgagggagaactgtctgattttagctgttactccagccaacactgatcttgcaaactcagatgcgctgaagctagctaaagaagttgatcctcaaggtctgagaaccattggagttatcaccaaactggaccttatggatgaaggaacggatgccagggatgttctagagaacaaactgttgcctcttcgcaggggttacgtgggggtggtaaacagaagccagaaggacatagatgggaagaaggacataaaggcagccatgctggcagagaggaagtttttcctttcccacccggcttacagacatatcgctgaccgaatgggaaccccacacctgcagaaggtccttaatcagcaacttaccaaccacattcgggataccctaccaaacttcaggaacaaactacagggacagttgctctccatagaacatgaagtagaagcctacaaaaatttcaaaccagaagacccaacaaggaagaccaaagcattgctgcagatggttcagcaatttgctgtggactttgagaagagaattgaagggtcaggggatcaagtagataccctggaactctcaggtggtgctaaaatcaatcgtatttttcatgaacgctttccttttgagatagtaaagatggagttcaatgagaaagaattgcgaagagaaataagctatgcaatcaaaaacatacatggtatcaggacagggttgtttactccagacatggcatttgaagcgatagtcaagaaacagattgtaaagttgaaagggccttccttgaagagtgtggatctggtaatacaagaattaatcaacactgtgaagaagtgtaccaaaaaactggcaaacttccccagactctgcgaggaaacggaaaggattgttgctaaccacattcgtgagcgagaagggaagacaaaggaccaggtattgctattgattgacattcaagtctcttacatcaacaccaaccatgaagacttcattggcttcgcaaatgctcagcagaggagcagtcaggttcacaagaaaaccacagttggaaatcagggaaccaatcttccgccttcaaggcaaattgtgattcgcaaggggtggctcaccatcagcaacattggcatcatgaaaggcggctcgaagggatactggttcgtccttactgcggaaagcttgtcctggtataaagatgatgaggaaaaagaaaagaagtacatgcttcccttggacaacctgaaagttcgggatgtggaaaagagctttatgtctagcaagcacatctttgcactctttaatacagagcaaaggaatgtatacaaagactatcgcttccttgagctggcatgtgattcccaggaggatgtcgacagctggaaggcatctctactaagagctggggtctatcctgacaaatctgtagctgaaaatgatgagaatggacaagcagaaaacttttccatggacccacaattggagaggcaagtggagaccattcgcaacctcgtagactcctacatgtccattatcaacaaatgtatccgagatctaattccaaaaacaataatgcaccttatgatcaataacgttaaagatttcataaattccgagctcctagcacagttgtattcttcagaggaccaaaataccctgatggaggaatctgctgagcaggctcagcgccgggatgagatgcttcgaatgtatcaagcactgaaagaagcccttgggataattggggacatcagcacagccaccgtgtccactccggcaccccctccagtggatgactcctggatacagcactctcgcaggtcacctcctccaagccccacaacccaaaggaggccaacactaagtgctcccctcgcaaggcccacatccggccgaggaccagctcctgccattccctctcctggcccccactctggggctcctccagtcccattccgtccaggcccattacctcctttccccagcagcagtgactccttcggagcccctccacaagttccatctaggcctacgagggccccgcccagtgtcccaagccggagaccacccccatcaccaactcgtcccactataatccgcccactagaatcctccctgttagactaaacgaagtgtctggcatggcaattaatcactaatgaattatgcgaaagcaacatatttgataaccgttgcagtaaatcatgagtagtcgcatgtgtggacatcagtaggcaagtaaccagttttactaatgcattcatcgctcatcttcattgctcatggtatgtcaaacctttggggtttgactcagaaactgctaaccttttagaggctttatatgttgtactgaccaaggtaggtttgtatagcagccctatactttggggatcatttgcctaccatggcatatatttgaaattgctttggacaagttttctaggctatctaccaggtagctcattaaacgtaattcttcagatatgagatagtgggcttagacctaagccatacatatttcttttcccacattctgtttaggatgacagtaattctgttgtctaccattaatgctactacctactccataattgcctatttagctcctcttttcttcctttttatttcataagactgcta

SEQ ID NO: 128423 - DNA, 7613 bp, Homo sapiens
  Payload ID: 5138
  Gene Symbol: DNM3
  Gene Name: dynamin 3
  Uniprot ID: Q9UQ16
  ENST ID: ENST00000367731
  CDS Start-End: 158-2737
agccaagcggcgggctggcggcgggctccgacgtctgcgccaggacctggctggctgagcccggcgcagcagcagcagccagggcagcgcggcccctactccctgtcaggtcgtagaggcgagcagggaccagctggtcgccggcccctcgggcaagatggggaaccgggagatggaggagctgatcccgctggtgaaccgtctgcaggacgcgttttcggcgctgggacagagctgcctgctggagctgccgcagatcgccgtggtgggcggccagagcgccggcaagagctcggtgctcgagaacttcgtgggcagggactttctccctcgagggtcgggcattgtaacaagacgacctcttgtgctgcagcttgttacttctaaagcagaatatgccgagtttctacattgcaaaggaaagaaatttacagattttgatgaagttcgccttgagattgaagcagaaacagatcgcgtgactggaatgaataaaggcatttcctccatacccattaatttacgagtctattccccacacgtgttaaatctaacccttattgatctacctggaataactaaagtgcctgtgggagatcagccaccagatatcgagtatcagatcagagaaatgattatgcagttcatcacgagggagaactgtctgattttagctgttactccagccaacactgatcttgcaaactcagatgcgctgaagctagctaaagaagttgatcctcaaggtctgagaaccattggagttatcaccaaactggaccttatggatgaaggaacggatgccagggatgttctagagaacaaactgttgcctcttcgcaggggttacgtgggggtggtaaacagaagccagaaggacatagatgggaagaaggacataaaggcagccatgctggcagagaggaagtttttcctttcccacccggcttacagacatatcgctgaccgaatgggaaccccacacctgcagaaggtccttaatcagcaacttaccaaccacattcgggataccctaccaaacttcaggaacaaactacagggacagttgctctccatagaacatgaagtagaagcctacaaaaatttcaaaccagaagacccaacaaggaagaccaaagcattgctgcagatggttcagcaatttgctgtggactttgagaagagaattgaagggtcaggggatcaagtagataccctggaactctcaggtggtgctaaaatcaatcgtatttttcatgaacgctttccttttgagatagtaaagatggagttcaatgagaaagaattgcgaagagaaataagctatgcaatcaaaaacatacatggtatcaggacagggttgtttactccagacatggcatttgaagcgatagtcaagaaacagattgtaaagttgaaagggccttccttgaagagtgtggatctggtaatacaagaattaatcaacactgtgaagaagtgtaccaaaaaactggcaaacttccccagactctgcgaggaaacggaaaggattgttgctaaccacattcgtgagcgagaagggaagacaaaggaccaggtattgctattgattgacattcaagtctcttacatcaacaccaaccatgaagacttcattggcttcgcaaatgctcagcagaggagcagtcaggttcacaagaaaaccacagttggaaatcaggtgattcgcaaggggtggctcaccatcagcaacattggcatcatgaaaggcggctcgaagggatactggttcgtccttactgcggaaagcttgtcctggtataaagatgatgaggaaaaagaaaagaagtacatgcttcccttggacaacctgaaagttcgggatgtggaaaagagctttatgtctagcaagcacatctttgcactctttaatacagagcaaaggaatgtatacaaagactatcgcttccttgagctggcatgtgattcccaggaggatgtcgacagctggaaggcatctctactaagagctggggtctatcctgacaaatctgtagctgaaaatgatgagaatggacaagcagaaaacttttccatggacccacaattggagaggcaagtggagaccattcgcaacctcgtagactcctacatgtccattatcaacaaatgtatccgagatctaattccaaaaacaataatgcaccttatgatcaataacgttaaagatttcataaattccgagctcctagcacagttgtattcttcagaggaccaaaataccctgatggaggaatctgctgagcaggctcagcgccgggatgagatgcttcgaatgtatcaagcactgaaagaagcccttgggataattggggacatcagcacagccaccgtgtccactccggcaccccctccagtggatgactcctggatacagcactctcgcaggtcacctcctccaagccccacaacccaaaggaggccaacactaagtgctcccctcgcaaggcccacatccggccgaggaccagctcctgccattccctctcctggcccccactctggggctcctccagtcccattccgtccaggcccattacctcctttccccagcagcagtgactccttcggagcccctccacaagttccatctaggcctacgagggccccgcccagtgtcccaagccggagaccacccccatcaccaactcgtcccactataatccgcccactagaatcctccctgttagactaaacgaagtgtctggcatggcaattaatcactaatgaattatgcgaaagcaacatatttgataaccgttgcagtaaatcatgagtagtcgcatgtgtggacatcagtaggcaagtaaccagttttactaatgcattcatcgctcatcttcattgctcatggtatgtcaaacctttggggtttgactcagaaactgctaaccttttagaggctttatatgttgtactgaccaaggtaggtttgtatagcagccctatactttggggatcatttgcctaccatggcatatatttgaaattgctttggacaagttttctaggctatctaccaggtagctcattaaacgtaattcttcagatatgagatagtgggcttagacctaagccatacatatttcttttcccacattctgtttaggatgacagtaattctgttgtctaccattaatgctactacctactccataattgcctatttagctcctcttttcttcctttttatttcataagactgctaggaagtgattttttaaaattaggactccttaagaataaacttttccagaagcacgaggtagtttgcaaaggaaaagtctgcactgtttgctctaaagagcttctcctcattccaatgtgttttgcttcatgctagaagcatatgcaacagtgaataaaagcttctttttttgttaatcagtcaataaatttggctaattagtttcagagttcaaggaagaagcaaaatatcacatctctagaagtgttgggaaaaatataatttctttctttacttatattcacctcatggtaggttatattgaaggctgacatggagaatgtttacttttctatttggcatagctaactacactttgatactaactccagttttactattattattttggttggaaaaaaaattcactctttacgtgctaatttgtaatcttgttttgtaagaatttatcctacccttgaaacaggctcagtgtaactgtatatccattctaggctttcttaataaatcttgaggctatgggataatcacatttaaagaatggttcctgaaatgaagtcagtagaaatggcatgggataagagcagagctcacacttttacagttgcagtatttcaaagtccctatccaggtcactccagaaaagggtattgaaacgttgaaatctaaagcaaatttgcaatttcttaagatttctaaaatttaccagaacagtttagcctgggggttaatagttaagtcttgaggctaagttttggactaccaaggaccagatgattcacatgtaggaaacagccagaagccaactggaattttgtgtgctaactgttcccagacagcagagcaagtattcactgagtaggggtgtcccatgacactatttcatattctacagaagtaaatcaggtttcaccaactgaaatgtctccctttgaaagtagcaaacatgatttgtatgttaacttaactttaatttcctgtgtagtttacacccagagcagatactcataaagtataaagtaaaaacttttaaccattattaaacagagaacttgccatgttgagtgccattgtattgaacttattctaaaggcttatgctaacccatttataattggtaaaaatcagaaaatacaagatttacataaaggtcatttcaacttttaaggttaccagtgattgtataaaaacatcacaatcctaaatcctctcgtatctcaccccaaaccccaaactgggggaaaaaaagttaactctttgtgaatggaaccaatgtgcaagatacatactgcatttttaaaatagtgtctcagctaaatggaaaactgttaagcaaacatccatagtaaaacaaataatcttcagtgagatctttttataaaacttcttgtttttaggattccctttgcttcttcctttgaattctctaaaataggcagctaacggattatatacttcagggtttggctttgtgctaaatgtggttttgtgttttgctgtatttcaaaattttccttctgttaaaggaaaatattgtgaataaccactggtgtgttcttagatcagcacaaaccatgtcaaaaaaaattggagatttttttccaattttccttccactgatcttaggcagtaataaacaatggcatttgtcatctttggcacttgcttttagattatagtcccacagttgcactgccccaattgtctacctttgtgggtacatttttgttctttactcctaagttatttctcatagaacccagcctactctagaatttcagcagtgacattggagaatatttttaatttgctgcagtactatgtcatattattagtatgaatctcatttcccaaagggtttgtattctgctaaaaggagatgccaatgttgaatgaagtctgaaactctagtatgtgcatagtttgacgtgcagcatgcacaccaggccttaagatgggaatgtagcttaatgattttctgtttcccataccatttctaatcttttgtgtaattttctcttaactgattgctctgatattgtaaacacaatagatgtagctctatcatgtctagcataatttaaaaaatcagtgtttttaggatttgggaaaataaactgtaaatgtttatttgataggtaaatatagttttattgtcacatgctaaatattgcatgcatattgactaattggaataaccatttactcaattatggacagcttattgaaatagtattgatttagaaaaagtatattgcatttctaaaaaacatctaccaaggttactcgtctgaatattgcttttagccgtgttttataacatagacgagcagtagggtctgtttattagcaaatttcctatttgttccaatacaaactcactttattctaaagtatattaatgaaaccagttcctgtgatgtaactgtaagccttctcgacttagacttaaaaagtggtcacatagattaattttgtgactttttagtatagactgtagccataattctcaaatatgaaatgggacctaataccagtatgtgataaatgttgatgttttctgtgtacaaacacattttctatgcatgtgtctctgtgtatatggcatatacctagtaagtatgtttctgtaagtatgtgtattttatgtccatttgagtaggtaggtaggttttaaaaatactagttaaaatgccacaagcatgagtgtgattgtatgtgcactgtgtgtatatatataaatatatgtatatgtatggttgtaaatatctatgtatacatgtacttagtatgtgtggtatcaggatattttttaaactgtgataatacaacagatagctttgaatgatctgccataacatgtggtaacaatagttcatttctcataacatatatgaggtatacaaaattttctaactccagattgtagtcattttgagaggtacaaagctcataattaccatgacaacatggtaatgtccatagacatttgtatctgaatccacaagaagatctgaatctaagaaggaattacctttgacaatatttttcggtaagaagtaaaacctctggagacctatctttaagatctctaattggaattataaattatttttggattgctgagctgaatcttaaaaagccaagttgatatacatagtcatttttcctctatggtagaagtaaaaaaaaaaaaaaaggacatagcaacattaaagtagtggatttttctgagtaaatttgctgaaaatataagagagaagctatctaataccttggaggtaggtcatccactttttcaggtaaacatttttcatttggcaaatggcataattatttgaaagtgacaggaatctcctcagaatgaagaataaagcctactaggtctctaactgttgaactcatgaaagaagatagtgtatgagacttaagccatgagttttgtatcatttcaattagaagactactagctgtgagctcagagtttaatgtaaatgaatctagatgattttgaagaaatgattattcgttcaccagatcactcattgtacattctaaaaagctcaaatgagtcttctagatactcttactcatcctgtctggttgctatgtttaaaattatgtggtgctgtgtaggtgaaactttaagaatatttttgaagcatatgtaatatatgcactgctatttgtgtgtgtgtgtgtgtctttgtatatatgtaagaatgtgtgtatgtgtgagagcaagagagaggaaactcaaagaggagtgtttgtcttaagacctgttcatactggtatattggtgagacttctcacttctggttggaggtttcacatatggctcaactcaagtcattaatctctttttaatttttactcttgaattccttaaacttcgctcattatgaaatgttttaaaattatgacaaaaattactctgtctaaccacttgccttgtctgctaccagtttgttaaaaattattccccccaaccagtaattccaccagtactacttgatttgtgttatatttcctatgtacatgtacagcctttgttttgcttgcttgtctatttttactttcccttttttgggtcaaatttttcttttgctttgtttgaagaaggaatatacagaagtaaaatcttgtcttctctgctgattctttaattaatatgagccggatactttccactgtcttcttggcactttcaggatttcttaatgctgatatatggactcttagaatggaatttttgaagaaaaatctcaaagcctgtatcgttcttgaaggtcacatgtacctattgtgaaaatgtgaagctgtatttctgaagctgaaataaattataacatttgaagga

SEQ ID NO: 128424 - DNA, 2322 bp, Homo sapiens
  Payload ID: 5138
  Gene Symbol: DNM3
  Gene Name: dynamin 3
  Uniprot ID: Q9UQ16
  ENST ID: ENST00000367733
  CDS Start-End: 160-1827
agagccaagcggcgggctggcggcgggctccgacgtctgcgccaggacctggctggctgagcccggcgcagcagcagcagccagggcagcgcggcccctactccctgtcaggtcgtagaggcgagcagggaccagctggtcgccggcccctcgggcaagatggggaaccgggagatggaggagctgatcccgctggtgaaccgtctgcaggacgcgttttcggcgctgggacagagctgcctgctggagctgccgcagatcgccgtggtgggcggccagagcgccggcaagagctcggtgctcgagaacttcgtgggcagggactttctccctcgagggtcgggcattgtaacaagacgacctcttgtgctgcagcttgttacttctaaagcagaatatgccgagtttctacattgcaaaggaaagaaatttacagattttgatgaagttcgccttgagattgaagcagaaacagatcgcgtgactggaatgaataaaggcatttcctccatacccattaatttacgagtctattccccacacgtgttaaatctaacccttattgatctacctggaataactaaagtgcctgtgggagatcagccaccagatatcgagtatcagatcagagaaatgattatgcagttcatcacgagggagaactgtctgattttagctgttactccagccaacactgatcttgcaaactcagatgcgctgaagctagctaaagaagttgatcctcaaggtctgagaaccattggagttatcaccaaactggaccttatggatgaaggaacggatgccagggatgttctagagaacaaactgttgcctcttcgcaggggttacgtgggggtggtaaacagaagccagaaggacatagatgggaagaaggacataaaggcagccatgctggcagagaggaagtttttcctttcccacccggcttacagacatatcgctgaccgaatgggaaccccacacctgcagaaggtccttaatcagcaacttaccaaccacattcgggataccctaccaaacttcaggaacaaactacagggacagttgctctccatagaacatgaagtagaagcctacaaaaatttcaaaccagaagacccaacaaggaagaccaaagcattgctgcagatggttcagcaatttgctgtggactttgagaagagaattgaagggtcaggggatcaagtagataccctggaactctcaggtggtgctaaaatcaatcgtatttttcatgaacgctttccttttgagatagtaaagatggagttcaatgagaaagaattgcgaagagaaataagctatgcaatcaaaaacatacatggtatcaggacagggttgtttactccagacatggcatttgaagcgatagtcaagaaacagattgtaaagttgaaagggccttccttgaagagtgtggatctggtaatacaagaattaatcaacactgtgaagaagtgtaccaaaaaactggcaaacttccccagactctgcgaggaaacggaaaggattgttgctaaccacattcgtgagcgagaagggaagacaaaggaccaggtattgctattgattgacattcaagtctcttacatcaacaccaaccatgaagacttcattggcttcgcaaatgctcagcagaggagcagtcaggttcacaagaaaaccacagttggaaatcaggtgattcgcaaggggtggctcaccatcagcaacattggcatcatgaaaggcggctcgaagggatactggttcgtccttactgcggaaagcttgtcctggtataaagatgatgagaacatttagtcttggcgaggataaccaacttaccaaagtcacacagctagttggtggcaaagcagaaatttgaacccaggctgttgagctccagagcctatgctttcaaccacaaataaaggcaagaatcccagagatgcctggagttgtccaagccaacctcatcccacagaggacttatgaagatgaattccaggcatctcagcattgacatgttcctgggtgttagcagcagagacactgaagactctggagtagctactgctgttggagtgtggcattagtctggctctgtgagtcctgaaaataagcccattggaaggtataggatgctctctgtagggaaggaagaagctttgaaggcttggtgagctcttggttattggctcatctcctctcctccagactcaggataattctttacaaaatcactgcccttgtagcttccttatgagtacttgattacaacaaatggaaaataaatatgcacagttataatattaa

SEQ ID NO: 128425 - DNA, 815 bp, Homo sapiens
  Payload ID: 5138
  Gene Symbol: DNM3
  Gene Name: dynamin 3
  ENST ID: ENST00000485254
  CDS Start-End: 1-666
gctgaaaatgatgagaatggacaagcagaaaacttttccatggacccacaattggagaggcaagtggagaccattcgcaacctcgtagactcctacatgtccattatcaacaaatgtatccgagatctaattccaaaaacaataatgcaccttatgatcaataacgttaaagatttcataaattccgagctcctagcacagttgtattcttcagaggaccaaaataccctgatggaggaatctgctgagcaggctcagcgccgggatgagatgcttcgaatgtatcaagcactgaaagaagcccttgggataattggggacatcagcacagccaccgtgtccactccggcaccccctccagtggatgactcctggatacagcactctcgcaggtcacctcctccaagccccacaacccaaaggaggccaacactaagtgctcccctcgcaaggcccacatccggccgaggaccagctcctgccattccctctcctggcccccactctggggctcctccagtcccattccgtccaggcccattacctcctttccccagcagcagtgactccttcggagcccctccacaagttccatctaggcctacgagggccccgcccagtgtcccaaggcgaccccctcctgcagttccaggacgaccatcctaacccccatcattcatctccttttgtttccaacaacatgtctatccatggtatttaaaagcttttcatttgcactatatgtcgtatgtacataaaaacttttatttttcatccatgtgtataataaaaacaaagtttattctatataaaaa

SEQ ID NO: 128426 - DNA, 1554 bp, Homo sapiens
  Payload ID: 5138
  Gene Symbol: DNM3
  Gene Name: dynamin 3
  ENST ID: ENST00000523513
  CDS Start-End: 220-1554
ctgcatcctactgctattttcattttatcgatggaatactttgaagcacgaaaaatcattatatcttgaaataatttttaaaataatccaataacaaactcagaactactgaagaataataaagaatatgccgagtttctacattgcaaaggaaagaaatttacagattttgatgaagttcgccttgagattgaagcagaaacagatcgcgtgactggaatgaataaaggcatttcctccatacccattaatttacgagtctattccccacacgtgttaaatctaacccttattgatctacctggaataactaaagtgcctgtgggagatcagccaccagatatcgagtatcagatcagagaaatgattatgcagttcatcacgagggagaactgtctgattttagctgttactccagccaacactgatcttgcaaactcagatgcgctgaagctagctaaagaagttgatcctcaaggtctgagaaccattggagttatcaccaaactggaccttatggatgaaggaacggatgccagggatgttctagagaacaaactgttgcctcttcgcaggggttacgtgggggtggtaaacagaagccagaaggacatagatgggaagaaggacataaaggcagccatgctggcagagaggaagtttttcctttcccacccggcttacagacatatcgctgaccgaatgggaaccccacacctgcagaaggtccttaatcagcaacttaccaaccacattcgggataccctaccaaacttcaggaacaaactacagggacagttgctctccatagaacatgaagtagaagcctacaaaaatttcaaaccagaagacccaacaaggaagaccaaagcattgctgcagatggttcagcaatttgctgtggactttgagaagagaattgaagggtcaggggatcaagtagataccctggaactctcaggtggtgctaaaatcaatcgtatttttcatgaacgctttccttttgagatagtaaagatggagttcaatgagaaagaattgcgaagagaaataagctatgcaatcaaaaacatacatggtatcaggacagggttgtttactccagacatggcatttgaagcgatagtcaagaaacagattgtaaagttgaaagggccttccttgaagagtgtggatctggtaatacaagaattaatcaacactgtgaagaagtgtaccaaaaaactggcaaacttccccagactctgcgaggaaacggaaaggattgttgctaaccacattcgtgagcgagaagggaagacaaaggaccaggtattgctattgattgacattcaagtctcttacatcaacaccaaccatgaagacttcattggcttcgcaaatgctcagcagaggagcagtcaggttcacaagaaaaccacagttggaaatcaggtgattcgcaaggggtggctcaccatcagcaacattggcatcatgaaaggcggctcgaagggatactggttcgtccttactgcggaaagcttgtcctggtataaagatgatgaggaaaaa

SEQ ID NO: 128427 - DNA, 4454 bp, Homo sapiens
  Payload ID: 5138
  Gene Symbol: DNM3
  Gene Name: dynamin 3
  ENST ID: ENST00000520906
  CDS Start-End: 129-2048
gacgtctgcgccaggacctggctggctgagcccggcgcagcagcagcagccagggcagcgcggcccctactccctgtcaggtcgtagaggcgagcagggaccagctggtcgccggcccctcgggcaagatggggaaccgggagatggaggagctgatcccgctggtgaaccgtctgcaggacgcgttttcggcgctgggacagagctgcctgctggagctgccgcagatcgccgtggtgggcggccagagcgccggcaagagctcggtgctcgagaacttcgtgggcagggactttctccctcgagggtcgggcattgtaacaagacgacctcttgtgctgcagcttgttacttctaaagcagaatatgccgagtttctacattgcaaaggaaagaaatttacagattttgatgaagttcgccttgagattgaagcagaaacagatcgcgtgactggaatgaataaaggcatttcctccatacccattaatttacgagtctattccccacacgtgttaaatctaacccttattgatctacctggaataactaaagtgcctgtgggagatcagccaccagatatcgagtatcagatcagagaaatgattatgcagttcatcacgagggagaactgtctgattttagctgttactccagccaacactgatcttgcaaactcagatgcgctgaagctagctaaagaagttgatcctcaaggtctgagaaccattggagttatcaccaaactggaccttatggatgaaggaacggatgccagggatgttctagagaacaaactgttgcctcttcgcaggggttacgtgggggtggtaaacagaagccagaaggacatagatgggaagaaggacataaaggcagccatgctggcagagaggaagtttttcctttcccacccggcttacagacatatcgctgaccgaatgggaaccccacacctgcagaaggtccttaatcagcaacttaccaaccacattcgggataccctaccaaacttcaggaacaaactacagggacagttgctctccatagaacatgaagtagaagcctacaaaaatttcaaaccagaagacccaacaaggaagaccaaagcattgctgcagatggttcagcaatttgctgtggactttgagaagagaattgaagggtcaggggatcaagtagataccctggaactctcaggtggtgctaaaatcaatcgtatttttcatgaacgctttccttttgagatagtaaagatggagttcaatgagaaagaattgcgaagagaaataagctatgcaatcaaaaacatacatggtatcaggacagggttgtttactccagacatggcatttgaagcgatagtcaagaaacagattgtaaagttgaaagggccttccttgaagagtgtggatctggtaatacaagaattaatcaacactgtgaagaagtgtaccaaaaaactggcaaacttccccagactctgcgaggaaacggaaaggattgttgctaaccacattcgtgagcgagaagggaagacaaaggaccaggtattgctattgattgacattcaagtctcttacatcaacaccaaccatgaagacttcattggcttcgcaaatgctcagcagaggagcagtcaggttcacaagaaaaccacagttggaaatcaggtgattcgcaaggggtggctcaccatcagcaacattggcatcatgaaaggcggctcgaagggatactggttcgtccttactgcggaaagcttgtcctggtataaagatgatgaggaaaaagaaaagaagtacatgcttcccttggacaacctgaaagttcgggatgtggaaaagagctttatgtctagcaagcacatctttgcactctttaatacagagcaaaggaatgtatacaaagactatcgcttccttgagctggcatgtgattcccaggaggatgtcgacagctggaaggcatctctactaagagctggggtctatcctgacaaatctgtagtaagttggatatatctcttatgtaaaaattattattagctatgcttaagaaaatattaatcctacataccataagctggagaaactagttttcttactgacttaattaattagttacacttttagctgatacttcgcttactctttttatattttttaacaatgctttttctctgttagatttctatttgaagaagttaaacaatatatttgttaaagaaaatgtcctactcagccataaaacacatatgcaatctcagctcaagacaaagtttgttttatttcaaaatttcatttttctctatatgctttttcatacttatcatggtattaatacaatcagtatatcatcaatcataacaccagcattttgacttgcttaaaatatactcattttaataaaaatctatcccctttcattatgtctatattccctgtatccataagtatatctgtgtgcaaactctgtttaatatcctcatgagtgtgaaagaacaaaaagaaatatattgctatttccacttgtctttattaatatgcttcacgtgtctttaagacacttctctcattcaagttaataaacagaccttttctttgtgttctttggaaaatgtaatattacacagactagtctaaatttaaacagaagtctcacccaacatatgtgcacccaccgttaaacagactctgccactgagtggacctctccacttgctgcttcctcctgtatatctagattatccaggtttctccccagaactaaagtactgagactaagccttggggatttagttcagcttaactcctgaggtgcctacttggctctcgatcagtttataggaatgatcatgcatgagttgggtcctttttaggttcaaaatagggagagagtcttttcaagagaaagtctgagatatgggtgaaacataggacaattaaagtatttctaggggggtttcagggctgaccacatctctggggttatactaaaatgtaacagagtttcaggaatacaggattgaggacttgcaccaaaatgtcgtcctctctgctgttattttaactcacacatagacctctttatgccattgcatgctatacttgtcatcctatacctgtctgacacctaaaacaatgaacctcccacaatatgctttgtgccctccaaatggaagttaaactagatgctttcctgtcaatagccaggagtacagaagcacgcatatatgattttcataattgttgtcgagttgttctcctgttatatgcgtagatatttgcatagatatataccactctaaagactacatgtgagaagtcattaaacatcagagtaccacttttacttttgtttttaactctattacttattactcttccctatccattgatggtagtgtgtttaatttcacaaatgttctatattaaaaatgcacacatacctaattttttattaactcattccacacaaacctttggagcatatgctttttgccagctgccattctaggccctggtgatacagaggtgaacaatagcaataaagtcctgcccccactggagcagacattaaacaagggagtgaataacgataattgtgcaccattatttaagatagtgataagttctataaaatgttaagtaagttaaagggacagacagtgagagtaaggggcaggcaagctttatttttgtcaaggtgatgagggaaggcctctttgaagagttgacattagagcaggctcttcaaagaagggagggagtaaaggatctggaagtctgaagaagagtattcttggcagaagatagcaagtgcaaaaccaagctcagtgtcttagaggagcagcaaggccagtgtgtctggaacactgtgagggaagacaaaggtggtagttggttaacaaggaaagaggtcagggaccaggtgatgtaggccttgaaggatggggcgagccttttgaattttattctaagtgagatggaagccactactaggtttcaagtcacttagtgacgatttatatatttaaaagctcattatggttgagaatgatgagaggtagtaaagcatgtgagttcaagcagggctgttgtgtcacaccacttatatttacattccaggtgcttacttccaagctgtgaggtcttgggcaggttacctagccttttcacatttcaagattcttatttctgagatgaagataacagtagtcttttatagggcggttgataggattgaatgagataatgcagggaaagcattgaacagggcaggtacaagtaagcactatattttcacttataattataattattatgattcttattatgaacattttcatcaaaactactttctttaacagctaggggaaggttgaaatactgtgaatattatcatacagcccagtgagattataaatactttgttattttctatcttccaaa

SEQ ID NO: 128428 - DNA, 7625 bp, Homo sapiens
  Payload ID: 5138
  Gene Symbol: DNM3
  Gene Name: dynamin 3
  Uniprot ID: Q9UQ16
  ENST ID: ENST00000627582
  CDS Start-End: 158-2749
agccaagcggcgggctggcggcgggctccgacgtctgcgccaggacctggctggctgagcccggcgcagcagcagcagccagggcagcgcggcccctactccctgtcaggtcgtagaggcgagcagggaccagctggtcgccggcccctcgggcaagatggggaaccgggagatggaggagctgatcccgctggtgaaccgtctgcaggacgcgttttcggcgctgggacagagctgcctgctggagctgccgcagatcgccgtggtgggcggccagagcgccggcaagagctcggtgctcgagaacttcgtgggcagggactttctccctcgagggtcgggcattgtaacaagacgacctcttgtgctgcagcttgttacttctaaagcagaatatgccgagtttctacattgcaaaggaaagaaatttacagattttgatgaagttcgccttgagattgaagcagaaacagatcgcgtgactggaatgaataaaggcatttcctccatacccattaatttacgagtctattccccacacgtgttaaatctaacccttattgatctacctggaataactaaagtgcctgtgggagatcagccaccagatatcgagtatcagatcagagaaatgattatgcagttcatcacgagggagaactgtctgattttagctgttactccagccaacactgatcttgcaaactcagatgcgctgaagctagctaaagaagttgatcctcaaggtctgagaaccattggagttatcaccaaactggaccttatggatgaaggaacggatgccagggatgttctagagaacaaactgttgcctcttcgcaggggttacgtgggggtggtaaacagaagccagaaggacatagatgggaagaaggacataaaggcagccatgctggcagagaggaagtttttcctttcccacccggcttacagacatatcgctgaccgaatgggaaccccacacctgcagaaggtccttaatcagcaacttaccaaccacattcgggataccctaccaaacttcaggaacaaactacagggacagttgctctccatagaacatgaagtagaagcctacaaaaatttcaaaccagaagacccaacaaggaagaccaaagcattgctgcagatggttcagcaatttgctgtggactttgagaagagaattgaagggtcaggggatcaagtagataccctggaactctcaggtggtgctaaaatcaatcgtatttttcatgaacgctttccttttgagatagtaaagatggagttcaatgagaaagaattgcgaagagaaataagctatgcaatcaaaaacatacatggtatcaggacagggttgtttactccagacatggcatttgaagcgatagtcaagaaacagattgtaaagttgaaagggccttccttgaagagtgtggatctggtaatacaagaattaatcaacactgtgaagaagtgtaccaaaaaactggcaaacttccccagactctgcgaggaaacggaaaggattgttgctaaccacattcgtgagcgagaagggaagacaaaggaccaggtattgctattgattgacattcaagtctcttacatcaacaccaaccatgaagacttcattggcttcgcaaatgctcagcagaggagcagtcaggttcacaagaaaaccacagttggaaatcaggtgattcgcaaggggtggctcaccatcagcaacattggcatcatgaaaggcggctcgaagggatactggttcgtccttactgcggaaagcttgtcctggtataaagatgatgaggaaaaagaaaagaagtacatgcttcccttggacaacctgaaagttcgggatgtggaaaagagctttatgtctagcaagcacatctttgcactctttaatacagagcaaaggaatgtatacaaagactatcgcttccttgagctggcatgtgattcccaggaggatgtcgacagctggaaggcatctctactaagagctggggtctatcctgacaaatctgtagggaacaacaaagctgaaaatgatgagaatggacaagcagaaaacttttccatggacccacaattggagaggcaagtggagaccattcgcaacctcgtagactcctacatgtccattatcaacaaatgtatccgagatctaattccaaaaacaataatgcaccttatgatcaataacgttaaagatttcataaattccgagctcctagcacagttgtattcttcagaggaccaaaataccctgatggaggaatctgctgagcaggctcagcgccgggatgagatgcttcgaatgtatcaagcactgaaagaagcccttgggataattggggacatcagcacagccaccgtgtccactccggcaccccctccagtggatgactcctggatacagcactctcgcaggtcacctcctccaagccccacaacccaaaggaggccaacactaagtgctcccctcgcaaggcccacatccggccgaggaccagctcctgccattccctctcctggcccccactctggggctcctccagtcccattccgtccaggcccattacctcctttccccagcagcagtgactccttcggagcccctccacaagttccatctaggcctacgagggccccgcccagtgtcccaagccggagaccacccccatcaccaactcgtcccactataatccgcccactagaatcctccctgttagactaaacgaagtgtctggcatggcaattaatcactaatgaattatgcgaaagcaacatatttgataaccgttgcagtaaatcatgagtagtcgcatgtgtggacatcagtaggcaagtaaccagttttactaatgcattcatcgctcatcttcattgctcatggtatgtcaaacctttggggtttgactcagaaactgctaaccttttagaggctttatatgttgtactgaccaaggtaggtttgtatagcagccctatactttggggatcatttgcctaccatggcatatatttgaaattgctttggacaagttttctaggctatctaccaggtagctcattaaacgtaattcttcagatatgagatagtgggcttagacctaagccatacatatttcttttcccacattctgtttaggatgacagtaattctgttgtctaccattaatgctactacctactccataattgcctatttagctcctcttttcttcctttttatttcataagactgctaggaagtgattttttaaaattaggactccttaagaataaacttttccagaagcacgaggtagtttgcaaaggaaaagtctgcactgtttgctctaaagagcttctcctcattccaatgtgttttgcttcatgctagaagcatatgcaacagtgaataaaagcttctttttttgttaatcagtcaataaatttggctaattagtttcagagttcaaggaagaagcaaaatatcacatctctagaagtgttgggaaaaatataatttctttctttacttatattcacctcatggtaggttatattgaaggctgacatggagaatgtttacttttctatttggcatagctaactacactttgatactaactccagttttactattattattttggttggaaaaaaaattcactctttacgtgctaatttgtaatcttgttttgtaagaatttatcctacccttgaaacaggctcagtgtaactgtatatccattctaggctttcttaataaatcttgaggctatgggataatcacatttaaagaatggttcctgaaatgaagtcagtagaaatggcatgggataagagcagagctcacacttttacagttgcagtatttcaaagtccctatccaggtcactccagaaaagggtattgaaacgttgaaatctaaagcaaatttgcaatttcttaagatttctaaaatttaccagaacagtttagcctgggggttaatagttaagtcttgaggctaagttttggactaccaaggaccagatgattcacatgtaggaaacagccagaagccaactggaattttgtgtgctaactgttcccagacagcagagcaagtattcactgagtaggggtgtcccatgacactatttcatattctacagaagtaaatcaggtttcaccaactgaaatgtctccctttgaaagtagcaaacatgatttgtatgttaacttaactttaatttcctgtgtagtttacacccagagcagatactcataaagtataaagtaaaaacttttaaccattattaaacagagaacttgccatgttgagtgccattgtattgaacttattctaaaggcttatgctaacccatttataattggtaaaaatcagaaaatacaagatttacataaaggtcatttcaacttttaaggttaccagtgattgtataaaaacatcacaatcctaaatcctctcgtatctcaccccaaaccccaaactgggggaaaaaaagttaactctttgtgaatggaaccaatgtgcaagatacatactgcatttttaaaatagtgtctcagctaaatggaaaactgttaagcaaacatccatagtaaaacaaataatcttcagtgagatctttttataaaacttcttgtttttaggattccctttgcttcttcctttgaattctctaaaataggcagctaacggattatatacttcagggtttggctttgtgctaaatgtggttttgtgttttgctgtatttcaaaattttccttctgttaaaggaaaatattgtgaataaccactggtgtgttcttagatcagcacaaaccatgtcaaaaaaaattggagatttttttccaattttccttccactgatcttaggcagtaataaacaatggcatttgtcatctttggcacttgcttttagattatagtcccacagttgcactgccccaattgtctacctttgtgggtacatttttgttctttactcctaagttatttctcatagaacccagcctactctagaatttcagcagtgacattggagaatatttttaatttgctgcagtactatgtcatattattagtatgaatctcatttcccaaagggtttgtattctgctaaaaggagatgccaatgttgaatgaagtctgaaactctagtatgtgcatagtttgacgtgcagcatgcacaccaggccttaagatgggaatgtagcttaatgattttctgtttcccataccatttctaatcttttgtgtaattttctcttaactgattgctctgatattgtaaacacaatagatgtagctctatcatgtctagcataatttaaaaaatcagtgtttttaggatttgggaaaataaactgtaaatgtttatttgataggtaaatatagttttattgtcacatgctaaatattgcatgcatattgactaattggaataaccatttactcaattatggacagcttattgaaatagtattgatttagaaaaagtatattgcatttctaaaaaacatctaccaaggttactcgtctgaatattgcttttagccgtgttttataacatagacgagcagtagggtctgtttattagcaaatttcctatttgttccaatacaaactcactttattctaaagtatattaatgaaaccagttcctgtgatgtaactgtaagccttctcgacttagacttaaaaagtggtcacatagattaattttgtgactttttagtatagactgtagccataattctcaaatatgaaatgggacctaataccagtatgtgataaatgttgatgttttctgtgtacaaacacattttctatgcatgtgtctctgtgtatatggcatatacctagtaagtatgtttctgtaagtatgtgtattttatgtccatttgagtaggtaggtaggttttaaaaatactagttaaaatgccacaagcatgagtgtgattgtatgtgcactgtgtgtatatatataaatatatgtatatgtatggttgtaaatatctatgtatacatgtacttagtatgtgtggtatcaggatattttttaaactgtgataatacaacagatagctttgaatgatctgccataacatgtggtaacaatagttcatttctcataacatatatgaggtatacaaaattttctaactccagattgtagtcattttgagaggtacaaagctcataattaccatgacaacatggtaatgtccatagacatttgtatctgaatccacaagaagatctgaatctaagaaggaattacctttgacaatatttttcggtaagaagtaaaacctctggagacctatctttaagatctctaattggaattataaattatttttggattgctgagctgaatcttaaaaagccaagttgatatacatagtcatttttcctctatggtagaagtaaaaaaaaaaaaaaaggacatagcaacattaaagtagtggatttttctgagtaaatttgctgaaaatataagagagaagctatctaataccttggaggtaggtcatccactttttcaggtaaacatttttcatttggcaaatggcataattatttgaaagtgacaggaatctcctcagaatgaagaataaagcctactaggtctctaactgttgaactcatgaaagaagatagtgtatgagacttaagccatgagttttgtatcatttcaattagaagactactagctgtgagctcagagtttaatgtaaatgaatctagatgattttgaagaaatgattattcgttcaccagatcactcattgtacattctaaaaagctcaaatgagtcttctagatactcttactcatcctgtctggttgctatgtttaaaattatgtggtgctgtgtaggtgaaactttaagaatatttttgaagcatatgtaatatatgcactgctatttgtgtgtgtgtgtgtgtctttgtatatatgtaagaatgtgtgtatgtgtgagagcaagagagaggaaactcaaagaggagtgtttgtcttaagacctgttcatactggtatattggtgagacttctcacttctggttggaggtttcacatatggctcaactcaagtcattaatctctttttaatttttactcttgaattccttaaacttcgctcattatgaaatgttttaaaattatgacaaaaattactctgtctaaccacttgccttgtctgctaccagtttgttaaaaattattccccccaaccagtaattccaccagtactacttgatttgtgttatatttcctatgtacatgtacagcctttgttttgcttgcttgtctatttttactttcccttttttgggtcaaatttttcttttgctttgtttgaagaaggaatatacagaagtaaaatcttgtcttctctgctgattctttaattaatatgagccggatactttccactgtcttcttggcactttcaggatttcttaatgctgatatatggactcttagaatggaatttttgaagaaaaatctcaaagcctgtatcgttcttgaaggtcacatgtacctattgtgaaaatgtgaagctgtatttctgaagctgaaataaattataacatttgaagga

SEQ ID NO: 128429 - DNA, 6400 bp, Homo sapiens
  Payload ID: 5139
  Gene Symbol: DNMBP
  Gene Name: dynamin binding protein
  Uniprot ID: Q6XZF7
  ENST ID: ENST00000324109
  CDS Start-End: 93-4826
aggggcggaggtgacagcgggctggggactggcggctgcaactgcctgccgcgccgagggaccgccgggcggcggaaagcaggttataaaacatggaggctggctcagtggttcgagccatttttgacttctgccctagcgtatcagaagaactgccgctctttgtgggagatattattgaggtgctggcagtggtggatgaattttggcttctaggaaagaaggaggatgttacaggacaattccccagcagttttgtggaaattgtgaccattcccagtctaaaagagggagagaggctgtttgtgtgcatttgtgaattcacatcccaagagttggataatcttcccctccatcgaggtgacctggtgattctcgatggcattcccactgcaggctggctgcagggccgaagctgctggggcgcacggggcttcttcccatcttcatgtgtccgcgagctctgcctctcctcacagagccggcagtggcactcccagagcgccctgtttcagattccggaatattccatgggacaagcccgggccctaatggggctttctgctcagctggatgaagagctggacttcagggaaggggatgtgatcaccattattggagttcctgaaccaggctggtttgaaggggagttagagggccgaagaggcatttttccagaaggttttgtagagctgttggggcccctgaggactgtggatgagtcagtaagttctggaaatcaagatgactgcattgttaatggtgaagtagatacccctgtaggagaagaagagatagggccggatgaggatgaggaggagccagggacctatggggtcgccctgtacagattccaagccctggagccaaatgagctggatttcgaggtcggggataaaatccgaattctggcgaccttggaagatggctggctggaaggatccctgaagggcaggacaggcatctttccttaccggtttgtgaaattatgtcctgacacacgggtggaggaaaccatggctctgccccaggaaggcagccttgccaggatcccggaaacttctttggattgtttggagaacaccttaggagtagaggaacaaagacatgaaaccagtgaccatgaggccgaggagcctgactgcattatttctgaagcacccacttctcccctcggtcatctgacttcagagtatgacacagacagaaactcttatcaggacgaggacaccgcaggagggcccccgagaagcccaggcgtggagtgggaaatgcctcttgccacagactctcccacatctgaccctacagaagtagtcaatggtatttcctcccaacctcaggtcccttttcatcccaacttgcagaaaagccagtattattctacagtgggagggagccacccgcactcagaacagtaccccgaccttcttcccctagaagcaaggactagagactatgccagcctacctcccaaaagaatgtattcccagctaaaaactcttcagaagccagtgctccctctttacaggggctcttctgtttcagcttcaagggtagtcaaacccagacaatcaagtcctcagctccacaacctagcaagttatactaaaaagcaccacacgtccagtgtttactccatctcagagagattggagatgaagcctggtccgcaagcccaagggcttgttatggaagcagcaacacattcacagggagacggcagcactgacctggactcgaagctgacacaacagctgatcgagtttgagaagagcttggcagggcccggcacagagccagataaaattttacgccacttttcaatcatggactttaactctgagaaggatattgtccgaggttcctcaaagttaatcaccgagcaggagctgccggaaaggagaaaggccctaaggccaccgccacctcgtccctgtactccggtatccacttctccccatttgctggttgaccagaacctaaaacctgcaccacccttggtggtgcgaccctctcgcccagctcccctgcctccctcagcacagcagagaacgaatgcggtatcccccaagctcctatctcgacaccgtcctacctgtgagaccttagaaaaggagggccctggtcatatgggaaggagtctggaccagacctccccatgccccttagtgctggtgaggattgaggaaatggagcgggacttggatatgtacagtagagctcaagaagagctaaacctcatgctggaggagaagcaggatgaatcatcaagagcagagaccctcgaggatctcaagttctgtgaaagtaacattgaaagtttgaatatggaactccagcaactaagagaaatgacgctcctctcctcccagtcttcatcactggtggccccttctgggtctgtgtctgccgaaaatccagagcagaggatgctggagaagagagccaaggtcatagaagaacttcttcagacagaaagagactacattcgggatctggaaatgtgtattgagcggatcatggtacccatgcagcaggcacaggtaccaaacattgattttgagggactttttggaaatatgcagatggtgattaaggtctcgaagcaattattggctgctctggaaatcagcgatgctgtaggacctgtgtttcttggtcaccgggatgagcttgagggaacatacaagatttactgccagaatcatgatgaggccattgcgctgcttgaaatctacgagaaggatgagaagatccagaagcatcttcaggactccttggcagatctgaagagcctatacaacgaatggggatgcacaaattatattaacctgggctccttcctcatcaaaccagtacagagagtaatgcgttacccgctgttgctaatggagttgctgaattccaccccagaatcccacccagataaagtgcctttaaccaatgcagtccttgcggtcaaggaaatcaacgttaacattaatgaatataaacggcgaaaggacctggtcctcaagtaccgtaagggtgatgaagatagccttatggagaaaatttccaaactgaacatccactccatcatcaagaaatccaaccgagttagcagtcacctgaagcatctcactggctttgctcctcagataaaagatgaagtatttgaagaaacagaaaaaaacttccgaatgcaagaaagattgattaagtcttttatccgagacctgtctctctacctccagcacatccgggagtccgcatgtgtgaaagtggtggctgctgtgagcatgtgggatgtgtgcatggagagaggacaccgggacctggagcagtttgagagggtgcatcgctacatcagtgaccagctcttcacaaactttaaggagaggacagagcggcttgtcatctcccccttaaatcagttactgagcatgtttacagggccccataagctggtacagaaacgctttgacaagctcctggacttctataactgtacagaacgggcagaaaagctaaaggacaagaagaccctggaggagctgcagtcggcccggaacaactatgaggccctgaatgcacagctgctggatgagctgcccaagttccaccagtacgcccagggcctcttcaccaactgtgtccacggctatgctgaagcccactgtgactttgtgcaccaggctctggagcaattaaagccactgctttcgttactcaaagtggctggcagagagggaaaccttattgccatcttccacgaagagcacagcagagttctgcagcaactccaggtttttaccttcttcccggagtctcttccagctaccaagaagccatttgagaggaaaaccattgaccgccagtctgctcgaaagccactcctgggcctgccaagttacatgctacagtcagaagaactccgggcctccctcctggccaggtatccccctgaaaaactcttccaggcagaacggaacttcaatgctgctcaagacttggatgtctcacttttggaaggtgacctggtgggtgtgattaagaaaaaagaccccatgggcagccagaaccgctggctgattgacaatggagtcaccaaaggcttcgtgtacagctctttcctaaagccctacaatcctcgccgcagccactccgatgcctccgtgggtagccactcctccacagagtctgagcacggcagctcctcccccaggttcccacgccagaacagcggcagcaccctgaccttcaaccccagcagcatggctgtatcctttacctcggggtcttgccagaagcagcctcaagatgcatctcctccgccaaaagaatgtgaccaaggaactctcagtgcatccctaaatccgagtaattcagagagtagtccttccagatgcccttcagacccagactccacctcccagccaaggtcaggggactctgcagatgtagctagagatgtaaagcaacccactgccacgccgaggagctaccggaacttcaggcatccagaaatagttggctactccgtaccaggacgaaatgggcaaagtcaagacctcgtcaaaggatgtgcaagaacagcccaggctccggaagacagaagtacagagccagatggcagtgaggcagaaggcaaccaggtctattttgctgtctacaccttcaaggcacgaaacccaaatgagctgagcgtgtcagccaatcagaaactcaagatcctcgagtttaaagatgttacaggaaatacagagtggtggttagctgaggttaacgggaagaagggctacgttccctccaattatatccgcaaaaccgagtacacctgagcccacgttgcctgccacccagccttgctgcctttgctttcagtccgccgagggttctggcggcccaccgagagggcgcctgctcctgagacacaggccctgtctgcgttgcttaaccatggcatggtggagcacaccacagatcttgttctcctcgattgggttgtaaaccttgatgctcactagaatctctagaatttgaaatggaccctggggctttgcaaatgacttagtgactatgagaagagagacaagtcttagagctggcttttggaaaggagaaacttgcagtcagaagcccagtgtcctatgtatgcaggaagctgtgctctagcaatagacagtgttggtaatggttgtgctgtacggcgtttggggtggccccatgttccatgctcagctgaccggatgccaactcagatgaaaagaattcatggctctgggcaccccgtgaggcagtgcttgcacatggctgggagtttgtcgggattgaaccaaacctagtgcttcaaagctcctgggacacctccagtgtccagcacacattctcatacatactgcccctaatttctaaagtccctaaagcactacattctgtaaccttgtttcttttactccattcccagattagttatgcaaaattcaactgcgttctacttttagaagtgtttagggtctttattttctgttgacccttcatctgaaagattctcttcccttgttaggtacaatcactgcccccccgcttttttttttgagatggggtcttgctatgttgcccaggctggtcttaaacgcctgggctcaagcaaccctcccgcctccctgctgagattacaggtgtaagccaccataccgcaacctcaatgacacctttctgatggtctttacacagtctgtgatgtctggtggcccccctgccctggactcaataattgatagattttcctagagtaacagtatgagagctccagccattccattaaaagtattagttctgctttgagctgaaaccagttgagcctaatggaagactggatgtctttcttcttcatccaagcaccctaatgactgtttagttacatccatagatgcagacaacataacacctgtgacttacttgaattgggataagccattccagaagtagcttatcctagacttggaaataagatttttttcaccactaacttccatgcttcagagatgacattcaaagccagattcccaagtgcctgatcatacctcccagtctcaggaagatatttgcttaccccttagaccaagaatcttaagatcttccccagctatgaagcctatcttggaatgggaaaccatgaaatttgtcttttaaaagaaagggaagaaatagccttacagcccctgttcctccaagtgcacatttagccttaaaatcctgggagtcgggagacaccgtggagtcctaacatccacagtgtctgctggtcgtggtcagaaggcagtaatgcaagagtccttttgtgaagagtgtttctatgtagagatgtttatatttaagtagttcttttataaataaaagcatttctaatggc

SEQ ID NO: 128430 - DNA, 679 bp, Homo sapiens
  Payload ID: 5139
  Gene Symbol: DNMBP
  Gene Name: dynamin binding protein
  ENST ID: ENST00000422692
  CDS Start-End: 7-679
ggggaaatgccgaccctattcaaaggagtttggggggttgtggagcattccagagctctgggaagattctgtcccgcctgcttaccctcaggcccacacctccacacacagccagctctgggcactgcagaaatgacgctcctctcctcccagtcttcatcactggtggccccttctgggtctgtgtctgccgaaaatccagagcagaggatgctggagaagagagccaaggtcatagaagaacttcttcagacagaaagagactacattcgggatctggaaatgtgtattgagcggatcatggtacccatgcagcaggcacaggtaccaaacattgattttgagggactttttggaaatatgcagatggtgattaaggtctcgaagcaattattggctgctctggaaatcagcgatgctgtaggacctgtgtttcttggtcaccgggatgagcttgagggaacatacaagatttactgccagaatcatgatgaggccattgcgctgcttgaaatctacgagaaggatgagaagatccagaagcatcttcaggactccttggcagatctgaagagcctatacaacgaatggggatgcacaaattatattaacctgggctccttcctcatcaaaccagtacagagagtaatgcgttacccgctgttgctaatggagttgc

SEQ ID NO: 128431 - DNA, 4177 bp, Homo sapiens
  Payload ID: 5139
  Gene Symbol: DNMBP
  Gene Name: dynamin binding protein
  Uniprot ID: Q6XZF7
  ENST ID: ENST00000543621
  CDS Start-End: 132-2603
gggaaatgccgaccctattcaaaggagtttggggggttgtggagcattccagagctctgggaagattctgtcccgcctgcttaccctcaggcccacacctccacacacagccagctctgggcactgcagaaatgacgctcctctcctcccagtcttcatcactggtggccccttctgggtctgtgtctgccgaaaatccagagcagaggatgctggagaagagagccaaggtcatagaagaacttcttcagacagaaagagactacattcgggatctggaaatgtgtattgagcggatcatggtacccatgcagcaggcacaggtaccaaacattgattttgagggactttttggaaatatgcagatggtgattaaggtctcgaagcaattattggctgctctggaaatcagcgatgctgtaggacctgtgtttcttggtcaccgggatgagcttgagggaacatacaagatttactgccagaatcatgatgaggccattgcgctgcttgaaatctacgagaaggatgagaagatccagaagcatcttcaggactccttggcagatctgaagagcctatacaacgaatggggatgcacaaattatattaacctgggctccttcctcatcaaaccagtacagagagtaatgcgttacccgctgttgctaatggagttgctgaattccaccccagaatcccacccagataaagtgcctttaaccaatgcagtccttgcggtcaaggaaatcaacgttaacattaatgaatataaacggcgaaaggacctggtcctcaagtaccgtaagggtgatgaagatagccttatggagaaaatttccaaactgaacatccactccatcatcaagaaatccaaccgagttagcagtcacctgaagcatctcactggctttgctcctcagataaaagatgaagtatttgaagaaacagaaaaaaacttccgaatgcaagaaagattgattaagtcttttatccgagacctgtctctctacctccagcacatccgggagtccgcatgtgtgaaagtggtggctgctgtgagcatgtgggatgtgtgcatggagagaggacaccgggacctggagcagtttgagagggtgcatcgctacatcagtgaccagctcttcacaaactttaaggagaggacagagcggcttgtcatctcccccttaaatcagttactgagcatgtttacagggccccataagctggtacagaaacgctttgacaagctcctggacttctataactgtacagaacgggcagaaaagctaaaggacaagaagaccctggaggagctgcagtcggcccggaacaactatgaggccctgaatgcacagctgctggatgagctgcccaagttccaccagtacgcccagggcctcttcaccaactgtgtccacggctatgctgaagcccactgtgactttgtgcaccaggctctggagcaattaaagccactgctttcgttactcaaagtggctggcagagagggaaaccttattgccatcttccacgaagagcacagcagagttctgcagcaactccaggtttttaccttcttcccggagtctcttccagctaccaagaagccatttgagaggaaaaccattgaccgccagtctgctcgaaagccactcctgggcctgccaagttacatgctacagtcagaagaactccgggcctccctcctggccaggtatccccctgaaaaactcttccaggcagaacggaacttcaatgctgctcaagacttggatgtctcacttttggaaggtgacctggtgggtgtgattaagaaaaaagaccccatgggcagccagaaccgctggctgattgacaatggagtcaccaaaggcttcgtgtacagctctttcctaaagccctacaatcctcgccgcagccactccgatgcctccgtgggtagccactcctccacagagtctgagcacggcagctcctcccccaggttcccacgccagaacagcggcagcaccctgaccttcaaccccagcagcatggctgtatcctttacctcggggtcttgccagaagcagcctcaagatgcatctcctccgccaaaagaatgtgaccaaggaactctcagtgcatccctaaatccgagtaattcagagagtagtccttccagatgcccttcagacccagactccacctcccagccaaggtcaggggactctgcagatgtagctagagatgtaaagcaacccactgccacgccgaggagctaccggaacttcaggcatccagaaatagttggctactccgtaccaggacgaaatgggcaaagtcaagacctcgtcaaaggatgtgcaagaacagcccaggctccggaagacagaagtacagagccagatggcagtgaggcagaaggcaaccaggtctattttgctgtctacaccttcaaggcacgaaacccaaatgagctgagcgtgtcagccaatcagaaactcaagatcctcgagtttaaagatgttacaggaaatacagagtggtggttagctgaggttaacgggaagaagggctacgttccctccaattatatccgcaaaaccgagtacacctgagcccacgttgcctgccacccagccttgctgcctttgctttcagtccgccgagggttctggcggcccaccgagagggcgcctgctcctgagacacaggccctgtctgcgttgcttaaccatggcatggtggagcacaccacagatcttgttctcctcgattgggttgtaaaccttgatgctcactagaatctctagaatttgaaatggaccctggggctttgcaaatgacttagtgactatgagaagagagacaagtcttagagctggcttttggaaaggagaaacttgcagtcagaagcccagtgtcctatgtatgcaggaagctgtgctctagcaatagacagtgttggtaatggttgtgctgtacggcgtttggggtggccccatgttccatgctcagctgaccggatgccaactcagatgaaaagaattcatggctctgggcaccccgtgaggcagtgcttgcacatggctgggagtttgtcgggattgaaccaaacctagtgcttcaaagctcctgggacacctccagtgtccagcacacattctcatacatactgcccctaatttctaaagtccctaaagcactacattctgtaaccttgtttcttttactccattcccagattagttatgcaaaattcaactgcgttctacttttagaagtgtttagggtctttattttctgttgacccttcatctgaaagattctcttcccttgttaggtacaatcactgcccccccgcttttttttttgagatggggtcttgctatgttgcccaggctggtcttaaacgcctgggctcaagcaaccctcccgcctccctgctgagattacaggtgtaagccaccataccgcaacctcaatgacacctttctgatggtctttacacagtctgtgatgtctggtggcccccctgccctggactcaataattgatagattttcctagagtaacagtatgagagctccagccattccattaaaagtattagttctgctttgagctgaaaccagttgagcctaatggaagactggatgtctttcttcttcatccaagcaccctaatgactgtttagttacatccatagatgcagacaacataacacctgtgacttacttgaattgggataagccattccagaagtagcttatcctagacttggaaataagatttttttcaccactaacttccatgcttcagagatgacattcaaagccagattcccaagtgcctgatcatacctcccagtctcaggaagatatttgcttaccccttagaccaagaatcttaagatcttccccagctatgaagcctatcttggaatgggaaaccatgaaatttgtcttttaaaagaaagggaagaaatagccttacagcccctgttcctccaagtgcacatttagccttaaaatcctgggagtcgggagacaccgtggagtcctaacatccacagtgtctgctggtcgtggtcagaaggcagtaatgcaagagtccttttgtgaagagtgtttctatgtagagatgtttatatttaagtagttcttttataaataaaagcatttctaatggc

SEQ ID NO: 128432 - DNA, 1704 bp, Homo sapiens
  Payload ID: 5140
  Gene Symbol: DAW1
  Gene Name: dynein assembly factor with WDR repeat domains 1
  Uniprot ID: Q8N136
  ENST ID: ENST00000309931
  CDS Start-End: 84-1331
gcgcatgcgcacccgcgtcccgctgctgtttagccgtttccaaggctacgaagcccatcggccggggataagagagcaagaaaatgaagctcaagagcctcctgctccggtattacccgccaggaattatgttggaatatgaaaaacatggagaattaaagactaagtccatagatttgcttgatcttggtcccagcactgatgtcagtgcgttagtagaagaaatccagaaggcagaacctctactcacagcttcacgaacagagcaagtcaaacttttgatacagaggttgcaagagaaactcggccagaacagcaatcacacgttctatctttttaaggttctcaaagcacatatattgccactgactaatgttgcacttaacaaatcgggctcatgctttatcacaggaagctatgatcggacgtgcaagctctgggacactgcgtctggagaggagctgaacacgctggagggccacaggaatgtggtttatgccatagcattcaacaatccttacggtgacaaaatcgccactgggtcctttgataaaacttgtaaactctggagtgtggaaacaggaaaatgttaccataccttcaggggtcatacagcagaaatagtgtgtttatcatttaaccctcaaagcacattggtggcgactggaagtatggacacaacagccaaattgtgggacattcagaatggcgaggaagtttacaccttaagaggacattctgccgaaatcatctccttgtcatttaacacctcaggagacagaatcatcacggggtcttttgatcataccgttgtagtgtgggacgctgatactggaaggaaggtaaatatcttaattggtcattgtgctgagattagcagtgcctcattcaattgggattgctctctaatattaactggctctatggacaaaacctgcaagctgtgggatgctacaaatggaaaatgtgtggcaaccttaacaggccatgatgatgaaatactagacagctgctttgattacactggaaagcttattgcaactgcttcagctgatggaacagcaagaattttcagtgctgccacaagaaaatgcattgccaaactggaaggtcatgaaggtgaaatttcaaagatttctttcaaccctcaagggaaccatcttctaactggcagctctgacaaaacggctagaatctgggatgctcagactggccagtgcctccaggttcttgaggggcacactgatgaaatcttttcatgtgctttcaactataaaggcaacatagtcattacaggcagcaaggataatacctgtaggatatggcgttgactgaaggaagctggtcagtgagcaaccttgctagcaatggtaatcaagaactggaacttcacagacagcagctctcttaatatttcttatactttctctttttctgcaagtcaactatttctacaactgtccttcatttcacagatatgaccattaaacatgacaaagttatgccactccaatattattatttgatggcgatggcaggacacagcataatgtttggctaatgccaccagttatttcagttgtgtttgttttttaaaagcattatgatactgaaaaaggagaccagaacaacttaacaacgtgtctcctggattttactttgaagcctattgttataatttctgttgaataaagtgtttggagg

SEQ ID NO: 128433 - DNA, 2476 bp, Homo sapiens
  Payload ID: 5140
  Gene Symbol: DAW1
  Gene Name: dynein assembly factor with WDR repeat domains 1
  ENST ID: ENST00000373666
  CDS Start-End: 637-1746
aggctttctggtgtaggttccgacgcacctgccttccattcccgcctatccatttaggctgcgacctctggtagttctccactttctctaattctgagttacttcatccttaagaagtggtgcataactcacaccttgttaggattgtatgagtatgtgtgcatacaccgtttaaagcaatgtagggcacagagtcaggaaatgcaaaatattaagttgaggtcatttttcttttgggaggacaaggacagggcacgggctggggccctagagtagtaattagcgatgggcttttcctcccagccttccttttgggaaacgcagtgtgctaaaaaagtgcatgcagcccaggctgtggcctaggccgtcggttcccggccatgcctagctcctctgaggtcgcccttagtgaggacacgaggtgccctcacctctttcactctagacacctccagaacactcgccccccgcgcgccggagccccgggtcgccaccaaccgcccgcggagccagacctcccagctctgcgccccaggaccgcgcggtgcaacctgcgcatgcgcacccgcgtcccgctgctgtttagccgtttccaaggctacgaagcccatcggccggggataagagagcaagaaaatgaagctcaagagcctcctgctccggtattacccgccaggaattatgttggaatatgaaaaacatggagaattaaagactaagtccatagatttgcttgatcttggtcccagcactgatgtcagtgcgttagtagaagaaatccagaaggcagaacctctactcacagcttcacgaacagagcaagtcaaacttttgatacagaggttgcaagagaaactcggccagaacagcaatcacacgttctatctttttaaggttctcaaagcacatatattgccactgactaatgttgcacttaacaaatcgggctcatgctttatcacaggaagctatgatcggacgtgcaagctctgggacactgcgtctggagaggagctgaacacgctggagggccacaggaatgtggtttatgccatagcattcaacaatccttacggtgacaaaatcgccactgggtcctttgataaaacttgtaaactctggagtgtggaaacaggaaaatgttaccataccttcaggggtcatacagcagaaatagtgtgtttatcatttaaccctcaaagcacattggtggcgactggaagtatggacacaacagccaaattgtgggacattcagaatggcgaggaagtttacaccttaagaggacattctgccgaaatcatctccttgtcatttaacacctcaggagacagaatcatcacggggtcttttgatcataccgttgtagtgtgggacgctgatactggaaggaaggtaaatatcttaattggtcattgtgctgagattagcagtgcctcattcaattgggattgctctctaatattaactggctctatggacaaaacctgcaagctgtgggatgctacaaatggaaaatgtgtggcaaccttaacaggccatgatgatgaaatactagacagctgctttgattacactggaaagcttattgcaactgcttcagctgatgatggagtctcgctctgtcgcccaggctggagtgcagtggcacgatcttggctcactgcaacctgcgcctcccaggttcaagcgattctcctgcctcagccgcccgagttatgtcacgttcttggtaatcatgtttgatgttatccggtgtgttcatctctttgatcactggacgtgatgctaaactatgcctgtgtcatctgctgtcaacaatatggaacagcaagaattttcagtgctgccacaagaaaatgcattgccaaactggaaggtcatgaaggtgaaatttcaaagatttctttcaaccctcaagggaaccatcttctaactggcagctctgacaaaacggctagaatctgggatgctcagactggccagtgcctccaggttcttgaggggcacactgatgaaatcttttcatgtgctttcaactataaaggcaacatagtcattacaggcagcaaggataatacctgtaggatatggcgttgactgaaggaagctggtcagtgagcaaccttgctagcaatggtaatcaagaactggaacttcacagacagcagctctcttaatatttcttatactttctctttttctgcaagtcaactatttctacaactgtccttcatttcacagatatgaccattaaacatgacaaagttatgccactccaatattattatttgatggcgatggcaggacacagcataatgtttggctaatgccaccagttatttcagttgtgtttgttttttaaaagcattatgatactgaaaaaggagaccagaacaacttaacaacgtgtctcctggattttactttgaagcctattgttataatttctgttgaataaagtgtttggaggaaa

SEQ ID NO: 128434 - DNA, 564 bp, Homo sapiens
  Payload ID: 5140
  Gene Symbol: DAW1
  Gene Name: dynein assembly factor with WDR repeat domains 1
  ENST ID: ENST00000440997
  CDS Start-End: 352-564
tttagccgtttccaaggctacgaagcccatcggccggggataagagagcaagaaaatgaagctcaagagcctcctgctccggtattacccgccaggtgaggacatggtcacctttaaagaataagtgacacccattgatcacccagcttcttagggacagaaataggagtgcaattcttgggttctaattcagaactcgtcttctgaattagaaacatctgcaaaaaaaaaaaaaaaaagaaaaaaaagaaaaaaatctgcaaaacataccacaaggcagaagataaccaaatacacttgcccaatgaagtttggataggaagtgtcataaagatttcaaaggagggaattatgttggaatatgaaaaacatggagaattaaagactaagtccatagatttgcttgatcttggtcccagcactgatgtcagtgcgttagtagaagaaatccagaaggcagaacctctactcacagcttcacgaacagagcaagtcaaacttttgatacagaggttgcaagagaaactcggccagaacagcaatcacacgttctatctttttaag

SEQ ID NO: 128435 - DNA, 725 bp, Homo sapiens
  Payload ID: 5140
  Gene Symbol: DAW1
  Gene Name: dynein assembly factor with WDR repeat domains 1
  ENST ID: ENST00000454999
  CDS Start-End: 49-159
gtttccaaggctacgaagcccatcggccggggataagagagcaagaaaatgaagctcaagagcctcctgctccggtattacccgccagtctttggtgagccaaatcatatgcaagtttccaagatactactgaatagcaggaattatgttggaatatgaaaaacatggagaattaaagactaagtccatagatttgcttgatcttggtcccagcactgatgtcagtgcgttagtagaagaaatccagaaggcagaacctctactcacagcttcacgaacagagcaagtcaaacttttgatacagaggttgcaagagaaactcggccagaacagcaatcacacgttctatctttttaaggttctcaaagcacatatattgccactgactaatgttgcacttaacaaatcgggctcatgctttatcacaggaagctatgatcggacgtgcaagctctgggacactgcgtctggagaggagctgaacacgctggagggccacaggaatgtggtttatgccatagcattcaacaatccttacggtgacaaaatcgccactgggtcctttgataaaacttgtaaactctggagtgtggaaacaggaaaatgttaccataccttcaggggtcatacagcagaaatagtgtgtttatcatttaaccctcaaagcacattggtggcgactggaagtatggacacaacagccaaattgtgggacattcagaatg

SEQ ID NO: 128436 - DNA, 14862 bp, Homo sapiens
  Payload ID: 5141
  Gene Symbol: DNHD1
  Gene Name: dynein heavy chain domain 1
  Uniprot ID: Q96M86
  ENST ID: ENST00000254579
  CDS Start-End: 565-14826
aacggttctaacagctgggtgcgggtggagctgcgggcgatcgccagctcgagtgcagattccttgctgtgaccgaggttcagagtgagctctgtcggtgtgtcagtttgcctcttcaggcactcttcaatgaaacctcatcagcagatcgggctctcttcccttgccttgcctcctaacccccctaggccaggtgagggggacagggtactgggaggtaagaaggaactcttctgcaaggagggctctcacgtctgtcttaggcctgctccttaccagagtctttggggaagcagtagggagggcctgagggtctcaggaaaggctctctgctggtctggctctgctctgtagctccatctatttccctgtcccaggtcctttcttcctcctaaccccattgactctgaccatcccctgcccagagcctgaggtcccttctctggcccctctgctgggctggcccatgcaggtgaggccccgcatctggcatcctggaactggcagttggagcctgagctatgggcaaggtcacttcgacagcagttgaatgcccagctcctcatggtcccggaggagaggagggtaggtttgtcttctgatgagacatcatctgattcccttaagtcttggcactccatatgtgtcttggacagcaaagaacagcccttggcctgccagcagaaacagaggcagttcgtgaagccagtgactgagtcagagcagcccacagtgctggaactcctgctagctgagctccgaactctgttctcagctgtgttgcaggacagtagccctgcagcttggcgctatcttcatgcagtactgggtctactgcctccatatcgtgagttgctagttggccaccttgatttgctgcccttcctggagcagctgtactgctgggcaccctgggtccaaacccacctccatctggacctgctaggtgccattgtccaggcctttcctccagacagctctttgttagacagtgcttcccatgctgactgctgtccccagaagcggaggctccatcacaggcccccatgcccagcttgcccttttgtgcaggcccagtggagcaggcagcaagtaaaggaggagctggccacctggctgcgaccattgacactgcctgagctacagcgctgcctgggcattgttggtgctcaggtggccctagaagaggctgtgtggctggatggacttagtctccttcccttggcactggcagcggacatccctgtacggtatgaaagcagtgacactgacaatgcagaggtggagcctgttggaagaaaagagaccaggtctcagcttgactatgaagttcccagggaaaaggccttccaaaagagcagcaccggcttttcacctgagacttccttcctggatagccaggtgatgactgctctgaagatggagagatacctgaagaagatccacttcctctatctcaatgtggctcccagccggtactttaggccttacagcctgatggtggtgccacccgacaaggtgaatcccgagcactacatcttctctccctttgggatcttgcatgtacatcctgtggaaggtagcgagacgatgacactgggtacctggcaccatcactgtgttctctggcagcagctccagttcattccattctttaagtattgcctcttacgcaagtcctttacctgttggaagaagaatgtgagattacaggggctgcatcgactccagaaattcctagagaatcatctgctcttggctgtgccccactttggagctgggctactccatattagcaggcttctgcaggagctacactctgtgtcctggctaccccaggaactggatcggtgctatgagctgctggacctgcagacggctctagccgaggagaagcataaggctctacggctgctccatcgttgcctaaacctctgcacatccattcttcgactggttcacgaggacacataccacatgcaacagtgcctacaggagcgagtacaaaactgtgacaggatcaggacaggccaaggctccatataccttcagagggtacagcacaagcaactggagcagaagctgaagcaagcagaggcctggtggctgcagctgggaaagtttgcccgcctggttgactacatgatttgtcagagcctcatttctgtcttggaagagcagataacctcttttgtggccaacatccttcaagccccaaggcagaaaccctttctctcatcacagctggtctttgatgatcatggtcaactgtctcatgtgccctgtgttgaaaatatgatccagactctaactggaggcctacagtctgtcaagacctctgccttgcaggtagtgcagtctgcagacctgaagacctcctcggattccctgtattctgaagaagaagatgaagaggaggactcaaaagacgaatttctgatgcccaagttccagggccagcccagcgatgctgtgagcatcttctgtggcccgaatgtgggattggtgtggccctggaagtctcacccaattgctggtatcttggaggtccgtggatgtcggctgcggggccaatacttcccccacaattataagcagctggaggaagacctggacaacaaccctaagatccagcaggcactgaatatacaacaggtgctgctggagggcgtgctgtgcaaggtgcaggaattctgcagggaacatcattggataacaggcatttatgaattcctgcaatcctgggggcctcagaagctggaagacatgagaggtggtcccatcaagaactacgtgacgctggtgagccgcctgaatgtttggcaggcccgtgtctccagtatgcctatcgagttgctcacaaaaggcgggttgctgctacttagctgccatgatgtacaggcagagatggaatccaagctgaacagcataaggaaggacattcttgcacacgtgcaaaatgagtgctggaacctcagtcaacaactcatgacagagctcacagatttcatgcatatcttccgaaccatcaactcagatattcatgccattgcacagtgcacccagaagttgaatgaagccaatgaacagtacgtcgagctggaggagcgaatggaatacgtacgggcactccacgaactcatccgcaaccactttagcctctttagtgctgagaatgaagcactggacatctcggtgagaaggcaattcggggagtcacccatccctccctgccctcctcccccacaaccacatctactccactgccctctgcttgccccacagcttctggatatgtgggaggcatttcagtttgagaaaagccaggcttcagagttcctgctcagcaagcgacatgccattatgcccaagctgcagcagctgatggcagcagcattggcagagctggaaggcctgcttgcgaaggccctctccggtccctttatggaccccacacaagatcagaggagtactgagcaccagctcgtctccctagagcgtcagttccagaacacagtcagcgacctcagtgaactgcaccacgcctatgccatcttcactgaggatgagactcctgtgcccttgccaatctgtgggacacgtcctattgtgcagcagcagcgcatatggcacctgtaccgagtcatctccgaaaacatcagcgagtggaagtgcatggcttttgccaagttcagcccagctatggcccaggagaagacagagggctggctgacagaggcagcacggatgagcacaaccctggagctgcacagccccgtgctgcagcactgcatgcgcatcctgggggagtttcgcagctacctgcccctgctcactaagctgggcagcctccacccacagagcctcaactgccagtgtctcctgcgtgcccttgggctgggcagtctccaaactatagaactcctaacgctgggccagctgcttacttatccactgctggagtttgcagatcgaatcaaccaggtctggcagaatgaaaatgaacgaattcatgcccaagagactatacggcggttgcagcggtactgggaagcgcgccagctgcgcctgctcaacttcatcctgcatgtaccctacgagcccccagcctcagagcgctccaagaggcaggtgctccgcagcccccaatgggaggtagtggacaaagatagtggcaccttcatcctctcagattacagcaacctgcaggattccatccaggaaagtcttcaggtgttgtccaagatcttggccatcgaaaagtcaggagatttaaacaaaatagctttggagtgggtggccatcatgcatggcctgggtgccctgctggaggtgtggctgactttccagcagaagtggatttttctgaataaagttctgcatgagatgaagatccagtttcctaatgctgacctgaactctcgtttcaaggtcatggatgaccagtatcgaaccctgatgcgcatctctgtagctgaccccatggttctgtcacttgtagtgcccagtgccgagaggagcccttacttccaaggccagcagctgcaacaactgctgcaagcaggatcggtggagctggagggcatcatcatgagtctggagagcgtgctctatggggtgtgtgctcacttcccccgcctcttcttccttagtgacagtgagctggtagccctgctggctgctcgactggaatcatgcgaagcccagctatgggtacgacgctgctttcctcatgtgcatgctgtgagcttcaggtcttgcccaactggtgagaaaaacacagatgactgggagtcaagcccaaacacacagactcaggtggaggcacttgcagtgctaggggcaggtggggaggaggtgaagctgcagggtccccttcctctgcatccagatctccctaagtggctggcctctctggagaagtgtctgcgcttggcactggtgcacatgctgcagggctgtgtggctgctcgccttgctcgaggcccatctctaggtgaggccctcaagcaactgcccaagcaaaacaagttgtacctgcaactgtatgtccagcactggatcgacttagtccaggccttcccatggcagtgtgtgctggtggcagaggaggtggtatggcgggccgagatggaggaggctctgcttgagtggggtaccctggccatggtctccatgcatatgcgcaagcttgaggtactggtgaattttatgcgggcccagagggcttcccaaggtgggcagtccctgccttctgtccgccagaccagccttctcagtgccctgctggtcatggcagtgactcaccgggatatagcacagctgctggaacagcaccaggtcagtgatctcacagactttcactgggtccgccaactcaagtatcacttgggttcacctcacataatccccaaaagccccctacagagtcttaagactattgcatcttctgaaccctctctgtcaccagcggcatgctggatagatgtgctaggcaggtccttcctgtacaattacgagtatctgggacctagactagggcctctacccagcctactgcctgaacggccagccctggtactattattggccctagaggaggtggcctgtgggaccgtactgggtcctaatggtgtgggcaagagagctatagtgaacagcctggcacaggccctgggccgccagctggtgatgctaccctgctcacctcagatagaggctcaatgcctgagcaactatctgaatggtgccctgcagggtggtgcctggctgctgttggagaaagttcatcagctgccccctggcttgctctctgccctgggccagcgcctgggtgaactgcaccacttgtatgccccactgtaccaggaggcttcccgaaacacaagcaccatagaccccacccagccccagctccttggcagtagcttctttgaaaaacatcacgtgtctgtgcgccttggctatggctgtctcctggtactgcgtgccctgagctctgctgtgcctgccaacctgcacctgctgctgcggcctgtggcattggcattgcctgatctgcggcaagtggcagagctgactctgctgggtgcagggatgagggatgccttccagatggctacccgcctatccaaattcttctctctagagcgtgagctggtgtctgggcccctgccctgccgcctgccactgctcaagcagatactggaagacacaatacggacactaaatgtgaccaaggaggaaccgaagtgccagaagcctcgcagcctagctgccattgaggaggctgccctactgcgctcaccactgtttagcattctcaatgggctccacctgcacaacctccgagggctgttgtgtgcgcttttccctagcgccagccaagtgctggcagaacctatgacttacaagctgatgaagccattggtggtggaggaactgcaacaggtaggtctggatcccagccctgacattttggggtccttggaacagttgagccaggccctgagccgggcctcaggcattctgctcctgggccctgcgggcagcggcaagaccacttgttggcacagcttatttaagatccagaatcggctggcagccatggaggacacctcaacccaaggctgccagcctgtggaaattacccacctgtaccccagtggcctcagcccccaggagttcctgggatggctagagggctcctgctggcatcatggcatctttcccaaggtacttcgtgcagccggtcagtgtaacaacatgggccaaaagaggcagacagaggaatcaatcgggatccagcactggataatatgtgatggagcctccaatggtgcttggctggactccatcacttgcctcctgagtgagcttccccagcttagtctccccagtggacagcagatagcacgacccccaggcacctttctcttgatggaggtggctgacacaacaggcatatcccccacagtggtaggctgttgtgccctagtctggtgtggtggagagcagacttggcagtgtatacttagtgccctgatggcatcccttccttatgagtaccgcctgcagcaccggacagtcgctgagctcaaccacatggctgaggttctggtgcctgcaacattgcgattcctcacctgccaaggtgtcagctctctgctgcaggtacacgggcagcaggctgtttgtgcaggtgtggcagaagttaccagcatggcacgcatcttgcatagtctgcttgacctccaccttcgcctaaaggaggagaaggcccctggcccagaggacctcagctatagtgatcctgtggcccaaagcttcaggtcttcaaaaagcagctttctaaaccggtcccaggttgacagtgacgatgtgccagataagtgcagggaacacttgctggctgtcagcagttttctttttgccttgatctggggctttggagcccaccttccctccaggttctggcccatctttgataccttcataagggattctattagtcgcctctccaactaccctgagccaccaccctcagccttggtgtttgatctacatgtaagccctgaagatggaacactggtccccttcactggccaatacctgagcagccacatcaaaggaactttgggcacctttcacccttctatccagactgaacggctcttgtatgtggtggacctgcttctgtcagggggacagccagtgttgctggctggagaggcagcaacagggaagtcagcctttgtggaggtgctggtagagccacatcacccttacatatacagccccatccaccctgccttcagttcctcccacctccgtctcctgctgagcagaggaatccagggccaaacacaagccagcccacagcctgggcatcaccaggattctaaaccctccctcctcttcttgctggaggacctgcacctagccacttctgacccagagaagagctgccagccagtgttggagactctgcgccaggccatggatggcactgtgtatgcccacagcaccttggaactgcagacgctgcagcctacagtcaacttccttgccactgtcacagtgccaggatactgtgagcgcccactgtgtccacgcctctttcgactcttcacagtcctggccctggaaagcatgacccaggccaccctgctggaaagacatgtgcctatcattcaggcttggcttgagcgtttcccttctgtggaacgggagcgtgctctggcacgaggtctggttagggcctcagtagaggcctgggaggctgtgtgcaattgcttcatgccttcacccctccacccacactaccacttctccctacactctgtgagccacctactgagcagcctgcagctgctgcccaacagaacaggctcccgaggttttgtggactatcccaaccaccaggagcacttgcgccgggtgtcaggcctgcgaggcacttgtctgaccgttatgatggccacacgcaatgtggtgcgtctttggttgcatgaggcacagagaaccttttgcgaccggctggacagccccagggaacgctcctactgtgccaagctgctcctagtagtagctcaaagtgtcttctgctgtgggccagggccccagcacctgggcaaggaccatcaggagagtgaggaggaggaggaggaggagagggtgcccgaagtagaatctgaaggggagttggcccagtgggaggacttcagcaacagcaatagtgaaacagaggaggaagaggaaccttatggccttcaggtcgccagagtctcaaactccagagatccaagtctaacaccatccataggaccagtaagcagggggatgaaggaaagcataagtcacaagataaggcaagagaaaggcacaagggcatccaactataggctccaggtaaggagatcattcaagacttggtggcagaagaaaccccagatggacctgatctcacccttgttgttaccagtgttactactacatccccaggaaaagccctcagacctggtcttcagtcaggagctgatactggggcctaactctgagacccccaacttgtacctggaacgacagtgggagaagctagaggagcagttggccacctcagctgctcaactgaagttgagcccccacctggcccggtgtcattccatggcccagcacgtggcccgcctggtccgggtgctggccaggccccggcagcatggcctgctgctctcgggggctctgggtactgggcgccacactgccatcactctggcttctagcatttgtcaggcccatttctttcatctaccatctgggtcagaggaggccattctccaatgtctacgagatgccagctggcatgctggcatgttaagccagccagtggctctgttggtacccagtggtgtggatctcactacacttcatcgcctcctggccctggcaacctcaggcagtttccctggccagtacacagaagcagatttggaccgcattggagaacacctccccagggagaaccttggtgtcaaacagaacatcaagaaggaaatggtgttgcagaggttccaccagcaagtgtgcagccaccttcacctgttcttcctgattggagataaacaggcccacaagcagctgccctccacccttttcctgaggctccttcaactggccactgccagcattgaccgctatgaaccctgggaccaagctgccctggccaaggtggcccagcatcacctggagggtgctcagagtgtgccccttgatgacggctcctggaagtacccagacctccaggcctcaattcccagtgtggccaaagccatggctcttatccacctttcggccacccactaccatgagcacctgtgccctgcattgccactcgtcacccccaagaccttcctagacttcctggacactttcctgatgctgcagcaacagacaatcctgaagattaagaacaaggcccagcgggtccagaatgccttggagaatctgagaatgctgattaaggagcacggtacccatgccaatctgatctttgacttggaacagcagctgaaagactccggcaagagtctcagcatgtttcagcagcagctagagcaaagcaagctcctatacaagcagcagctggaagagtgtcggcatcaagagaacctcattgagaacctggccaggcaacgggatgccctgcaagctcagcgagaggctttcctggagcagatgagcaaggcatttctggagcctctgagccagctgcaggtggctgactttgaggagatacggagctatcgagcaccaccagaatctgtggtccgggtaactgatgcaatgtgtgacttgttccaccatgaaacaggctgggccagtgccaaacagctgttatgcactgaggatttttatcaggagctggtgttcttccccaaggagaagataacagactcagagctgataaagttacatctaattctgaaggctccaggtatggacgatgcagccctgcgggcagtgagccgacctgcagccagcctggcagcctggctctgggctgttctgcactatgggctggcgcattgccggggactgcccacggacctgctgctgcagcaagtggaggcaacactcactcgggagcaggcccgcctgggctactaccagtttcaggcccaggagaccctggagcataatttggccctggctaagatggtggaggatgcccaagcttcccacaactgcgtggcaaagaccctcagtcaagcacagtgtgggcagtatcacaaatggcccatgaaggctgcactgctcacgcctatgcgtgcctggactacacagctccagaagctgaagggacgctgcatgactgtgtttggagataccctcctatgttcagctgccatcatctacctgggtcccttcccaccattgcggcgccaagagctactggacgagtggttagctctgtgtaggggctttcaggaggctctgggcccagatgatgtggcacaggcactgaagcggaagcaaaaatctgtcagcataccaccaaagaaccccctgctggctacacactctcccttcagtattctgtccttgctgagctctgaatcggagcagtaccagtgggatggaaacctgaagccacaggcaaagtcggcccacctggcaggcttgcttctgcgaagccccacacactacagtagttgccgttggcctctgctgcttgaccccagcaacgaggccctcatctggttggacccgctgcctctggaagagaatcgatcttttgcgccagccctcactgagggtagagggaaaggcctcatgagaaatcaaaagagagagagtaaaacggacatgaaagaggaagatgatgagagtgaagagagtaatgaggctgaggaccagacaaaagagcagaaggcagaggaaagaaaaaatgagcaggagaaagagcaagaggaaaatgaagagaaagaggaggagaagacagagagccaggggtcaaagccagcctatgagactcagcttccatcccttccctaccttagtgttctttcaggtgctgacccagagctgggttctcagctccaggaggcagctgcttgtggcctgcctgtgttactgaccaatgtggagctgggtctagggtgcgaagaactgcaatggctgctgcaacgggagcagctgagtccaccccaggtgcagcctggcttctgtctgtatctcagcaccaccctctccctctgtgccatggaaaaagtgctaggttgtgaactgctaaaggggctgaatgtgttggatctgggcctgaacatggaaatactggaagaacagatgctgcatgaaatcttgtgcagagagtatcctgaactcgagacccgctggcaggacctaaagatcagagccctagatacctgcaaggctgtggaggctgctgaggagcggctgctgacgatgctgctgttccagaatccgaagcgtcagaagccagccaagtttctgcggaacatagtgagggcccaaggaaagctatgccagctgcgtgctcattgtgaagagttagaagggcagaaactacaggagatggtattgtgggcaccctatcgacctgtggtttggcatggaatggccatggtaaaggccctaagccaactgcagaacctgctgccacttttctgtatgagcccagagaactggctggcagtcactaagcaggctctggacagcatgaagccacgtgagattaatcacggggaggacctggccagccatctactgcaattgagagcacacctgacccgccagctgctgggcagcaccgtgactgcactgggccttacccaagtacccttggtgggtgcattgggcgctttggctctgctgcaagcaacagggaaagcatcagagctggaaagactggcactctggcctggactagcagcctctcccagcacagtccacagcaagccagtctcagatgtggctcgaccggcctggcttgggccaaaagcctggcatgaatgtgagatgttagagctgctgcccccatttgttggcctgtgtgcctccctggcaggccactccagtgcttggcaggcttacctgtcactgtcatccacagtgctgggtcctgcacctgggccagggcctgagccactcagcctcctccagaagctgatcctgtggcgcgttctgcgacctgagtgcctggcaggtgccctggcagacttcaccactagcctcctgggtcggcccctggatgaaaacacgtatgctcccaccatgccctttaaacatagtcaggctactcagcccatgctgatcttgttgccaccgcctggccacccctcagccactctgcatcctctgactgtcatccagaaactggctgccaagtatcagcaggggcagaagcaactgcaggtgatagccctgggctctgaagcctgggacccagtctcagttgtggtcagcactctatcccaggctatgtatgaggggcactggctggtgctggacaactgtcatctgatgccccattggccgaaagagctgctacagctcttgctggaactgttaggcagagccaaggtggttgcagacctggaatcagaacagcttttagaccaacctgaaagcaggaatgtaagcactgttcacagagattttcgtctttggcttattgtgcctgcagagtctagtgcttctttgccagctgtgctgactcagcactccatgcctgttttctggaaccagtccctggagctgggccatgttttgattgacagtgtggagctagcccagcaagtactctacatgcaaccccccacccaggcactacctctgctcctcctccatggcctcctgctacaccggcagctctatggaacaaggctgcaggcacacagggggcgctggagtcaagtgactctaacccaggttcttcagacccaagaccagctgtgggcaagtcttagcaatccccgtgctgccatgcaagagctggctgcttcagttttctacgggggtcctctgggggacactgaggacagggaggccctgattagcctcacacaagcctgcctgagccccagtagtgggagctgggtccagccacacacacctcagtctttgctggccacgctcatgcccctcccagagctaagggagctggatgcaatggcagagtgcaaggcccagatgcacctactgccctcaccacctgaaccccggctctgcggactgagtgagggcccccaagcctggctgttgcgacgccagagtcgcgctctcttgagtgcgctgcagcggagttcacccgtgtgggttcctgagtctcgaagaggcgcccagcttgcggaaaggcgactgcggcaacgcctagtgcaagtcaaccggaggctggagtcactgcaggatctgctgacccacgtgattcgccaagacgagtccgacgccccgtggtcagtgctggggccaaatgcacggcggcctctggagggcgtcttagagaccgaggctctagaactgagccagttggtgggcacgctacaacgcgaccttgattgcctgttgcagcagctgaagggcgcacccccgtgcccctcccgccgctgtgctgcggtggcccacgctctctggactggccgcctacccttgccttggcgacctcatgcgccggccggtccgcagccgccctggcactggctgcgacagttgtcgcgccgtgggcaactgttggttcgttacttgggcgtgggcgcggacgcgagcagtgatgtaccagagcgcgtcttccacctgtcagcctttcgccacccgcgccgcctgctgctggcattgcgtggggaagctgccctggaccagaatgtgcccagctcgaatttccctggtagccgaggctcggtctccagtcagctccagtataaacgtctggagatgaacagcaaccctctgcacttcagggtggagaatggtccaaatcccacggttccagagagagggctgctgctgatcgggctacaggtcctacatgcggagtgggacccaatagctggagccttgcaggacagtccttccagccaacccagccctctgcctcccgtcagcatcagcacacaggccccgggcaccagtgacctgccagccccagccgacctgactgtgtactcgtgtcctgtgtacatgggagggccccttggcaccgctaagctgcagagcaggaacatcgtgatgcatctgcctttacccaccaagctcacccccaacacctgtgtccaaaggagggtccatgtgtgcagcccacccctgtcttgagcccgtctaccaaaataaagttgtagtgattccatg

SEQ ID NO: 128437 - DNA, 3205 bp, Homo sapiens
  Payload ID: 5141
  Gene Symbol: DNHD1
  Gene Name: dynein heavy chain domain 1
  Uniprot ID: Q96M86
  ENST ID: ENST00000354685
  CDS Start-End: 663-2456
ttctaacagctgggtgcgggtggagctgcgggcgatcgccagctcgagtgcagattccttgctgtgaccgaggttcagagtgagctctgtcggtgtgtcagtttgcctcttcaggtgattgcacgtctgtgtgcgagtctctccgtgtatgggtggctatgattagggtgagcctcagactggaactcaagtctaagttcattcactgctccagcaggcactcttcaatgaaacctcatcagcagatcgggctctcttcccttgccttgcctcctaacccccctaggccaggtgagggggacagggtactgggaggtaagaaggaactcttctgcaaggagggctctcacgtctgtcttaggcctgctccttaccagagtctttggggaagcagtagggagggcctgagggtctcaggaaaggctctctgctggtctggctctgctctgtagctccatctatttccctgtcccaggtcctttcttcctcctaaccccattgactctgaccatcccctgcccagagcctgaggtcccttctctggcccctctgctgggctggcccatgcaggtgaggccccgcatctggcatcctggaactggcagttggagcctgagctatgggcaaggtcacttcgacagcagttgaatgcccagctcctcatggtcccggaggagaggagggtaggtttgtcttctgatgagacatcatctgattcccttaagtcttggcactccatatgtgtcttggacagcaaagaacagcccttggcctgccagcagaaacagaggcagttcgtgaagccagtgactgagtcagagcagcccacagtgctggaactcctgctagctgagctccgaactctgttctcagctgtgttgcaggacagtagccctgcagcttggcgctatcttcatgcagtactgggtctactgcctccatatcgtgagttgctagttggccaccttgatttgctgcccttcctggagcagctgtactgctgggcaccctgggtccaaacccacctccatctggacctgctaggtgccattgtccaggcctttcctccagacagctctttgttagacagtgcttcccatgctgactgctgtccccagaagcggaggctccatcacaggcccccatgcccagcttgcccttttgtgcaggcccagtggagcaggcagcaagtaaaggaggagctggccacctggctgcgaccattgacactgcctgagctacagcgctgcctgggcattgttggtgctcaggtggccctagaagaggctgtgtggctggatggacttagtctccttcccttggcactggcagcggacatccctgtacggtatgaaagcagtgacactgacaatgcagaggtggagcctgttggaagaaaagagaccaggtctcagcttgactatgaagttcccagggaaaaggccttccaaaagagcagcaccggcttttcacctgagacttccttcctggatagccaggtgatgactgctctgaagatggagagatacctgaagaagatccacttcctctatctcaatgtggctcccagccggtactttaggccttacagcctgatggtggtgccacccgacaaggtgaatcccgagcactacatcttctctccctttgggatcttgcatgtacatcctgtggaaggtagcgagacgatgacactgggtacctggcaccatcactgtgttctctggcagcagctccagttcattccattctttaagtattgcctcttacgcaagtcctttacctgttggaagaagaatgtgagattacaggggctgcatcgactccagaaattcctagagaatcatctgctcttggctgtgccccactttggagctgggctactccatattagcaggcttctgcaggagctacactctgtgtcctggctaccccaggaactggatcggtgctatgagctgctggacctgcagacggctctagccgaggagaagcataaggctctacggctgctccatcgttgcctaaacctctgcacatccattcttcgactggttcacgaggacacataccacatgcaacagtgcctacaggagcgagtacaaaactgtgacaggatcaggacaggccaaggctccatataccttcagagggtacagcacaagcaactggagcagaagctgaagcaagcagaggcctggtggctgcagctgggaaagtttgcccgcctggttgactacatgatttgtcagagcctcatttctgtcttggaagagcagataacctcttttgtggccaacatccttcaagccccaaggcagaaaccctttctctcatcacagctggtctttgatgatcatggtcaactgtctcatgtgccctgtgttgaaaatatgatccagactctaactggaggcctacagtctgtcaagacctctgccttgcaggtattctgaattgggcagagagctggctgtgggaattcccagttcctatcctctgagtaatcagaagctcacaacctggtttgaatccctcattgctttcccatttctgccccttctccatatcctggcatgaaggtagtgcagtctgcagacctgaagacctcctcggattccctgtattctgaaggtatttagggagacctaggcagggggtaggaaggctgaaggagggaaagggcacaagtactaatggcatgggaagaaggcaggaggtccaggctatagagtcaggcactgggtgtggatggagcagctctaacctgggtactgcacatatgtgttgtgggtagaaaggtcagggaatgtttttgctcacaaattcacgtggttatgtgtatgtgcgtgcaatgagagggtgtatgaaagagtgtgagtacattgtccttccaaacctgattcatcccaaactctgtgaggtttttctccagtgccataattgcatttcatttactactgaattttattgctaagtaaatttgtacttgtttgaagagctctgcttgctcaacacttgctttatgtcatatagctctttttcatttcatatggattaattcattgtattgaaatattttatggttaccaattattattggttatcagtcttcacacttattaaccatcagcgtggaaacacatcttcacatttcccttatttaggatactaatgctgtcacaaataaaatcattaaatgcaa

SEQ ID NO: 128438 - DNA, 1475 bp, Homo sapiens
  Payload ID: 5141
  Gene Symbol: DNHD1
  Gene Name: dynein heavy chain domain 1
  ENST ID: ENST00000524401
  CDS Start-End: 1-1082
aggaggccattctccaatgtctacgagatgccagctggcatgctggcatgttaagccagccagtggctctgttggtacccagtggtgtggatctcactacacttcatcgcctcctggccctggcaacctcaggcagtttccctggccagtacacagaagcagatttggaccgcattggagaacacctccccagggagaaccttggtgtcaaacagaacatcaagaaggaaatggtgttgcagaggttccaccagcaagtgtgcagccaccttcacctgttcttcctgattggagataaacaggcccacaagcagctgccctccacccttttcctgaggctccttcaactggccactgccagcattgaccgctatgaaccctgggaccaagctgccctggccaaggtggcccagcatcacctggagggtgctcagagtgtgccccttgatgacggctcctggaagtacccagacctccaggcctcaattcccagtgtggccaaagccatggctcttatccacctttcggccacccactaccatgagcacctgtgccctgcattgccactcgtcacccccaagaccttcctagacttcctggacactttcctgatgctgcagcaacagacaatcctgaagattaagaacaaggcccagcgggtccagaatgccttggagaatctgagaatgctgattaaggagcacggtacccatgccaatctgatctttgacttggaacagcagctgaaagactccggcaagagtctcagcatgtttcagcagcagctagagcaaagcaagctcctatacaagcagcagctggaagagtgtcggcatcaagagaacctcattgagaacctggccaggcaacgggatgccctgcaagctcagcgagaggctttcctggagcaggtgggctcttcctgccgcctgccctgcactgctcctctctcaaaagagggcaacccctctaaggataccaagaggagaggatggagtgactcatcatggaatctcctggggggaggggacaaagatgagcaaggcatttctggagcctctgagccagctgcaggtggctgactttgaggagatacggagctatcgagcaccaccagaatctgtggtccgggtaactgatgcaatgtgtgacttgttccaccatgaaacaggctgggccagtgccaaacagctgttatgcactgaggatttttatcaggctccaggtatggacgatgcagccctgcgggcagtgagccgacctgcagccagcctggcagcctggctctgggctgttctgcactatgggctggcgcattgccggggactgcccacggacctgctgctgcagcaagtggaggcaacactcactcgggagcaggcccgcctgggctactaccagtttcaggcccaggagaccctggagcataatttggccctggctaagatggtggaggatgcccaagcttcccacaa

SEQ ID NO: 128439 - DNA, 4881 bp, Homo sapiens
  Payload ID: 5141
  Gene Symbol: DNHD1
  Gene Name: dynein heavy chain domain 1
  ENST ID: ENST00000532027
  CDS Start-End: 1-477
tttgagaaaagccaggcttcagagttcctgctcagcaagcgacatgccattatgcccaagctgcagcagctgatggcagcagcattggcagagctggaaggcctgcttgcgaaggccctctccggtccctttatggaccccacacaagatcagaggagtactgagcaccagctcgtctccctagagcgtcagttccagaacacagtcagcgacctcagtgaactgcaccacgcctatgccatcttcactggtactgaggatccctgcaccctccattatcactctgtgatagacccttcaactgaaaggatgagactcctgtgcccttgccaatctgtgggacacgtcctattgtgcagcagcagcgcatatggcacctgtaccgagtcatctccgaaaacatcagcgagtggaagtgcatggcttttgccaagttcagcccagctatggcccaggagaagacagagggctggctgacagaggcagcacggatgagcacaaccctggagctgcacagccccgtgctgcagcactgcatgcgcatcctgggggagtttcgcagctacctgcccctgctcactaagctgggcagcctccacccacagagcctcaactgccagtgtctcctgcgtgcccttgggctgggcagtctccaaactatagaactcctaacgctgggccagctgcttacttatccactgctggagtttgcagatcgaatcaaccaggtctggcagaatgaaaatgaacgaattcatgcccaagagactatacggcggttgcagcggtactgggaagcgcgccagctgcgcctgctcaacttcatcctgcatgtaccctacgagcccccagcctcagagcgctccaagaggcaggtgctccgcagcccccaatgggaggtagtggacaaagatagtggcaccttcatcctctcagattacagcaacctgcaggattccatccaggaaagtcttcaggtgttgtccaagatcttggccatcgaaaagtcaggagatttaaacaaaatagctttggagtgggtggccatcatgcatggcctgggtgccctgctggaggtgtggctgactttccagcagaagtggatttttctgaataaagttctgcatgagatgaagatccagtttcctaatgctgacctgtgcccagtgccgagaggagcccttacttccaaggccagcagctgcaacaactgctgcaagcaggatcggtggagctggagggcatcatcatgagtctggagagcgtgctctatggggtgtgtgctcacttcccccgcctcttcttccttagtgacagtgagctggtagccctgctggctgctcgactggaatcatgcgaagcccagctatgggtacgacgctgctttcctcatgtgcatgctgtgagcttcaggtcttgcccaactggtgagaaaaacacagatgactgggagtcaagcccaaacacacagactcaggtggaggcacttgcagtgctaggggcaggtggggaggaggtgaagctgcagggtccccttcctctgcatccagatctccctaagtggctggcctctctggagaagtgtctgcgcttggcactggtgcacatgctgcagggctgtgtggctgctcgccttgctcgaggcccatctctaggtgaggccctcaagcaactgcccaagcaaaacaagttgtacctgcaactgtatgtccagcactggatcgacttagtccaggccttcccatggcagtgtgtgctggtggcagaggaggtggtatggcgggccgagatggaggaggctctgcttgagtggggtaccctggccatggtctccatgcatatgcgcaagcttgaggtactggtgaattttatgcgggcccagagggcttcccaaggtgggcagtccctgccttctgtccgccagaccagccttctcagtgccctgctggtcatggcagtgactcaccgggatatagcacagctgctggaacagcaccaggtcagtgatctcacagactttcactgggtccgccaactcaagtatcacttgggttcacctcacataatccccaaaagccccctacagagtcttaagactattgcatcttctgaaccctctctgtcaccagcggcatgctggatagatgtgctaggcaggtccttcctgtacaattacgagtatctgggacctagactagggcctctacccagcctactgcctgaacggccagccctggtactattattggccctagaggaggtggcctgtgggaccgtactgggtcctaatggtgtgggcaagagagctatagtgaacagcctggcacaggccctgggccgccagctggtgatgctaccctgctcacctcagatagaggctcaatgcctgagcaactatctgaatggtgccctgcagggtggtgcctggctgctgttggagaaagttcatcagctgccccctggcttgctctctgccctgggccagcgcctgggtgaactgcaccacttgtatgccccactgtaccaggaggcttcccgaaacacaagcaccatagaccccacccagccccagctccttggcagtagcttctttgaaaaacatcacgtgtctgtgcgccttggctatggctgtctcctggtactgcgtgccctgagctctgctgtgcctgccaacctgcacctgctgctgcggcctgtggcattggcattgcctgatctgcggcaagtggcagagctgactctgctgggtgcagggatgagggatgccttccagatggctacccgcctatccaaattcttctctctagagcgtgagctggtgtctgggcccctgccctgccgcctgccactgctcaagcagatactggaagacacaatacggacactaaatgtgaccaaggaggaaccgaagtgccagaagcctcgcagcctagctgccattgaggaggctgccctactgcgctcaccactgtttagcattctcaatgggctccacctgcacaacctccgagggctgttgtgtgcgcttttccctagcgccagccaagtgctggcagaacctatgacttacaagctgatgaagccattggtggtggaggaactgcaacaggtaggtctggatcccagccctgacattttggggtccttggaacagttgagccaggccctgagccgggcctcaggcattctgctcctgggccctgcgggcagcggcaagaccacttgttggcacagcttatttaagatccagaatcggctggcagccatggaggacacctcaacccaaggctgccagcctgtggaaattacccacctgtaccccagtggcctcagcccccaggagttcctgggatggctagagggctcctgctggcatcatggcatctttcccaaggtacttcgtgcagccggtcagtgtaacaacatgggccaaaagaggcagacagaggaatcaatcgggatccagcactggataatatgtgatggagcctccaatggtgcttggctggactccatcacttgcctcctgagtgagcttccccagcttagtctccccagtggacagcagatagcacgacccccaggcacctttctcttgatggaggtggctgacacaacaggcatatcccccacagtggtaggctgttgtgccctagtctggtgtggtggagagcagacttggcagtgtatacttagtgccctgatggcatcccttccttatgagtaccgcctgcagcaccggacagtcgctgagctcaaccacatggctgaggttctggtgcctgcaacattgcgattcctcacctgccaaggtgtcagctctctgctgcaggtacacgggcagcaggctgtttgtgcaggtgtggcagaagttaccagcatggcacgcatcttgcatagtctgcttgacctccaccttcgcctaaaggaggagaaggcccctggcccagaggacctcagctatagtgatcctgtggcccaaagcttcaggtcttcaaaaagcagctttctaaaccggtcccaggttgacagtgacgatgtgccagataagtgcagggaacacttgctggctgtcagcagttttctttttgccttgatctggggctttggagcccaccttccctccaggtacctaccaggatgggggatgggagatgcagagggctgagatggactggcccatggaagtaaaaacccacatgacatcactgttagggtatggtggagtgtgtgagtgtgtcataaatggaagtgttgtaactgtctgacgcttttgcctgtgtgtccatctgagcaggttctggcccatctttgataccttcataagggattctattagtcgcctctccaactaccctgagccaccaccctcagccttggtgtttgatctacatgtaagccctgaagatggaacactggtccccttcactggccaatacctgagcagccacatcaaaggaactttgggcacctttcacccttctatccagactgaacggctcttgtatgtggtggacctgcttctgtcagggggacagccagtgttgctggctggagaggcagcaacagggaagtcagcctttgtggaggtgctggtagagccacatcacccttacatatacagccccatccaccctgccttcagttcctcccacctccgtctcctgctgagcagaggaatccagggccaaacacaagccagcccacagcctgggcatcaccaggattctaaaccctccctcctcttcttgctggaggacctgcacctagccacttctggtgaggagctgcgaagagggaaggaaggagctactgtcatctcttgagactataaaatccctagcaatattcattgactctcaaatatatgtctgtagatct

SEQ ID NO: 128440 - DNA, 14298 bp, Homo sapiens
  Payload ID: 5141
  Gene Symbol: DNHD1
  Gene Name: dynein heavy chain domain 1
  Uniprot ID: Q96M86
  ENST ID: ENST00000527990
  CDS Start-End: 1-14262
atggtcccggaggagaggagggtaggtttgtcttctgatgagacatcatctgattcccttaagtcttggcactccatatgtgtcttggacagcaaagaacagcccttggcctgccagcagaaacagaggcagttcgtgaagccagtgactgagtcagagcagcccacagtgctggaactcctgctagctgagctccgaactctgttctcagctgtgttgcaggacagtagccctgcagcttggcgctatcttcatgcagtactgggtctactgcctccatatcgtgagttgctagttggccaccttgatttgctgcccttcctggagcagctgtactgctgggcaccctgggtccaaacccacctccatctggacctgctaggtgccattgtccaggcctttcctccagacagctctttgttagacagtgcttcccatgctgactgctgtccccagaagcggaggctccatcacaggcccccatgcccagcttgcccttttgtgcaggcccagtggagcaggcagcaagtaaaggaggagctggccacctggctgcgaccattgacactgcctgagctacagcgctgcctgggcattgttggtgctcaggtggccctagaagaggctgtgtggctggatggacttagtctccttcccttggcactggcagcggacatccctgtacggtatgaaagcagtgacactgacaatgcagaggtggagcctgttggaagaaaagagaccaggtctcagcttgactatgaagttcccagggaaaaggccttccaaaagagcagcaccggcttttcacctgagacttccttcctggatagccaggtgatgactgctctgaagatggagagatacctgaagaagatccacttcctctatctcaatgtggctcccagccggtactttaggccttacagcctgatggtggtgccacccgacaaggtgaatcccgagcactacatcttctctccctttgggatcttgcatgtacatcctgtggaaggtagcgagacgatgacactgggtacctggcaccatcactgtgttctctggcagcagctccagttcattccattctttaagtattgcctcttacgcaagtcctttacctgttggaagaagaatgtgagattacaggggctgcatcgactccagaaattcctagagaatcatctgctcttggctgtgccccactttggagctgggctactccatattagcaggcttctgcaggagctacactctgtgtcctggctaccccaggaactggatcggtgctatgagctgctggacctgcagacggctctagccgaggagaagcataaggctctacggctgctccatcgttgcctaaacctctgcacatccattcttcgactggttcacgaggacacataccacatgcaacagtgcctacaggagcgagtacaaaactgtgacaggatcaggacaggccaaggctccatataccttcagagggtacagcacaagcaactggagcagaagctgaagcaagcagaggcctggtggctgcagctgggaaagtttgcccgcctggttgactacatgatttgtcagagcctcatttctgtcttggaagagcagataacctcttttgtggccaacatccttcaagccccaaggcagaaaccctttctctcatcacagctggtctttgatgatcatggtcaactgtctcatgtgccctgtgttgaaaatatgatccagactctaactggaggcctacagtctgtcaagacctctgccttgcaggtagtgcagtctgcagacctgaagacctcctcggattccctgtattctgaagaagaagatgaagaggaggactcaaaagacgaatttctgatgcccaagttccagggccagcccagcgatgctgtgagcatcttctgtggcccgaatgtgggattggtgtggccctggaagtctcacccaattgctggtatcttggaggtccgtggatgtcggctgcggggccaatacttcccccacaattataagcagctggaggaagacctggacaacaaccctaagatccagcaggcactgaatatacaacaggtgctgctggagggcgtgctgtgcaaggtgcaggaattctgcagggaacatcattggataacaggcatttatgaattcctgcaatcctgggggcctcagaagctggaagacatgagaggtggtcccatcaagaactacgtgacgctggtgagccgcctgaatgtttggcaggcccgtgtctccagtatgcctatcgagttgctcacaaaaggcgggttgctgctacttagctgccatgatgtacaggcagagatggaatccaagctgaacagcataaggaaggacattcttgcacacgtgcaaaatgagtgctggaacctcagtcaacaactcatgacagagctcacagatttcatgcatatcttccgaaccatcaactcagatattcatgccattgcacagtgcacccagaagttgaatgaagccaatgaacagtacgtcgagctggaggagcgaatggaatacgtacgggcactccacgaactcatccgcaaccactttagcctctttagtgctgagaatgaagcactggacatctcggtgagaaggcaattcggggagtcacccatccctccctgccctcctcccccacaaccacatctactccactgccctctgcttgccccacagcttctggatatgtgggaggcatttcagtttgagaaaagccaggcttcagagttcctgctcagcaagcgacatgccattatgcccaagctgcagcagctgatggcagcagcattggcagagctggaaggcctgcttgcgaaggccctctccggtccctttatggaccccacacaagatcagaggagtactgagcaccagctcgtctccctagagcgtcagttccagaacacagtcagcgacctcagtgaactgcaccacgcctatgccatcttcactgaggatgagactcctgtgcccttgccaatctgtgggacacgtcctattgtgcagcagcagcgcatatggcacctgtaccgagtcatctccgaaaacatcagcgagtggaagtgcatggcttttgccaagttcagcccagctatggcccaggagaagacagagggctggctgacagaggcagcacggatgagcacaaccctggagctgcacagccccgtgctgcagcactgcatgcgcatcctgggggagtttcgcagctacctgcccctgctcactaagctgggcagcctccacccacagagcctcaactgccagtgtctcctgcgtgcccttgggctgggcagtctccaaactatagaactcctaacgctgggccagctgcttacttatccactgctggagtttgcagatcgaatcaaccaggtctggcagaatgaaaatgaacgaattcatgcccaagagactatacggcggttgcagcggtactgggaagcgcgccagctgcgcctgctcaacttcatcctgcatgtaccctacgagcccccagcctcagagcgctccaagaggcaggtgctccgcagcccccaatgggaggtagtggacaaagatagtggcaccttcatcctctcagattacagcaacctgcaggattccatccaggaaagtcttcaggtgttgtccaagatcttggccatcgaaaagtcaggagatttaaacaaaatagctttggagtgggtggccatcatgcatggcctgggtgccctgctggaggtgtggctgactttccagcagaagtggatttttctgaataaagttctgcatgagatgaagatccagtttcctaatgctgacctgaactctcgtttcaaggtcatggatgaccagtatcgaaccctgatgcgcatctctgtagctgaccccatggttctgtcacttgtagtgcccagtgccgagaggagcccttacttccaaggccagcagctgcaacaactgctgcaagcaggatcggtggagctggagggcatcatcatgagtctggagagcgtgctctatggggtgtgtgctcacttcccccgcctcttcttccttagtgacagtgagctggtagccctgctggctgctcgactggaatcatgcgaagcccagctatgggtacgacgctgctttcctcatgtgcatgctgtgagcttcaggtcttgcccaactggtgagaaaaacacagatgactgggagtcaagcccaaacacacagactcaggtggaggcacttgcagtgctaggggcaggtggggaggaggtgaagctgcagggtccccttcctctgcatccagatctccctaagtggctggcctctctggagaagtgtctgcgcttggcactggtgcacatgctgcagggctgtgtggctgctcgccttgctcgaggcccatctctaggtgaggccctcaagcaactgcccaagcaaaacaagttgtacctgcaactgtatgtccagcactggatcgacttagtccaggccttcccatggcagtgtgtgctggtggcagaggaggtggtatggcgggccgagatggaggaggctctgcttgagtggggtaccctggccatggtctccatgcatatgcgcaagcttgaggtactggtgaattttatgcgggcccagagggcttcccaaggtgggcagtccctgccttctgtccgccagaccagccttctcagtgccctgctggtcatggcagtgactcaccgggatatagcacagctgctggaacagcaccaggtcagtgatctcacagactttcactgggtccgccaactcaagtatcacttgggttcacctcacataatccccaaaagccccctacagagtcttaagactattgcatcttctgaaccctctctgtcaccagcggcatgctggatagatgtgctaggcaggtccttcctgtacaattacgagtatctgggacctagactagggcctctacccagcctactgcctgaacggccagccctggtactattattggccctagaggaggtggcctgtgggaccgtactgggtcctaatggtgtgggcaagagagctatagtgaacagcctggcacaggccctgggccgccagctggtgatgctaccctgctcacctcagatagaggctcaatgcctgagcaactatctgaatggtgccctgcagggtggtgcctggctgctgttggagaaagttcatcagctgccccctggcttgctctctgccctgggccagcgcctgggtgaactgcaccacttgtatgccccactgtaccaggaggcttcccgaaacacaagcaccatagaccccacccagccccagctccttggcagtagcttctttgaaaaacatcacgtgtctgtgcgccttggctatggctgtctcctggtactgcgtgccctgagctctgctgtgcctgccaacctgcacctgctgctgcggcctgtggcattggcattgcctgatctgcggcaagtggcagagctgactctgctgggtgcagggatgagggatgccttccagatggctacccgcctatccaaattcttctctctagagcgtgagctggtgtctgggcccctgccctgccgcctgccactgctcaagcagatactggaagacacaatacggacactaaatgtgaccaaggaggaaccgaagtgccagaagcctcgcagcctagctgccattgaggaggctgccctactgcgctcaccactgtttagcattctcaatgggctccacctgcacaacctccgagggctgttgtgtgcgcttttccctagcgccagccaagtgctggcagaacctatgacttacaagctgatgaagccattggtggtggaggaactgcaacaggtaggtctggatcccagccctgacattttggggtccttggaacagttgagccaggccctgagccgggcctcaggcattctgctcctgggccctgcgggcagcggcaagaccacttgttggcacagcttatttaagatccagaatcggctggcagccatggaggacacctcaacccaaggctgccagcctgtggaaattacccacctgtaccccagtggcctcagcccccaggagttcctgggatggctagagggctcctgctggcatcatggcatctttcccaaggtacttcgtgcagccggtcagtgtaacaacatgggccaaaagaggcagacagaggaatcaatcgggatccagcactggataatatgtgatggagcctccaatggtgcttggctggactccatcacttgcctcctgagtgagcttccccagcttagtctccccagtggacagcagatagcacgacccccaggcacctttctcttgatggaggtggctgacacaacaggcatatcccccacagtggtaggctgttgtgccctagtctggtgtggtggagagcagacttggcagtgtatacttagtgccctgatggcatcccttccttatgagtaccgcctgcagcaccggacagtcgctgagctcaaccacatggctgaggttctggtgcctgcaacattgcgattcctcacctgccaaggtgtcagctctctgctgcaggtacacgggcagcaggctgtttgtgcaggtgtggcagaagttaccagcatggcacgcatcttgcatagtctgcttgacctccaccttcgcctaaaggaggagaaggcccctggcccagaggacctcagctatagtgatcctgtggcccaaagcttcaggtcttcaaaaagcagctttctaaaccggtcccaggttgacagtgacgatgtgccagataagtgcagggaacacttgctggctgtcagcagttttctttttgccttgatctggggctttggagcccaccttccctccaggttctggcccatctttgataccttcataagggattctattagtcgcctctccaactaccctgagccaccaccctcagccttggtgtttgatctacatgtaagccctgaagatggaacactggtccccttcactggccaatacctgagcagccacatcaaaggaactttgggcacctttcacccttctatccagactgaacggctcttgtatgtggtggacctgcttctgtcagggggacagccagtgttgctggctggagaggcagcaacagggaagtcagcctttgtggaggtgctggtagagccacatcacccttacatatacagccccatccaccctgccttcagttcctcccacctccgtctcctgctgagcagaggaatccagggccaaacacaagccagcccacagcctgggcatcaccaggattctaaaccctccctcctcttcttgctggaggacctgcacctagccacttctgacccagagaagagctgccagccagtgttggagactctgcgccaggccatggatggcactgtgtatgcccacagcaccttggaactgcagacgctgcagcctacagtcaacttccttgccactgtcacagtgccaggatactgtgagcgcccactgtgtccacgcctctttcgactcttcacagtcctggccctggaaagcatgacccaggccaccctgctggaaagacatgtgcctatcattcaggcttggcttgagcgtttcccttctgtggaacgggagcgtgctctggcacgaggtctggttagggcctcagtagaggcctgggaggctgtgtgcaattgcttcatgccttcacccctccacccacactaccacttctccctacactctgtgagccacctactgagcagcctgcagctgctgcccaacagaacaggctcccgaggttttgtggactatcccaaccaccaggagcacttgcgccgggtgtcaggcctgcgaggcacttgtctgaccgttatgatggccacacgcaatgtggtgcgtctttggttgcatgaggcacagagaaccttttgcgaccggctggacagccccagggaacgctcctactgtgccaagctgctcctagtagtagctcaaagtgtcttctgctgtgggccagggccccagcacctgggcaaggaccatcaggagagtgaggaggaggaggaggaggagagggtgcccgaagtagaatctgaaggggagttggcccagtgggaggacttcagcaacagcaatagtgaaacagaggaggaagaggaaccttatggccttcaggtcgccagagtctcaaactccagagatccaagtctaacaccatccataggaccagtaagcagggggatgaaggaaagcataagtcacaagataaggcaagagaaaggcacaagggcatccaactataggctccaggtaaggagatcattcaagacttggtggcagaagaaaccccagatggacctgatctcacccttgttgttaccagtgttactactacatccccaggaaaagccctcagacctggtcttcagtcaggagctgatactggggcctaactctgagacccccaacttgtacctggaacgacagtgggagaagctagaggagcagttggccacctcagctgctcaactgaagttgagcccccacctggcccggtgtcattccatggcccagcacgtggcccgcctggtccgggtgctggccaggccccggcagcatggcctgctgctctcgggggctctgggtactgggcgccacactgccatcactctggcttctagcatttgtcaggcccatttctttcatctaccatctgggtcagaggaggccattctccaatgtctacgagatgccagctggcatgctggcatgttaagccagccagtggctctgttggtacccagtggtgtggatctcactacacttcatcgcctcctggccctggcaacctcaggcagtttccctggccagtacacagaagcagatttggaccgcattggagaacacctccccagggagaaccttggtgtcaaacagaacatcaagaaggaaatggtgttgcagaggttccaccagcaagtgtgcagccaccttcacctgttcttcctgattggagataaacaggcccacaagcagctgccctccacccttttcctgaggctccttcaactggccactgccagcattgaccgctatgaaccctgggaccaagctgccctggccaaggtggcccagcatcacctggagggtgctcagagtgtgccccttgatgacggctcctggaagtacccagacctccaggcctcaattcccagtgtggccaaagccatggctcttatccacctttcggccacccactaccatgagcacctgtgccctgcattgccactcgtcacccccaagaccttcctagacttcctggacactttcctgatgctgcagcaacagacaatcctgaagattaagaacaaggcccagcgggtccagaatgccttggagaatctgagaatgctgattaaggagcacggtacccatgccaatctgatctttgacttggaacagcagctgaaagactccggcaagagtctcagcatgtttcagcagcagctagagcaaagcaagctcctatacaagcagcagctggaagagtgtcggcatcaagagaacctcattgagaacctggccaggcaacgggatgccctgcaagctcagcgagaggctttcctggagcagatgagcaaggcatttctggagcctctgagccagctgcaggtggctgactttgaggagatacggagctatcgagcaccaccagaatctgtggtccgggtaactgatgcaatgtgtgacttgttccaccatgaaacaggctgggccagtgccaaacagctgttatgcactgaggatttttatcaggagctggtgttcttccccaaggagaagataacagactcagagctgataaagttacatctaattctgaaggctccaggtatggacgatgcagccctgcgggcagtgagccgacctgcagccagcctggcagcctggctctgggctgttctgcactatgggctggcgcattgccggggactgcccacggacctgctgctgcagcaagtggaggcaacactcactcgggagcaggcccgcctgggctactaccagtttcaggcccaggagaccctggagcataatttggccctggctaagatggtggaggatgcccaagcttcccacaactgcgtggcaaagaccctcagtcaagcacagtgtgggcagtatcacaaatggcccatgaaggctgcactgctcacgcctatgcgtgcctggactacacagctccagaagctgaagggacgctgcatgactgtgtttggagataccctcctatgttcagctgccatcatctacctgggtcccttcccaccattgcggcgccaagagctactggacgagtggttagctctgtgtaggggctttcaggaggctctgggcccagatgatgtggcacaggcactgaagcggaagcaaaaatctgtcagcataccaccaaagaaccccctgctggctacacactctcccttcagtattctgtccttgctgagctctgaatcggagcagtaccagtgggatggaaacctgaagccacaggcaaagtcggcccacctggcaggcttgcttctgcgaagccccacacactacagtagttgccgttggcctctgctgcttgaccccagcaacgaggccctcatctggttggacccgctgcctctggaagagaatcgatcttttgcgccagccctcactgagggtagagggaaaggcctcatgagaaatcaaaagagagagagtaaaacggacatgaaagaggaagatgatgagagtgaagagagtaatgaggctgaggaccagacaaaagagcagaaggcagaggaaagaaaaaatgagcaggagaaagagcaagaggaaaatgaagagaaagaggaggagaagacagagagccaggggtcaaagccagcctatgagactcagcttccatcccttccctaccttagtgttctttcaggtgctgacccagagctgggttctcagctccaggaggcagctgcttgtggcctgcctgtgttactgaccaatgtggagctgggtctagggtgcgaagaactgcaatggctgctgcaacgggagcagctgagtccaccccaggtgcagcctggcttctgtctgtatctcagcaccaccctctccctctgtgccatggaaaaagtgctaggttgtgaactgctaaaggggctgaatgtgttggatctgggcctgaacatggaaatactggaagaacagatgctgcatgaaatcttgtgcagagagtatcctgaactcgagacccgctggcaggacctaaagatcagagccctagatacctgcaaggctgtggaggctgctgaggagcggctgctgacgatgctgctgttccagaatccgaagcgtcagaagccagccaagtttctgcggaacatagtgagggcccaaggaaagctatgccagctgcgtgctcattgtgaagagttagaagggcagaaactacaggagatggtattgtgggcaccctatcgacctgtggtttggcatggaatggccatggtaaaggccctaagccaactgcagaacctgctgccacttttctgtatgagcccagagaactggctggcagtcactaagcaggctctggacagcatgaagccacgtgagattaatcacggggaggacctggccagccatctactgcaattgagagcacacctgacccgccagctgctgggcagcaccgtgactgcactgggccttacccaagtacccttggtgggtgcattgggcgctttggctctgctgcaagcaacagggaaagcatcagagctggaaagactggcactctggcctggactagcagcctctcccagcacagtccacagcaagccagtctcagatgtggctcgaccggcctggcttgggccaaaagcctggcatgaatgtgagatgttagagctgctgcccccatttgttggcctgtgtgcctccctggcaggccactccagtgcttggcaggcttacctgtcactgtcatccacagtgctgggtcctgcacctgggccagggcctgagccactcagcctcctccagaagctgatcctgtggcgcgttctgcgacctgagtgcctggcaggtgccctggcagacttcaccactagcctcctgggtcggcccctggatgaaaacacgtatgctcccaccatgccctttaaacatagtcaggctactcagcccatgctgatcttgttgccaccgcctggccacccctcagccactctgcatcctctgactgtcatccagaaactggctgccaagtatcagcaggggcagaagcaactgcaggtgatagccctgggctctgaagcctgggacccagtctcagttgtggtcagcactctatcccaggctatgtatgaggggcactggctggtgctggacaactgtcatctgatgccccattggccgaaagagctgctacagctcttgctggaactgttaggcagagccaaggtggttgcagacctggaatcagaacagcttttagaccaacctgaaagcaggaatgtaagcactgttcacagagattttcgtctttggcttattgtgcctgcagagtctagtgcttctttgccagctgtgctgactcagcactccatgcctgttttctggaaccagtccctggagctgggccatgttttgattgacagtgtggagctagcccagcaagtactctacatgcaaccccccacccaggcactacctctgctcctcctccatggcctcctgctacaccggcagctctatggaacaaggctgcaggcacacagggggcgctggagtcaagtgactctaacccaggttcttcagacccaagaccagctgtgggcaagtcttagcaatccccgtgctgccatgcaagagctggctgcttcagttttctacgggggtcctctgggggacactgaggacagggaggccctgattagcctcacacaagcctgcctgagccccagtagtgggagctgggtccagccacacacacctcagtctttgctggccacgctcatgcccctcccagagctaagggagctggatgcaatggcagagtgcaaggcccagatgcacctactgccctcaccacctgaaccccggctctgcggactgagtgagggcccccaagcctggctgttgcgacgccagagtcgcgctctcttgagtgcgctgcagcggagttcacccgtgtgggttcctgagtctcgaagaggcgcccagcttgcggaaaggcgactgcggcaacgcctagtgcaagtcaaccggaggctggagtcactgcaggatctgctgacccacgtgattcgccaagacgagtccgacgccccgtggtcagtgctggggccaaatgcacggcggcctctggagggcgtcttagagaccgaggctctagaactgagccagttggtgggcacgctacaacgcgaccttgattgcctgttgcagcagctgaagggcgcacccccgtgcccctcccgccgctgtgctgcggtggcccacgctctctggactggccgcctacccttgccttggcgacctcatgcgccggccggtccgcagccgccctggcactggctgcgacagttgtcgcgccgtgggcaactgttggttcgttacttgggcgtgggcgcggacgcgagcagtgatgtaccagagcgcgtcttccacctgtcagcctttcgccacccgcgccgcctgctgctggcattgcgtggggaagctgccctggaccagaatgtgcccagctcgaatttccctggtagccgaggctcggtctccagtcagctccagtataaacgtctggagatgaacagcaaccctctgcacttcagggtggagaatggtccaaatcccacggttccagagagagggctgctgctgatcgggctacaggtcctacatgcggagtgggacccaatagctggagccttgcaggacagtccttccagccaacccagccctctgcctcccgtcagcatcagcacacaggccccgggcaccagtgacctgccagccccagccgacctgactgtgtactcgtgtcctgtgtacatgggagggccccttggcaccgctaagctgcagagcaggaacatcgtgatgcatctgcctttacccaccaagctcacccccaacacctgtgtccaaaggagggtccatgtgtgcagcccacccctgtcttgagcccgtctaccaaaataaagttgtagtgattccatg

SEQ ID NO: 128441 - DNA, 587 bp, Homo sapiens
  Payload ID: 5141
  Gene Symbol: DNHD1
  Gene Name: dynein heavy chain domain 1
  ENST ID: ENST00000525080
  CDS Start-End: 1-587
aaggggctgaatgtgttggatctgggcctgaacatggaaatactggaagaacagatgctgcatgaaatcttgtgcagagagtatcctgaactcgagacccgctggcaggacctaaagatcagagccctagatacctgcaaggctgtggaggctgctgagaatccgaagcgtcagaagccagccaagtttctgcggaacatagtgagggcccaaggaaagctatgccagctgcgtgctcattgtgaagagttagaagggcagaaactacaggagatggtattgtgggcaccctatcgacctgtggtttggcatggaatggccatggtaaaggccctaagccaactgcagaacctgctgccacttttctgtatgagcccagagaactggctggcagtcactaagcaggctctggacagcatgaagccacgtgagattaatcacggggaggacctggccagccatctactgcaattgagagcacacctgacccgccagctgctgggcagcaccgtgactgcactgggccttacccaagtacccttggtgggtgcattgggcgctttggctctgctgcaagcaacagggaa

SEQ ID NO: 128442 - DNA, 433 bp, Homo sapiens
  Payload ID: 5141
  Gene Symbol: DNHD1
  Gene Name: dynein heavy chain domain 1
  ENST ID: ENST00000527143
  CDS Start-End: 1-427
gtccctggagctgggccatgttttgattgacagtgtggagctagcccagcaagtactctacatgcaaccccccacccaggcactacctctgctcctcctccatggcctcctgctacaccggcagctctatggaacaaggctgcaggcacacagggggcgctggagtcaagtgactctaacccaggttcttcagacccaagaccagctgtgggcaagtcttagcaatccccgtgctgccatgcaagagctggctggtggagaatggtccaaatcccacggttccagagagagggctgctgctgatcgggctacaggtcctacatgcggagtgggacccaatagctggagccttgcaggacagtccttccagccaacccagccctctgcctcccgtcagcatcagcacacaggccccgggcaccagtgacctgcc

SEQ ID NO: 128443 - DNA, 581 bp, Homo sapiens
  Payload ID: 5141
  Gene Symbol: DNHD1
  Gene Name: dynein heavy chain domain 1
  ENST ID: ENST00000496802
  CDS Start-End: 565-581
aacggttctaacagctgggtgcgggtggagctgcgggcgatcgccagctcgagtgcagattccttgctgtgaccgaggttcagagtgagctctgtcggtgtgtcagtttgcctcttcaggcactcttcaatgaaacctcatcagcagatcgggctctcttcccttgccttgcctcctaacccccctaggccaggtgagggggacagggtactgggaggtaagaaggaactcttctgcaaggagggctctcacgtctgtcttaggcctgctccttaccagagtctttggggaagcagtagggagggcctgagggtctcaggaaaggctctctgctggtctggctctgctctgtagctccatctatttccctgtcccaggtcctttcttcctcctaaccccattgactctgaccatcccctgcccagagcctgaggtcccttctctggcccctctgctgggctggcccatgcaggtgaggccccgcatctggcatcctggaactggcagttggagcctgagctatgggcaaggtcacttcgacagcagttgaatgcccagctcctcatggtcccggaggagag

SEQ ID NO: 128444 - DNA, 2491 bp, Homo sapiens
  Payload ID: 5142
  Gene Symbol: DRC1
  Gene Name: dynein regulatory complex subunit 1
  Uniprot ID: Q96MC2
  ENST ID: ENST00000288710
  CDS Start-End: 75-2297
gtttgttcctagcaaccagcctgaggtctggaggtggtgcggagggagccgcctagggaccagggactcctgccatgaatccgccggggtccctagaggccctggacccgaacgtggacgagcacttgtccacccagattctcgcgccctcggtccactccgacaactctcaggagcgcatccaggcccggcgcctccgcatcgctgcgcgcttagaagcccggaggcgggaagcacttggagaatatttagatgggaagaaggagagtgaggaggatcaaagcaagagctacaaacagaaagaagaaagccgattgaaattggctaaacttctgctctgtggcaccgagttggtgacaaatatccaggtggctatagatatcagagagattcacaggagagtcgaagaagaggagataaagcgtcaaaggattgagaagctggagaatgaagttaagaccagccaggacaaattcgatgaaatcacctcaaagtgggaagagggcaagcagaagagaattccccaagagctgtgggaaatgctcaatacccaacagctgcactgtgctggactcttagaagataagaataaactcatcagcgagttacagcaggagttaaaaacaaaggatgaccagtatgtgaaggatttgaagaaacagtcagatgacatctgcctgcttctggagcggatggaagaacaggtgaagaatgtgatgaaaacctttcgtgaggagctctataacattgagaaagcatttgaggtggaacgccaagagctactggccagtaataagaagaaatgggagcaagcccttcaggctcataatgccaaagagctggagtatcttaacaaccgcatgaagaaagtagaggactatgagaagcagctgaacaggcagaggatctgggattgcgaagaatacaacatgatcaagatcaagctggagcaggatgtgcagattcttgagcagcagcttcagcagaggaaagcaatttatcagctaaaccaagagaaattagagtacaacttgcaggtgctgaagaagagagatgaagaaagcacagtaattaaatcccagcagaagaggaagatcaatcgcctgcatgatatacttaacaatctgagatcaaaatatgccaagcaaataaagcagtttcaggaggagaaccagtctctaacctcggactacaaacgtcttgtgatgcaattcaaggagctacagaaagccatgaggcattttgctcttattgatgatgagaagttttgggagatttggctgatgaatgaagaggaggcgaaggacctaatagccagagcctttgatgtggacaggatcatccacacccatcatctggggcttccctgggcagcacctgatttctggttcctgaacaatgttgggcctatttctcagcagccccagaagtccgccacacagatagtagaagaaatgcttatgcgctcagaagaggaggaggcagaagaggccgccgcggaaccagagtcctacctggatttgccgaagcaaatttctgaaaaaactaccaagaggatcctgatgctcctgtgtgacgagtcggggttcctcatagagagcaagctgctgagccttctcctgcccctggagcagaatgaatgctatctgctgaggctggatgccatcttctccgcccttggaattgaaagtgaggatgacttgtataaactggtgaacttcttccttaaatatcgagctcaccgtttatcttccagcctccagatcaagccctgcagtcaggcgagcatggagaaggcgagcatggaggagacaagcacgaggtcagaattggagctggcagagcagacggagatggagggagaaaaggaagaaagcctggtggaaggggagaaggaggaagaggaggagaccccaccctccccctgggtcatccaccccaatgatgtcctcaagattctggaggccttcgtcatgggtctgaagaagcctagggactcgcgggccccgctgagggtacagaagaatgtgcgtgacaactccaaggactcggagtactggcaggccctgaccacagtgatcccttcctccaagcagaacctctgggatgccctctacacagccttggagaagtaccaccttgtcctgacccagagggccaagctgctgctggaaaacagttctctggagcagcagaacacagagctgcaggcgctactgcagcagtatctgaactccaagatcaactctgaactgcaagttcctcccactcaggtgttgcgggtacccacaaaatgagctggaccgccaaaggctgatgtgttagggctggcctgatgctggtgtctgtgccggagccagctcatatcacccactgggccgcacctgggcctgctctctggattttccagggctgtctttatagcctgtcgaaataaggagccagaggagttacctgtgtcctgcattatgattaaagccttttaaagttg

SEQ ID NO: 128445 - DNA, 1075 bp, Homo sapiens
  Payload ID: 5142
  Gene Symbol: DRC1
  Gene Name: dynein regulatory complex subunit 1
  ENST ID: ENST00000421869
  CDS Start-End: 53-415
gaggtctggaggtggtgcggagggagccgcctagggaccagggactcctgccatgaatccgccggggtccctagaggccctggacccgaacgtggacgagcacttgtccacccagattctcgcgccctcggtccactccgacaactctcaggagcgcatccaggcccggcgcctccgcatcgctgcgcgcttagaagcccggaggcgggaagcacttggagaatatttagatgggaagaaggagagtgaggaggatcaaagcaagagctacaaacagaaagaagaaagccgattgaaattggctaaacttctgctctgtggcaccgagttggtgacaaatatccaggtggctatagatatcagagagattcacaggagagtcgaagaagaggagataaagcgtcaaaggagttaaaaacaaaggatgaccagtatgtgaaggatttgaagaaacagtcagatgacatctgcctgcttctggagcggatggaagaacaggtgaagaatgtgatgaaaacctttcgtgaggagctctataacattgagaaagcatttgaggtggaacgccaagagctactggccagtaataagaagaaatgggagcaagcccttcaggctcataatgccaaagagctggagtatcttaacaaccgcatgaagaaagtagaggactatgagaagcagctgaacaggcagaggatctgggattgcgaagaatacaacatgatcaagatcaagctggagcaggatgtgcagcctgcatgatatacttaacaatctgagatcaaaatatgccaagcaaataaagcagtttcaggaggagaaccagtctctaacctcggactacaaacgtcttgtgatgcaattcaaggagctacagaaagccatgaggcattttgctcttattgatgatgagaagttttgggagatttggctgatgaatgaagaggaggcgaaggacctaatagccagagcctttgatgtggacaggatcatccacacccatcatctggggcttccctgggcagcacctgatttctggttcctgaacaatgttgggcctatttctcagcag

SEQ ID NO: 128446 - DNA, 2064 bp, Homo sapiens
  Payload ID: 5143
  Gene Symbol: DRC3
  Gene Name: dynein regulatory complex subunit 3
  Uniprot ID: Q9H069
  ENST ID: ENST00000313838
  CDS Start-End: 291-1862
gtgtttcaccacacggagatgtggtcacgtgacttgtcaactttcacccaggatgtctcccttctgacttccccttagcaaccaagtcgcggcgcttggttccccagcaaccgggagacgcgtctgctgcgtggaaccgccgagttcccagcgcttgagaaggaaaattctggatctgttatctgtgaggaggccactccgttgacagttgtgtaaaactctgctgctttccccagctccaacctctctggtcttcaacaacactatcatcagggaaaacgtgggggaagatgaaccagccgtgcaactcgatggagccgagggtgatggacgatgacatgctcaagctggccgtcggggaccagggcccccaggaggaggccgggcagctggccaagcaggagggcatcctcttcaaggatgtcctgtccctgcagctggactttcggaacatcctccgcatagacaacctctggcagtttgagaacttgaggaagctgcagctggacaataacatcattgagaagatcgagggcctggagaacctcgcacacctggtctggctggatctgtctttcaacaacattgagaccatcgaggggctggacacactggtgaacctggaggacctgagcttgttcaacaaccggatctccaagatcgactccctggacgccctcgtcaagctgcaggtgttgtcgctgggcaacaaccggattgacaacatgatgaacatcatctacctccggcggttcaagtgcctgcggacgctcagcctctctaggaaccctatctctgaggcagaggattacaagatgttcatctgtgcctaccttcctgacctcatgtacctggactaccggcgcattgatgaccacacaaaaaagcttgcggaggctaagcaccagtacagcatcgacgagctgaagcaccaggagaacctgatgcaggcccagctggaggacgagcaggcgcagcgggaggagctagagaagcacaagactgcgtttgtggaacacctgaatggctccttcctgtttgacagcatgtacgctgaggactcagagggcaacaatctgtcctacctgcctggtgtcggtgagctccttgagacctacaaggacaagtttgtcatcatctgcgtgaatatttttgagtatggcctgaaacagcaggagaagcggaaaacagagcttgacaccttcagtgaatgtgtccgtgaggccatccaggaaaaccaggagcagggcaaacgcaagattgccaaattcgaggagaagcacttgtcgagtttaagtgccattcgagaggagttggaactgcccaacattgagaagatgatcctagaatgcagtgctgacatcagtgagttgttcgatgcgctcatgacgctggagatgcagctggtggagcagctggaggagactataaacatgtttgaaaggaacattgttgacatggtaggactgtttatcgaaaatgtccaaagcctaatggctcagtgccgggacctggagaatcaccaccacgagaagctcctggagatctctatcagcaccctggagaagattgtcgagggcgacctggacgaggacctgcctaacgacctgcgcgcgctttttgtcgataaagatacgattgttaatgctgtcggggcatcgcacgacatccacctcctgaagattgacaatcgagaagatgagctggtgaccagaatcaactcttggtgtacacgtttaatagacaggattcacaaggatgagatcatgaggaaccgcaagcgcgtgaaggagatcaatcagtacatcgaccacatgcagagcgaactggacaacctggaatgtggcgacatcctagactagatgaatgtcagccacaggagcttcttcaaaacatagcaccagccccagccaggagaaggaagtgcacacgcctcacccgcacctctagagagttgctgggcatctctcaaccgcgatccccaacaccattcttcccccacccctggaaaaacttccaaaagtagagaaaataaaggactcatttcacatttcccctactcat

SEQ ID NO: 128447 - DNA, 1923 bp, Homo sapiens
  Payload ID: 5143
  Gene Symbol: DRC3
  Gene Name: dynein regulatory complex subunit 3
  Uniprot ID: Q9H069
  ENST ID: ENST00000399182
  CDS Start-End: 167-1540
tgctgcgtggaaccgccgagttcccagcgcttgagaaggaaaattctggatctgttatctgtgaggaggccactccgttgacagttgtgtaaaactctgctgctttccccagctccaacctctctggtcttcaacaacactatcatcagggaaaacgtgggggaagatgaaccagccgtgcaactcgatggagccgagggtgatggacgatgacatgctcaagctggccgtcggggaccagggcccccaggaggaggccgggcagctggccaagcaggagggcatcctcttcaaggatgtcctgtccctgcagctggactttcggaacatcctccgcatagacaacctctggcagtttgagaacttgaggaagctgcagctggacaataacatcattgagaagatcgagggcctggagaacctcgcacacctggtctggctggatctgtctttcaacaacattgagaccatcgaggggctggacacactggtgaacctggaggacctgagcttgttcaacaaccggatctccaagatcgactccctggacgccctcgtcaagctgcaggtgttgtcgctgggcaacaaccggattgacaacatgatgaacatcatctacctccggcggttcaagtgcctgcggacgctcagcctctctaggaaccctatctctgaggcagaggattacaagatgttcatctgtgcctaccttcctgacctcatgtacctggactaccggcgcattgatgaccacacaaaaaagcttgcggaggctaagcaccagtacagcatcgacgagctgaagcaccaggagaacctgatgcaggcccagctggaggacgagcaggcgcagcgggaggagctagagaagcacaagactgcgtttgtggaacacctgaatggctccttcctgtttgacagcatgtacgctgaggactcagagggcaacaatctgtcctacctgcctggtgtcggtgagctccttgagacctacaaggacaagtttgtcatcatctgcgtgaatatttttgagtatggcctgaaacagcaggagaagcggaaaacagagcttgacaccttcagtgaatgtgtccgtgaggccatccaggaaaaccaggagcagggcaaacgcaagattgccaaattcgaggagaagcacttgtcgagtttaagtgccattcgagaggagttggaactgcccaacattgagaagatgatcctagaatgcagtgctgacatcagtgagttgttcgatgcgctcatgacgctggagatgcagctggtggagcagctggaggagactataaacatgtttgaaaggaacattgttgacatggtaggactgtttatcgaaaatgtccaaagcctgatggctcagtgccgggacctggagaatcaccaccacgagaagctcctggagatctctatcagcaccctggagaagattgtcgagggcgacctggacgaggacctgcctaacgacctgcgcgcgggtcgtttccaaaagttcaattatgtggaggcttctggcactttctaagagaagcagttacaggtagaggttgaagtctgagatttcccctggaggtcttcttaaccttagagtctgtataatgagtactgtgggggtgttggaaccaccatttctgatcctgcacaatgccatccggtttgcaccagcacatccactgatgaatggtcacaaaatcagcagggtcggcctgaggaacctggctccatccctggggtctgcacgctaagaaggctctcccggatgtctgcgctgggtcccgcggcagcatgtctatgtctctggaaggagtgtgggcatcaagggcccagacagagatactatgttgtcagggcccagacagagatactatgttgtcagggcctgctttagtgcatgcatcattcactcca

SEQ ID NO: 128448 - DNA, 2008 bp, Homo sapiens
  Payload ID: 5143
  Gene Symbol: DRC3
  Gene Name: dynein regulatory complex subunit 3
  Uniprot ID: Q9H069
  ENST ID: ENST00000399187
  CDS Start-End: 219-1790
ccttagcaaccaagtcgcggcgcttggttccccagcaaccgggagacgcgtctgctgcgtggaaccgccgagttcccagcgcttgagaaggaaaattctggatctgttatctgtgaggaggccactccgttgacagttgtgtaaaactctgctgctttccccagctccaacctctctggtcttcaacaacactatcatcagggaaaacgtgggggaagatgaaccagccgtgcaactcgatggagccgagggtgatggacgatgacatgctcaagctggccgtcggggaccagggcccccaggaggaggccgggcagctggccaagcaggagggcatcctcttcaaggatgtcctgtccctgcagctggactttcggaacatcctccgcatagacaacctctggcagtttgagaacttgaggaagctgcagctggacaataacatcattgagaagatcgagggcctggagaacctcgcacacctggtctggctggatctgtctttcaacaacattgagaccatcgaggggctggacacactggtgaacctggaggacctgagcttgttcaacaaccggatctccaagatcgactccctggacgccctcgtcaagctgcaggtgttgtcgctgggcaacaaccggattgacaacatgatgaacatcatctacctccggcggttcaagtgcctgcggacgctcagcctctctaggaaccctatctctgaggcagaggattacaagatgttcatctgtgcctaccttcctgacctcatgtacctggactaccggcgcattgatgaccacacaaaaaagcttgcggaggctaagcaccagtacagcatcgacgagctgaagcaccaggagaacctgatgcaggcccagctggaggacgagcaggcgcagcgggaggagctagagaagcacaagactgcgtttgtggaacacctgaatggctccttcctgtttgacagcatgtacgctgaggactcagagggcaacaatctgtcctacctgcctggtgtcggtgagctccttgagacctacaaggacaagtttgtcatcatctgcgtgaatatttttgagtatggcctgaaacagcaggagaagcggaaaacagagcttgacaccttcagtgaatgtgtccgtgaggccatccaggaaaaccaggagcagggcaaacgcaagattgccaaattcgaggagaagcacttgtcgagtttaagtgccattcgagaggagttggaactgcccaacattgagaagatgatcctagaatgcagtgctgacatcagtgagttgttcgatgcgctcatgacgctggagatgcagctggtggagcagctggaggagactataaacatgtttgaaaggaacattgttgacatggtaggactgtttatcgaaaatgtccaaagcctgatggctcagtgccgggacctggagaatcaccaccacgagaagctcctggagatctctatcagcaccctggagaagattgtcgagggcgacctggacgaggacctgcctaacgacctgcgcgcgctttttgtcgataaagatacgattgttaatgctgtcggggcatcgcacgacatccacctcctgaagattgacaatcgagaagatgagctggtgaccagaatcaactcttggtgtacacgtttaatagacaggattcacaaggatgagatcatgaggaaccgcaagcgcgtgaaggagatcaatcagtacatcgaccacatgcagagcgaactggacaacctggaatgtggcgacatcctagactagatgaatgtcagccacaggagcttcttcaaaacatagcaccagccccagccaggagaaggaagtgcacacgcctcacccgcacctctagagagttgctgggcatctctcaaccgcgatccccaacaccattcttcccccacccctggaaaaacttccaaaagtagagaaaataaaggactcatttcacatttcccctactcataaaaaaaaaaaaaaaa

SEQ ID NO: 128449 - DNA, 551 bp, Homo sapiens
  Payload ID: 5143
  Gene Symbol: DRC3
  Gene Name: dynein regulatory complex subunit 3
  ENST ID: ENST00000581264
  CDS Start-End: 157-551
cttctgacttccccttagcaaccaagtcgcggcgcttggttccccagcaaccgggagacgcgtctgctgcgtggaaccgccgagttcccagcgcttgagaagctccaacctctctggtcttcaacaacactatcatcagggaaaacgtgggggaagatgaaccagccgtgcaactcgatggagccgagggtgatggacgatgacatgctcaagctggccgtcggggaccagggcccccaggaggaggccgggcagctggccaagcaggagggcatcctcttcaaggatgtcctgtccctgcagctggactttcggaacatcctccgcatagacaacctctggcagtttgagaacttgaggaagctgcagctggacaataacatcattgagaagatcgagggcctggagaacctcgcacacctggtctggctggatctgtctttcaacaacattgagaccatcgaggggctggacacactggtgaacctggaggacctgagcttgttcaacaaccggatctccaagatcgactccctggacgccctcgtcaa

SEQ ID NO: 128450 - DNA, 586 bp, Homo sapiens
  Payload ID: 5143
  Gene Symbol: DRC3
  Gene Name: dynein regulatory complex subunit 3
  ENST ID: ENST00000496293
  CDS Start-End: 1-202
gaacctgatgcaggcccagctggaggacgagcaggcgcagcgggaggagctagagaagcacaagactgcgtttgtggaacacctgaatggctccttcctgtttgacagcatgtacgctgaggactcagagggcaacaatctgtcctacctgcctggtgtcgttgcctggagcccagaggacgtggttggtacctgtcattagggctgaggctgtgaccatcgatcaatgggcttaagttgtgagctgagggactcaggacagaatcaaggagctcctggatctgagagctctgagctaaggcatccagtcacagccactcacctacaaggacaagtttgtcatcatctgcgtgaatatttttgagtatggcctgaaacagcaggagaagcggaaaacagagcttgacaccttcagtgaatgtgtccgtgaggccatccaggaaaaccaggagcagggcaaacgcaagattgccaaattcgaggagaagcacttgtcgagtttaagtgccattcgagaggagttggaactgcccaacattgagaagatgatcctagaatgcagtgctgacatcagtgagttgttcga

SEQ ID NO: 128451 - DNA, 1953 bp, Homo sapiens
  Payload ID: 5143
  Gene Symbol: DRC3
  Gene Name: dynein regulatory complex subunit 3
  Uniprot ID: Q9H069
  ENST ID: ENST00000584166
  CDS Start-End: 304-1677
agcaaccaagtcgcggcgcttggttccccagcaaccgggagacgcgtctgctgcgtggaaccgccgagttcccagcgcttgagaagggtcttcctatgttgcccgggctggtcttgaactcctgaactcaagcagtccttccacctcggcctcccaaagagctgggattacaggtgaaaattctggatctgttatctgtgaggaggccactccgttgacagttgtgtaaaactctgctgctttccccagctccaacctctctggtcttcaacaacactatcatcagggaaaacgtgggggaagatgaaccagccgtgcaactcgatggagccgagggtgatggacgatgacatgctcaagctggccgtcggggaccagggcccccaggaggaggccgggcagctggccaagcaggagggcatcctcttcaaggatgtcctgtccctgcagctggactttcggaacatcctccgcatagacaacctctggcagtttgagaacttgaggaagctgcagctggacaataacatcattgagaagatcgagggcctggagaacctcgcacacctggtctggctggatctgtctttcaacaacattgagaccatcgaggggctggacacactggtgaacctggaggacctgagcttgttcaacaaccggatctccaagatcgactccctggacgccctcgtcaagctgcaggtgttgtcgctgggcaacaaccggattgacaacatgatgaacatcatctacctccggcggttcaagtgcctgcggacgctcagcctctctaggaaccctatctctgaggcagaggattacaagatgttcatctgtgcctaccttcctgacctcatgtacctggactaccggcgcattgatgaccacacaaaaaagcttgcggaggctaagcaccagtacagcatcgacgagctgaagcaccaggagaacctgatgcaggcccagctggaggacgagcaggcgcagcgggaggagctagagaagcacaagactgcgtttgtggaacacctgaatggctccttcctgtttgacagcatgtacgctgaggactcagagggcaacaatctgtcctacctgcctggtgtcggtgagctccttgagacctacaaggacaagtttgtcatcatctgcgtgaatatttttgagtatggcctgaaacagcaggagaagcggaaaacagagcttgacaccttcagtgaatgtgtccgtgaggccatccaggaaaaccaggagcagggcaaacgcaagattgccaaattcgaggagaagcacttgtcgagtttaagtgccattcgagaggagttggaactgcccaacattgagaagatgatcctagaatgcagtgctgacatcagtgagttgttcgatgcgctcatgacgctggagatgcagctggtggagcagctggaggagactataaacatgtttgaaaggaacattgttgacatggtaggactgtttatcgaaaatgtccaaagcctgatggctcagtgccgggacctggagaatcaccaccacgagaagctcctggagatctctatcagcaccctggagaagattgtcgagggcgacctggacgaggacctgcctaacgacctgcgcgcgggtcgtttccaaaagttcaattatgtggaggcttctggcactttctaagagaagcagttacaggtagaggttgaagtctgagatttcccctggaggtcttcttaaccttagagtctgtataatgagtactgtgggggtgttggaaccaccatttctgatcctgcacaatgccatccggtttgcaccagcacatccactgatgaatggtcacaaaatcagcagggtcggcctgaggaacctggctccatccctggggtctgcacgctaagaaggctctcccggatgtctgcgctgggtcccgcggcagcatgtctatgtctctgg

SEQ ID NO: 128452 - DNA, 878 bp, Homo sapiens
  Payload ID: 5143
  Gene Symbol: DRC3
  Gene Name: dynein regulatory complex subunit 3
  ENST ID: ENST00000583171
  CDS Start-End: 1-234
atcatctacctccggcggttcaagtgcctgcggacgctcagcctctctaggaaccctatctctgaggcagaggattacaagatgttcatctgtgcctaccttcctgacctcatgtacctggactaccggcgcattgatgaccacacagcaagtgtctccctctcagtctcccagccctgtgagacagattcctcaagcccccaggtttcttggaaaaggggcattgaagagtagcttcccctgcccacaactaggagagaaagggcagctccctcttcctaatccctttacctgactctgtcagagtgattccagcagcacccttagtttaagtgccattcgagaggagttggaactgcccaacattgagaagatgatcctagaatgcagtgctgacatcagtgagttgttcgatgcgctcatgacgctggagatgcagctggtggagcagctggaggagactataaacatgtttgaaaggaacattgttgacatggtaggactgtttatcgaaaatgtccaaagcctgatggctcagtgccgggacctggagaatcaccaccacgagaagctcctggagatctctatcagcaccctggagaagattgtcgagggcgacctggacgaggacctgcctaacgacctgcgcgcgctttttgtcgataaagatacgattgttaatgctgtcggggcatcgcacgacatccacctcctgaagattgacaatcgagaagatgagctggtgaccagaatcaactcttggtgtacacgtttaatagacaggattcacaaggatgagatcatgaggaaccgcaagcgcgtgaaggagatcaatcagtacatcgaccacatgcagagcgaactggacaacctggaat

SEQ ID NO: 128453 - DNA, 558 bp, Homo sapiens
  Payload ID: 5143
  Gene Symbol: DRC3
  Gene Name: dynein regulatory complex subunit 3
  ENST ID: ENST00000479684
  CDS Start-End: 404-558
ttagcaaccaagtcgcggcgcttggttccccagcaaccgggagacgcgtctgctgcgtggaaccgccgagttcccagcgcttgagaagggtcttcctatgttgcccgggctggtcttgaactcctgaactcaagcagtccttccacctcggcctcccaaagagctgggattacaggtgtaagccatctcgcccaaccaattttctccttattaattcatggccaatagggactatagttttcagatcctgttgacttcaggttatcatttcccaggaaaattctggatctgttatctgtgaggaggccactccgttgacagttgtgtaaaactctgctgctttccccagctccaacctctctggtcttcaacaacactatcatcagggaaaacgtgggggaagatgaaccagccgtgcaactcgatggagccgagggtgatggacgatgacatgctcaagctggccgtcggggaccagggcccccaggaggaggccgggcagctggccaagcaggagggcatcctcttcaaggatgtcctgtccctgcagctggactt

SEQ ID NO: 128454 - DNA, 490 bp, Homo sapiens
  Payload ID: 5143
  Gene Symbol: DRC3
  Gene Name: dynein regulatory complex subunit 3
  ENST ID: ENST00000585108
  CDS Start-End: 75-490
agcaaccgggagacgcgtctgctgcgtggaaccgccgagttcccagcgcttgagaagggaaaacgtgggggaagatgaaccagccgtgcaactcgatggagccgagggtgatggacgatgacatgctcaagctggccgtcggggaccagggcccccaggaggaggccgggcagctggccaagcaggagggcatcctcttcaaggatgtcctgtccctgcagctggactttcggaacatcctccgcatagacaacctctggcagtttgagaacttgaggaagctgcagctggacaataacatcattgagaagatcgagggcctggagaacctcgcacacctggtctggctggatctgtctttcaacaacattgagaccatcgaggggctggacacactggtgaacctggaggacctgagcttgttcaacaaccggatctccaagatcgactccctggacgccctcgtcaagctgcaggtgttgtcgctggg

SEQ ID NO: 128455 - DNA, 573 bp, Homo sapiens
  Payload ID: 5143
  Gene Symbol: DRC3
  Gene Name: dynein regulatory complex subunit 3
  ENST ID: ENST00000579977
  CDS Start-End: 267-573
agcgcttgagaaggtgagacctgggagctgaggctcccggaggacttgcagggacagatagtgcccgacgtaactctttcctgtgacctttttctcggagaacgccggcccggcccttctcatttataaaatgagcacgaaaattctggatctgttatctgtgaggaggccactccgttgacagttgtgtaaaactctgctgctttccccagctccaacctctctggtcttcaacaacactatcatcagggaaaacgtgggggaagatgaaccagccgtgcaactcgatggagccgagggtgatggacgatgacatgctcaagctggccgtcggggaccagggcccccaggaggaggccgggcagctggccaagcaggagggcatcctcttcaaggatgtcctgtccctgcagctggactttcggaacatcctccgcatagacaacctctggcagtttgagaacttgaggaagctgcagctggacaataacatcattgagaagatcgagggcctggagaacctcgcacacctggtctggctggatctgtctttcaacaacattgagaccatcg

SEQ ID NO: 128456 - DNA, 541 bp, Homo sapiens
  Payload ID: 5143
  Gene Symbol: DRC3
  Gene Name: dynein regulatory complex subunit 3
  ENST ID: ENST00000582416
  CDS Start-End: 291-541
gtgtttcaccacacggagatgtggtcacgtgacttgtcaactttcacccaggatgtctcccttctgacttccccttagcaaccaagtcgcggcgcttggttccccagcaaccgggagacgcgtctgctgcgtggaaccgccgagttcccagcgcttgagaaggaaaattctggatctgttatctgtgaggaggccactccgttgacagttgtgtaaaactctgctgctttccccagctccaacctctctggtcttcaacaacactatcatcagggaaaacgtgggggaagatgaaccagccgtgcaactcgatggagccgagggtgatggacgatgacatgctcaagctggccgtcggggaccagggcccccaggaggaggccgggcagctggccaagcaggagggcatcctcttcaaggatgtcctgtccctgcagctggactttcggagaaaaacagcagatgaacccaaaggggaacaggatgatggccaggaggattcccaggaagacatcctccgcatagacaacctctggcagtt

SEQ ID NO: 128457 - DNA, 429 bp, Homo sapiens
  Payload ID: 5143
  Gene Symbol: DRC3
  Gene Name: dynein regulatory complex subunit 3
  ENST ID: ENST00000579376
  CDS Start-End: 1-172
gatggctcagtgccgggacctggagaatcaccaccacgagaagctcctggagatctctatcagcaccctggagaagattgtcgagggcgacctggacgaggacctgcctaacgacctgcgcgcgggtcgtttccaaaagttcaattatgtggaggcttctggcactttctaagagaagcagttacagcacatccactgatgaatggtcacaaaatcagcagggtcggcctgaggaacctggctccatccctggggtctgcacgctaagaaggctctcccggatgtctgcgctgggtcccgcggcagcatgtctatgtctctggaaggagtgtgggcatcaagggcccagacagagatactatgttgtcagggcccagacagagatactatgttgtcagggcctgctttagtgcatgcatcattcactcc

SEQ ID NO: 128458 - DNA, 2680 bp, Homo sapiens
  Payload ID: 5144
  Gene Symbol: DRC7
  Gene Name: dynein regulatory complex subunit 7
  Uniprot ID: Q8IY82
  ENST ID: ENST00000336825
  CDS Start-End: 55-2484
aggctgtcctcggagggagacattccatctccagacacccagagacgctccagaatggaggtcctgagggagaaggtggaggaggaggaggaggccgagcgggaggaggcggccgagtgggctgaatgggcgaggatggagaaaatgatgaggccagttgaggtgcggaaggaggaaatcaccttaaagcaggagacgctcagagacctggagaagaagctgtcagagatccagatcactgtctcagcggagctcccggcctttaccaaggacactattgacatctccaagctgcccatttcctacaaaaccaacacacccaaggaggaacacctgctgcaggtggcagacaacttctcccgccagtacagccatctgtgcccggaccgcgtgcccctcttcctgcaccccctgaacgagtgtgaagtgcccaagttcgtgagcacaaccctccggcccacactgatgccctaccccgagctctacaactgggacagctgtgcccagtttgtctccgacttcctcaccatggtgcccctgcctgaccctctcaagccgaccatcaagaaggaggaaaaggtgctgcctaagaagtataccatcaaaccccccagggacctgtgcagcaggtttgagcaggagcaagaggtgaagaagcagcaggagatcagagcccaggagaagaagcggctgagggaggaggaggagcgcctcatggaagcggagaaggcaaagccggatgccctgcacggcctgcgggtgcactcctgggtccttgtgctatcggggaagcgcgaggtgcctgagaacttcttcatcgacccattcacaggacatagctacagcacccaggatgagcacttcctgggcatcgaaagcctgtggaaccacaagaactactggatcaacatgcaggattgctggaactgctgcaaggacttgatctttgacctgggtgaccctgtgagatgggagtacatgctcctggggactgataagtctcagctgtccttgactgaagaagacgacagtgggataaacgatgaggatgatgtggaaaatctgggcaaggaggatgaggataagagcttcgacatgccccactcgtgggtggagcagattgagatctccccggaagcatttgagacccgctgcccgaacgggaagaaggtgattcagtacaagagggcaaagctggagaagtgggccccgtacctcaatagcaatggccttgtgagccgcctcaccacctatgaggacttgcagtgtaccaatattttggagataaaggagtggtaccagaaccgggaagacatgctggagctgaaacacataaacaagaccacagacctgaagacagactacttcaagcctggccacccccaggctctgcgcgtgcactcgtacaagtccatgcaacctgagatggaccgtgtcattgagttttatgaaacggcccgtgtggatggcctgatgaagcgggaggagacacccaggacaatgacagagtactatcaaggacgcccagacttcctctcctaccgccatgccagcttcggaccccgagtcaagaagctcactctgagcagtgcagagtcaaacccccggcccattgtgaaaatcacagagcggttcttccgcaacccagcgaagcccgcggaggaggacgtggcagagcgcgtgtttctggtcgcggaggagcgcatccagctgcgctaccactgccgtgaggaccacatcacggcctccaagcgcgagttcctgcggcgcaccgaggtggacagcaaaggcaacaagatcatcatgacgcccgacatgtgcatcagcttcgaggtggagcccatggagcacaccaagaagctgctctaccagtacgaggccatgatgcacctgaagagggaggagaagctgtccagacatcaggtctgggagtcagagctggaggtgctggagattctgaagcttcgagaggaagaggaggcggcgcacacactgaccatctccatctatgacaccaagcggaatgagaagagcaaggaatatcgggaggccatggagcgcatgatgcacgaagagcacctgcggcaggtggagacccagctggactacctggccccattcctggcccagctcccgccaggagagaaactaacatgctggcaggcggtgcgcctcaaggatgagtgcctcagcgacttcaagcagcggctcatcaacaaggccaacctcatccaggcccgctttgagaaggagacccaggagctgcaaaagaagcagcagtggtaccaggagaaccaggtgacgctgacacccgaggatgaagacctgtacctgagttactgctctcaggccatgttccgcatccgcatcctggagcagcgcctcaatcgacacaaggaactggccccactgaagtacctggctctggaggaaaagctctacaaggacccacgcctgggggagctccagaaaatattcgcttgatgtccctcctggggcctcagccagagctgccagagaaaggaaacctcttcccgcagcctggctcctgtgttccctctatccagccaatgcctgtttacacagacacctggcctcactgccagcccacctcccctacagccctgtttgttcctgcttctcatgattttcctgtaaataaacacactcttaatttgcc

SEQ ID NO: 128459 - DNA, 3041 bp, Homo sapiens
  Payload ID: 5144
  Gene Symbol: DRC7
  Gene Name: dynein regulatory complex subunit 7
  Uniprot ID: Q8IY82
  ENST ID: ENST00000360716
  CDS Start-End: 222-2846
caggttgttaccatggagatggctaacagctagagcaggctgtcctcggagggaaccgggtcacatcgcagggccacctctagctgcaagagaatctgggaagctgagcaattcaaaccaggcacactgctgccccccacacaactggggttctgccgtatagaagaggagactggatctttggagacattccatctccagacacccagagacgctccagaatggaggtcctgagggagaaggtggaggaggaggaggaggccgagcgggaggaggcggccgagtgggctgaatgggcgaggatggagaaaatgatgaggccagttgaggtgcggaaggaggaaatcaccttaaagcaggagacgctcagagacctggagaagaagctgtcagagatccagatcactgtctcagcggagctcccggcctttaccaaggacactattgacatctccaagctgcccatttcctacaaaaccaacacacccaaggaggaacacctgctgcaggtggcagacaacttctcccgccagtacagccatctgtgcccggaccgcgtgcccctcttcctgcaccccctgaacgagtgtgaagtgcccaagttcgtgagcacaaccctccggcccacactgatgccctaccccgagctctacaactgggacagctgtgcccagtttgtctccgacttcctcaccatggtgcccctgcctgaccctctcaagccgccctcgcacctgtactcctcgaccactgtgctcaagtaccagaaggggaactgctttgacttcagtacgctgctctgctccatgcttatcggctctggctatgatgcttactgcgtcaacggctacggctcgctggacctgtgccacatggacctgacgcgggaggtgtgcccactcactgtgaagcccaaggagaccatcaagaaggaggaaaaggtgctgcctaagaagtataccatcaaaccccccagggacctgtgcagcaggtttgagcaggagcaagaggtgaagaagcagcaggagatcagagcccaggagaagaagcggctgagggaggaggaggagcgcctcatggaagcggagaaggcaaagccggatgccctgcacggcctgcgggtgcactcctgggtccttgtgctatcggggaagcgcgaggtgcctgagaacttcttcatcgacccattcacaggacatagctacagcacccaggatgagcacttcctgggcatcgaaagcctgtggaaccacaagaactactggatcaacatgcaggattgctggaactgctgcaaggacttgatctttgacctgggtgaccctgtgagatgggagtacatgctcctggggactgataagtctcagctgtccttgactgaagaagacgacagtgggataaacgatgaggatgatgtggaaaatctgggcaaggaggatgaggataagagcttcgacatgccccactcgtgggtggagcagattgagatctccccggaagcatttgagacccgctgcccgaacgggaagaaggtgattcagtacaagagggcaaagctggagaagtgggccccgtacctcaatagcaatggccttgtgagccgcctcaccacctatgaggacttgcagtgtaccaatattttggagataaaggagtggtaccagaaccgggaagacatgctggagctgaaacacataaacaagaccacagacctgaagacagactacttcaagcctggccacccccaggctctgcgcgtgcactcgtacaagtccatgcaacctgagatggaccgtgtcattgagttttatgaaacggcccgtgtggatggcctgatgaagcgggaggagacacccaggacaatgacagagtactatcaaggacgcccagacttcctctcctaccgccatgccagcttcggaccccgagtcaagaagctcactctgagcagtgcagagtcaaacccccggcccattgtgaaaatcacagagcggttcttccgcaacccagcgaagcccgcggaggaggacgtggcagagcgcgtgtttctggtcgcggaggagcgcatccagctgcgctaccactgccgtgaggaccacatcacggcctccaagcgcgagttcctgcggcgcaccgaggtggacagcaaaggcaacaagatcatcatgacgcccgacatgtgcatcagcttcgaggtggagcccatggagcacaccaagaagctgctctaccagtacgaggccatgatgcacctgaagagggaggagaagctgtccagacatcaggtctgggagtcagagctggaggtgctggagattctgaagcttcgagaggaagaggaggcggcgcacacactgaccatctccatctatgacaccaagcggaatgagaagagcaaggaatatcgggaggccatggagcgcatgatgcacgaagagcacctgcggcaggtggagacccagctggactacctggccccattcctggcccagctcccgccaggagagaaactaacatgctggcaggcggtgcgcctcaaggatgagtgcctcagcgacttcaagcagcggctcatcaacaaggccaacctcatccaggcccgctttgagaaggagacccaggagctgcaaaagaagcagcagtggtaccaggagaaccaggtgacgctgacacccgaggatgaagacctgtacctgagttactgctctcaggccatgttccgcatccgcatcctggagcagcgcctcaatcgacacaaggaactggccccactgaagtacctggctctggaggaaaagctctacaaggacccacgcctgggggagctccagaaaatattcgcttgatgtccctcctggggcctcagccagagctgccagagaaaggaaacctcttcccgcagcctggctcctgtgttccctctatccagccaatgcctgtttacacagacacctggcctcactgccagcccacctcccctacagccctgtttgttcctgcttctcatgattttcctgtaaataaacacactcttaatttgc

SEQ ID NO: 128460 - DNA, 2906 bp, Homo sapiens
  Payload ID: 5144
  Gene Symbol: DRC7
  Gene Name: dynein regulatory complex subunit 7
  Uniprot ID: Q8IY82
  ENST ID: ENST00000394337
  CDS Start-End: 85-2709
gttaccatggagatggctaacagctagagcaggctgtcctcggagggagacattccatctccagacacccagagacgctccagaatggaggtcctgagggagaaggtggaggaggaggaggaggccgagcgggaggaggcggccgagtgggctgaatgggcgaggatggagaaaatgatgaggccagttgaggtgcggaaggaggaaatcaccttaaagcaggagacgctcagagacctggagaagaagctgtcagagatccagatcactgtctcagcggagctcccggcctttaccaaggacactattgacatctccaagctgcccatttcctacaaaaccaacacacccaaggaggaacacctgctgcaggtggcagacaacttctcccgccagtacagccatctgtgcccggaccgcgtgcccctcttcctgcaccccctgaacgagtgtgaagtgcccaagttcgtgagcacaaccctccggcccacactgatgccctaccccgagctctacaactgggacagctgtgcccagtttgtctccgacttcctcaccatggtgcccctgcctgaccctctcaagccgccctcgcacctgtactcctcgaccactgtgctcaagtaccagaaggggaactgctttgacttcagtacgctgctctgctccatgcttatcggctctggctatgatgcttactgcgtcaacggctacggctcgctggacctgtgccacatggacctgacgcgggaggtgtgcccactcactgtgaagcccaaggagaccatcaagaaggaggaaaaggtgctgcctaagaagtataccatcaaaccccccagggacctgtgcagcaggtttgagcaggagcaagaggtgaagaagcagcaggagatcagagcccaggagaagaagcggctgagggaggaggaggagcgcctcatggaagcggagaaggcaaagccggatgccctgcacggcctgcgggtgcactcctgggtccttgtgctatcggggaagcgcgaggtgcctgagaacttcttcatcgacccattcacaggacatagctacagcacccaggatgagcacttcctgggcatcgaaagcctgtggaaccacaagaactactggatcaacatgcaggattgctggaactgctgcaaggacttgatctttgacctgggtgaccctgtgagatgggagtacatgctcctggggactgataagtctcagctgtccttgactgaagaagacgacagtgggataaacgatgaggatgatgtggaaaatctgggcaaggaggatgaggataagagcttcgacatgccccactcgtgggtggagcagattgagatctccccggaagcatttgagacccgctgcccgaacgggaagaaggtgattcagtacaagagggcaaagctggagaagtgggccccgtacctcaatagcaatggccttgtgagccgcctcaccacctatgaggacttgcagtgtaccaatattttggagataaaggagtggtaccagaaccgggaagacatgctggagctgaaacacataaacaagaccacagacctgaagacagactacttcaagcctggccacccccaggctctgcgcgtgcactcgtacaagtccatgcaacctgagatggaccgtgtcattgagttttatgaaacggcccgtgtggatggcctgatgaagcgggaggagacacccaggacaatgacagagtactatcaaggacgcccagacttcctctcctaccgccatgccagcttcggaccccgagtcaagaagctcactctgagcagtgcagagtcaaacccccggcccattgtgaaaatcacagagcggttcttccgcaacccagcgaagcccgcggaggaggacgtggcagagcgcgtgtttctggtcgcggaggagcgcatccagctgcgctaccactgccgtgaggaccacatcacggcctccaagcgcgagttcctgcggcgcaccgaggtggacagcaaaggcaacaagatcatcatgacgcccgacatgtgcatcagcttcgaggtggagcccatggagcacaccaagaagctgctctaccagtacgaggccatgatgcacctgaagagggaggagaagctgtccagacatcaggtctgggagtcagagctggaggtgctggagattctgaagcttcgagaggaagaggaggcggcgcacacactgaccatctccatctatgacaccaagcggaatgagaagagcaaggaatatcgggaggccatggagcgcatgatgcacgaagagcacctgcggcaggtggagacccagctggactacctggccccattcctggcccagctcccgccaggagagaaactaacatgctggcaggcggtgcgcctcaaggatgagtgcctcagcgacttcaagcagcggctcatcaacaaggccaacctcatccaggcccgctttgagaaggagacccaggagctgcaaaagaagcagcagtggtaccaggagaaccaggtgacgctgacacccgaggatgaagacctgtacctgagttactgctctcaggccatgttccgcatccgcatcctggagcagcgcctcaatcgacacaaggaactggccccactgaagtacctggctctggaggaaaagctctacaaggacccacgcctgggggagctccagaaaatattcgcttgatgtccctcctggggcctcagccagagctgccagagaaaggaaacctcttcccgcagcctggctcctgtgttccctctatccagccaatgcctgtttacacagacacctggcctcactgccagcccacctcccctacagccctgtttgttcctgcttctcatgattttcctgtaaataaacacactcttaatttgcca

SEQ ID NO: 128461 - DNA, 499 bp, Homo sapiens
  Payload ID: 5144
  Gene Symbol: DRC7
  Gene Name: dynein regulatory complex subunit 7
  ENST ID: ENST00000564297
  CDS Start-End: 74-286
gatggctaacagctagagcaggctgtcctcggagggagacattccatctccagacacccagagacgctccagaatggaggtcctgagggagaaggtggaggaggaggaggaggccgagcgggaggaggcggccgagtgggctgaatgggcgaggatggagaaaatgatgaggccagttgaggtgcggaaggaggaaatcaccttaaagcaggagacgctcagagacctggagaagaagctgtcagagatccagatcactgtctcagcggagctcccaagttcgtgagcacaaccctccggcccacactgatgccctaccccgagctctacaactgggacagctgtgcccagtttgtctccgacttcctcaccatggtgcccctgcctgaccctctcaagccgccctcgcacctgtactcctcgaccactgtgctcaagtaccagaaggggaactgctttgacttcagtacgctgctctgctccatgcttatcggctctg

SEQ ID NO: 128462 - DNA, 436 bp, Homo sapiens
  Payload ID: 5144
  Gene Symbol: DRC7
  Gene Name: dynein regulatory complex subunit 7
  ENST ID: ENST00000569167
  CDS Start-End: 278-436
aggttgttaccatggagatggctaacagctagagcaggctgtcctcggaggggtgggaggaggagaagggcagagggctccccaatcacttctgcccacatctcattggccagaaccgggtcacatcgcagggccacctctagctgcaagagaatctgggaagctgagcaattcaaaccaggcacactgctgccccccacacaactggggttctgccgtatagaagaggagactggatctttggaagttcgtgagcacaaccctccggcccacactgatgccctaccccgagctctacaactgggacagctgtgcccagtttgtctccgacttcctcaccatggtgcccctgcctgaccctctcaagccgccctcgcacctgtactcctcgaccactgtgctcaagtaccagaaggggaactgctttgacttcagt

SEQ ID NO: 128463 - DNA, 1830 bp, Homo sapiens
  Payload ID: 5144
  Gene Symbol: DRC7
  Gene Name: dynein regulatory complex subunit 7
  ENST ID: ENST00000562250
  CDS Start-End: 1-1283
tcgacatgccccactcgtgggtggagcagattgagatctccccggaagcatttgagacccgctgcccgaacgggaagaaggtgattcagtacaagagggcaaagctggagaagtgggccccgtacctcaatagcaatggccttgtgagccgcctcaccacctatgaggacttgcagtgtaccaatattttggagataaaggagtggtaccagaaccgggaagacatgctggagctgaaacacataaacaagaccacagacctgaagacagactacttcaagcctggccacccccaggctctgcgcgtgcactcgtacaagtccatgcaacctgagatggaccgtgtcattgagttttatgaaacggcccgtgtggatggcctgatgaagcgggaggagacacccaggacaatgacagagtactatcaaggacgcccagacttcctctcctaccgccatgccagcttcggaccccgagtcaagaagctcactctgagcagtgcagagtcaaacccccggcccattgtgaaaatcacagagcggttcttccgcaacccagcgaagcccgcggaggaggacgtggcagagcgcgtgtttctggtcgcggaggagcgcatccagctgcgctaccactgccgtgaggaccacatcacggcctccaagcgcgagttcctgcggcgcaccgaggtggacagcaaaggcaacaagatcatcatgacgcccgacatgtgcatcagcttcgaggtgctggagattctgaagcttcgagaggaagaggaggcggcgcacacactgaccatctccatctatgacaccaagcggaatgagaagagcaaggaatatcgggaggccatggagcgcatgatgcacgaagagcacctgcggcaggtggagacccagctggactacctggccccattcctggcccagctcccgccaggagagaaactaacatgctggcaggcggtgcgcctcaaggatgagtgcctcagcgacttcaagcagcggctcatcaacaaggccaacctcatccaggcccgctttgagaaggagacccaggagctgcaaaagaagcagcagtggtaccaggagaaccaggtgacgctgacacccgaggatgaagacctgtacctgagttactgctctcaggccatgttccgcatccgcatcctggagcagcgcctcaatcgacacaaggaactggccccactgaagtacctggctctggaggaaaagctctacaaggacccacgcctgggggagctccagaaaatattcgcttgatgtccctcctggggcctcagccagagctgccagagaaaggaaacctcttcccgcagcctggctcctgtgttccctctatccagccaatgcctgtttacacagacacctggcctcactgccagcccacctcccctacagccctgtttgttcctgcttctcatgattttcctgtaaataaacacactcttaatttgccatttgtgccttgcgcttcacaagctccagcagcagcctttctcttcttctgttatctatagcctgggaccacccccttcctccccttggcctgtcgtttgcttcctgtccttctctccgttggaatgtcaggtcttcacagcacctctgcagatggtcccacagccatctgcaaacaactggttatatctcaatgtgactagggtggcccacctcaccaagtgggatggggaaggctaagatgcatgccccagaatttgaggactgaatcccagctcctcctcttaccagataccacttacccatctgtggaatggggtagcattgttgcattaaataagacttatggcca

SEQ ID NO: 128464 - DNA, 530 bp, Homo sapiens
  Payload ID: 5144
  Gene Symbol: DRC7
  Gene Name: dynein regulatory complex subunit 7
  ENST ID: ENST00000564132
  CDS Start-End: 1-479
agaagtataccatcaaaccccccagggacctgtgcagcaggtttgagcaggagcaagaggtgaagaagcagcaggagatcagagcccaggagaagaagcggctgagggaggaggaggagcgcctcatggaagcggagaaggcaaagccggatgccctgcacggcctgcgggtgcactcctgggtccttgtgctatcggggaagcgcgaggtgcctgagaacttcttcatcgacccattcacaggacatagctacagcacccaggatgagcacttcctgggcatcgaaagcctgtggaaccacaagaactactggatcaacatgcaggattgctggaactgctgcaaggtgcctagggagggggagctgggtgggtgtggcaggcacagtgcaggtgataggaatagagggaagcaatggcagccagaccttggggagagcgagacaccaggccacgagggctttgaaccttctccatagctgcgtctccatggcccactcccttgcccatgaataaccattctgatacga

SEQ ID NO: 128465 - DNA, 571 bp, Homo sapiens
  Payload ID: 5144
  Gene Symbol: DRC7
  Gene Name: dynein regulatory complex subunit 7
  ENST ID: ENST00000569375
  CDS Start-End: 290-571
agcttcccaggttgttaccatggagatggctaacagctagagcaggctgtcctcggaggggtgggaggaggagaagggcagagggctccccaatcacttctgcccacatctcattggccagaaccgggtcacatcgcagggccacctctagctgcaagagaatctgggaagctgagcaattcaaaccaggcacactgctgccccccacacaactggggttctgccgtatagaagaggagactggatctttggagacattccatctccagacacccagagacgctccagaatggaggtcctgagggagaaggtggaggaggaggaggaggccgagcgggaggaggcggccgagtgggctgaatgggcgaggatggagaaaatgatgaggccagttgaggtgcggaaggaggaaatcaccttaaagcaggagacgctcagagacctggagaagaagctgtcagagatccagatcactgtctcagcggagctcccggcctttaccaaggacactattgacatctccaagctgcccatttcctacaaaaccaacacacccaaggaggaacacctg

SEQ ID NO: 128466 - DNA, 589 bp, Homo sapiens
  Payload ID: 5144
  Gene Symbol: DRC7
  Gene Name: dynein regulatory complex subunit 7
  ENST ID: ENST00000563126
  CDS Start-End: 80-589
catggagatggctaacagctagagcaggctgtcctcggagggagacattccatctccagacacccagagacgctccagaatggaggtcctgagggagaaggtggaggaggaggaggaggccgagcgggaggaggcggccgagtgggctgaatgggcgaggatggagaaaatgatgaggccagttgaggtgcggaaggaggaaatcaccttaaagcaggagacgctcagagacctggagaagaagctgtcagagatccagatcactgtctcagcggagctcccggcctttaccaaggacactattgacatctccaagctgcccatttcctacaaaaccaacacacccaaggaggaacacctgctgcaggtggcagacaacttctcccgccagtacagccatctgtgcccggaccgcgtgcccctcttcctgcaccccctgaacgagtgtgaagtgcccgtaaggctgaagttcgtgagcacaaccctccggcccacactgatgccctaccccgagctctacaactgggacagctgtgcccagtttgtctccgacttcctcaccatggtgcccctgcctgaccctctcaag

SEQ ID NO: 128467 - DNA, 2379 bp, Homo sapiens
  Payload ID: 5145
  Gene Symbol: DNAAF1
  Gene Name: dynein, axonemal, assembly factor 1
  Uniprot ID: Q8NEP3
  ENST ID: ENST00000378553
  CDS Start-End: 125-2302
agggcgccagcggctggcgaagaaggaaagagggtactctctggctgggctggggccgtagcgacgtccgccgcgaacctgggccccccaaagctgcggggcgttcggtgtcgccgaagtaaacatgcaccctgagccctcggagcctgcgacaggtggtgcagcagagctggattgcgcgcaggagcccggcgtggaggagtctgcgggtgaccacgggagcgcaggccgagggggctgcaaggaagaaattaatgatcctaaggaaatatgtgtgggttcttctgacacatcctaccacagccagcagaaacagagtggtgataatgggtcaggtggtcacttcgcacacccaagagaagacagggaagatcggggccccagaatgactaaaagttccctgcaaaaactctgcaagcagcacaagctttatattaccccagcattgaatgatacgctgtatttacactttaaaggttttgatcgcattgagaacctggaagagtacacagggctgcgctgtctctggctgcagagcaatggaatacagaaaatcgaaaacctggaggcccaaactgagttgcgttgcctcttcttgcaaatgaacttgctccgtaaaattgagaacctggaacctctgcagaaactggatgctcttaacctcagcaacaattacatcaagaccattgaaaacctctcctgcctcccagtcctgaacacattgcagatggcccacaatcacctggagaccgtggaggacattcagcatctacaagagtgtttgaggctttgtgtccttgacctttcgcacaacaagctgagtgacccggagatcctgagcattctggaaagcatgcccgatttgcgtgtactgaatttgatgggaaacccggttatcagacagattcctaattacagaaggacagtcactgtacgactaaagcacttaacatacctggatgatagaccagtgtttccaaaggacagagcttgtgcggaggcctgggctaggggagggtacgcagctgaaaaggaggagagacagcagtgggagagcagggagcggaagaagatcacagacagcattgaagccttggccatgatcaagcagcgggcagaggagaggaaaagacagagagagagtcaagagagaggggagatgacatcttcagatgatggtgagaatgtgcccgccagtgcggaaggcaaggaggagcctcccggggacagagaaacaaggcagaagatggagctatttgttaaggaaagctttgaggccaaggacgagctctgcccggaaaagccaagtggagaggagccgcctgtggaggctaaaagagaggatggaggtccagagccagaggggaccctcccagctgagaccctgctactgtcgtcacctgtggaggttaaaggagaggacggagatggagagccagaggggaccctcccagctgaggccccaccacccccgccacctgtggaggttaaaggagaggatggagatcaagagccagaggggaccctcccagctgagaccctgctactgtcaccgcctgtgaaggttaaaggagaggatggagatcgagagccagaggggaccctcccagctgaggccccaccaccaccgcccctgggagctgccagggaagaaccgactccccaggctgtggccactgagggtgtattcgttacagaacttgatggaacgagaacggaagatttagaaaccattagactggagacaaaggagacattctgcattgatgacctacctgacttggaagatgatgatgaaacaggcaaatctctggaagaccagaatatgtgctttccgaagattgaggtcatctcgagcttgagtgatgacagtgaccctgaactggactacacgtcactccctgtgctggaaaacctccccacagacactctgtcaaatatatttgcagtctctaaagacacctcaaaggcggctcgggtgcccttcacagacatctttaaaaaagaagctaagagggacttggaaatccgaaaacaagacaccaagtccccaagacccctgatccaggagctcagcgacgaggacccctctggccagctactgatgccccccacctgccaaagagatgctgcaccactcacttccagtggagacagggacagcgacttccttgcagcctcttctccggtgccgactgagagcgccgccacacccccagagacgtgtgtcggagttgcccagcccagccaagctctgcccacgtgggacctcactgcattcccagcaccgaaagcatcatagttttccccagttatatgtagcataaatggtttaatcataaatgtctcccttaggcatgataaacattttaacaccca

SEQ ID NO: 128468 - DNA, 649 bp, Homo sapiens
  Payload ID: 5145
  Gene Symbol: DNAAF1
  Gene Name: dynein, axonemal, assembly factor 1
  ENST ID: ENST00000569735
  CDS Start-End: 1-573
aatatgtgctttccgaagattgaggtcatctcgagcttgagtgatgacagtgaccctgaactggactacacgtcactccctgtgctggaaaacctccccacagacactctgtcaaatatatttgcagtctctaaagacacctcaaaggcggctcgggtgcccttcacagacatctttaaaaaagaagctaagagggacttggaaatccgaaaacaagacaccaagtccccaagacccctgatccaggagctcagcgacgaggacccctctggccagctactgatgccccccacctgccaaagagatgctgcaccactcacttccagtggagacagggacagcgacttccttgcagcctcttctccggagatggggtttcaccatgttgaccaggctggtctcgaactcctgacctcaggtgatctgtttgcctcggcctcccaaagtgctgggattacagtgccgactgagagcgccgccacacccccagagacgtgtgtcggagttgcccagcccagccaagctctgcccacgtgggacctcactgcattcccagcaccgaaagcatcatagttttccccagttatatgtagcataaatggtttaatcataaatgtctcccttaggcatgataaacattttaacaccc

SEQ ID NO: 128469 - DNA, 1009 bp, Homo sapiens
  Payload ID: 5145
  Gene Symbol: DNAAF1
  Gene Name: dynein, axonemal, assembly factor 1
  ENST ID: ENST00000567918
  CDS Start-End: 132-875
aaagactagggcgccagcggctggcgaagaaggaaagagggtactctctggctgggctggggccgtagcgacgtccgccgcgaacctgggccccccaaagctgcggggcgttcggtgtcgccgaagtaaacatgcaccctgagccctcggagcctgcgacaggtggtgcagcagagctggattgcgcgcaggagcccggcgtggaggagtctgcgggtgaccacgggagcgcaggccgagggggctgcaaggaagaaattaatgatcctaaggaaatatgtgtgggttcttctgacacatcctaccacagccagcagaaacagagtggtgataatgggtcaggtggtcacttcgcacacccaagagaagacagggaagatcggggccccagaatgactaaaagttccctgcaaaaactctgcaagcagcacaagctttatattaccccagcattgaatgatacgctgtatttacactttaaaggttttgatcgcattgagaacctggaagagtacacagggctgcgctgtctctggctgcagagcaatggaatacagaaaatcgaaaacctggaggcccaaactgagttgcgttgcctcttcttgcaaatgaacttgctccgtaaaattgagaacctggaacctctgcagaaactggatgctcttaacctcagcaacaattacatcaagaccattgaaaacctctcctgcctcccagtcctgaacacattgcagatggcccacaatcacctggagaccgtggaggacattcagcatctacaagagtgtttgaggctttgtgtccttgacctttcgcacaacaagctgagtgacccggagatcctgagcattctggaaagcatgcccgatttgtgacagcggggagagctgtaagccgaggaagaagggccgtccatcctgcggcactcagcagagcgtgtactgaatttgatgggaaacccggttatcagacagattcctaattacagaaggacagtcactgtacgact

SEQ ID NO: 128470 - DNA, 1766 bp, Homo sapiens
  Payload ID: 5145
  Gene Symbol: DNAAF1
  Gene Name: dynein, axonemal, assembly factor 1
  Uniprot ID: Q8NEP3
  ENST ID: ENST00000563093
  CDS Start-End: 132-1388
aaagactagggcgccagcggctggcgaagaaggaaagagggtactctctggctgggctggggccgtagcgacgtccgccgcgaacctgggccccccaaagctgcggggcgttcggtgtcgccgaagtaaacatgcaccctgagccctcggagcctgcgacaggtggtgcagcagagctggattgcgcgcaggagcccggcgtggaggagtctgcgggtgaccacgggagcgcaggccgagggggctgcaaggaagaaattaatgatcctaaggaaatatgtgtgggttcttctgacacatcctaccacagccagcagaaacagagtggtgataatgggtcaggtggtcacttcgcacacccaagagaagacagggaagatcggggccccagaatgactaaaagttccctgcaaaaactctgcaagcagcacaagctttatattaccccagcattgaatgatacgctgtatttacactttaaaggttttgatcgcattgagaacctggaagagtacacagggctgcgctgtctctggctgcagagcaatggaatacagaaaatcgaaaacctggaggcccaaactgagttgcgttgcctcttcttgcaaatgaacttgctccgtaaaattgagaacctggaacctctgcagaaactggatgctcttaacctcagcaacaattacatcaagaccattgaaaacctctcctgcctcccagtcctgaacacattgcagatggcccacaatcacctggagaccgtggaggacattcagcatctacaagagtgtttgaggctttgtgtccttgacctttcgcacaacaagctgagtgacccggagatcctgagcattctggaaagcatgcccgatttgcgtgtactgaatttgatgggaaacccggttatcagacagattcctaattacagaaggacagtcactgtacgactaaagcacttaacatacctggatgatagaccagtgtttccaaaggacagagcttgtgcggaggcctgggctaggggagggtacgcagctgaaaaggaggagagacagcagtgggagagcagggagcggaagaagatcacagacagcattgaagccttggccatgatcaagcagcgggcagaggagaggaaaagacagagagagagtcaagagagaggggagatgacatcttcagatgatggtgagaatgtgcccgccagtgcggaaggcaaggaggagcctcccggggacagagaaacaaggcagaagatggagctatttgttaaggaaagctttgaggccaaggacgagctctgcccggaaaagccaagtggagaggagccgcctgtggaggctaaaagagaggatggagaccctgctactgtcaccgcctgtgaaggttaaaggagaggatggagatcgagagccagaggggaccctcccagctgaggccccaccaccaccgcccctgggagctgccagggaagaaccgactccccaggctgtggccactgagggtgtattcgttacagaacttgatggaacgagaacggaagatttagaaaccattagactggagacaaaggagacattctgcattgatgacctacctgacttggaagatgatgatgaaacaggcaaatctctggaagaccaggttaaggtcattagaaaccattttcccacaggcagcttaattccaccttcgttcttgtcgtttaccgtttctctcctaaacttgaaagtaaaatgttccctgtgcataaagcattgaattccccc

SEQ ID NO: 128471 - DNA, 537 bp, Homo sapiens
  Payload ID: 5145
  Gene Symbol: DNAAF1
  Gene Name: dynein, axonemal, assembly factor 1
  ENST ID: ENST00000564928
  CDS Start-End: 1-176
gaaaacaagacaccaagtccccaagacccctgatccaggagctcagcgacgaggacccctctggccagctactgatgccccccacctgccaaagagatgctgcaccactcacttccagtggagacagggacagcgacttccttgcagcctcttctccggctgccaagtgtatttagtccctgaacctggatccaaggcatctccctgtaggaaacatcagaccggggcagagattgacaaagcaacccacaacagcagctgccaacggccgctgtgcccacctcatcagcagctctgcaggggcctcactccaccctcaccaaacacgaggagccagcactcctggcccccattccactggacaggaaggcgtgagaactgagggacctgcctgaggcccccacagctgaggcgcagcggagccctgcctcccagcacagactaaaatcccagcaacacaggcccaccggcacctccagcctgccttgcgggatgatcttcaggcgaatatacaaaatacaaaagaaactactactg

SEQ ID NO: 128472 - DNA, 2963 bp, Homo sapiens
  Payload ID: 5146
  Gene Symbol: DNAAF2
  Gene Name: dynein, axonemal, assembly factor 2
  Uniprot ID: Q9NVR5
  ENST ID: ENST00000298292
  CDS Start-End: 82-2595
cccagaaactctgaggcggatcccccaacccagtgtcagactgatcgcctttggcccgagggcgaggagccacaggacagtatggccaaagcggcggcctcctcgtcgctggaggacttggacctgagcggagaggaggtccagcggctcacctccgccttccaggacccggagttccggcgaatgttctcccagtacgccgaggagctcaccgacccggagaaccggcggcgctacgaggcggagatcaccgcgctagagcgtgagcgcggggtggaagtgcggttcgtgcacccggagcccggccatgtgctgcgcaccagcctggacggggcgcggcgctgctttgtgaatgtctgcagcaacgcgttggtgggcgcgcccagcagccggcccggctccggtggcgaccggggcgcagctcctggcagccactggtccctgccctacagcctggcgcccggccgcgagtacgcggggcgcagcagcagccgctacatggtctacgacgtggtcttccatccagacgcgcttgcgctggcccggcggcacgagggcttccgccagatgctggacgccacggccctggaggccgtcgagaagcagttcggcgtgaagctggaccgcaggaatgccaagaccctgaaggccaagtataaggggaccccagaggctgcggtgctgcgcacgcccctgcccggggtcatccccgcaaggcctgacggggagccgaagggtcctctcccggacttcccctacccttaccagtacccggcagcccccgggccccgggcgccctcccctccggaagcggccttgcagcccgcccccaccgagcctcgctacagcgtggtgcagcgccaccacgtggacctccaggattaccgctgctccagggactcagccccgagccccgtgccccatgagctggtgatcaccatcgaactgccgctgttgcgctcggccgagcaggcggcgctggaggtaacgagaaagctgctgtgcctcgactcgaggaaacctgactaccggctgcggctctcgctcccgtacccagtggacgatggccgcggcaaggcacaattcaacaaggcccggcggcagctggtggttacgctgccagtggtgctgccggccgcgcgccgggagcccgctgtcgccgtcgccgccgccgcgccggaagagtccgcggaccggtccggaactgacggccaggcctgcgcttccgctcgcgagggggaggcgggacccgcgaggagtcgcgcggaggacggaggccacgatacctgcgtggctggggctgcgggctccggggtcaccaccctgggcgacccggaggtggcgcctccgccggccgcagctggagaggagcgtgtccccaagccgggggagcaggacttgagcaggcacgcggggtcaccgccgggcagcgtggaggagccatctcctggaggagaaaactcacctggtggcggaggctccccttgtttgtcctcccggagcctggcgtggggttcttctgcgggaagagagagtgcgcgcggagatagcagtgtggaaacacgcgaggagtcggagggcacgggcggccagcgctcagcctgcgccatgggtggtcccgggaccaagagcggggagcctttgtgtcctccgttactgtgtaatcaggacaaagaaaccttgactctgctcattcaggtgcctcggatccagccgcaaagtcttcaaggagatttgaatcccctctggtacaaattacgcttctccgcacaagacttagtttattccttctttttgcaatttgctccagagaataaattgagtaccacagaacctgtgattagcatttcttcaaacaatgcagtgatagaactggcaaaatctccagagagccatggacattggagagagtggtattatggtgtaaacaacgattctttggaggaaaggttatttgtcaatgaagaaaatgttaatgagtttcttgaagaggtcctgagctctccattcaaacagtctatgtccttgaccccaccattaattgaagttcttcaagttactgataataagattcaaattaatgcaaagttgcaagaatgtagtaactctgatcagctacaaggaaaggaggaaagagtaaatgaagaaagtcatctaactgaaaaggaatatatagaacattgtaacacccctacaactgattctgattcatctatagcagttaaagcactacaaatagatagctttggtttagttacatgctttcaacaagagtctcttgatgtttctcaaatgatacttggaaaatctcagcaacctgagtcaaaaatgcaatctgaatttataaaagaaaaaagtgctacttgttcaaatgaggaaaaagataacttaaacgagtcagtaataactgaagagaaagaaacagatggagatcacctatcttcattactgaacaaaactacggttcacaatatacctggattcgacagcataaaagaaaccaatatgcaggatggtagtgtgcaggtcattaaagatcatgtgaccaattgtgcattcagttttcagaattctttgctatatgatttggattaattctatataattttggacttttaaatattaaggttaaaaaatacctgtatctaaaattgattctgttaactgttgtcttaaaactaaaggtattaaagtataaaattaaaatttgcaattttttttaaaaaattgcaattttgattctcatgggggaaattggagataatttttttttttttgcctctggagtttaaagtttccttatggagataagttttgtgattcctgtaatagatgtgtatgttttctatttgagagttaaaacatttgagagttaaaacatttagttttaatacaacctatgtatatatacttctgtgttaaattttgctttgtcattaataaaatttaaaaatattcactaa

SEQ ID NO: 128473 - DNA, 2819 bp, Homo sapiens
  Payload ID: 5146
  Gene Symbol: DNAAF2
  Gene Name: dynein, axonemal, assembly factor 2
  Uniprot ID: Q9NVR5
  ENST ID: ENST00000406043
  CDS Start-End: 82-2451
cccagaaactctgaggcggatcccccaacccagtgtcagactgatcgcctttggcccgagggcgaggagccacaggacagtatggccaaagcggcggcctcctcgtcgctggaggacttggacctgagcggagaggaggtccagcggctcacctccgccttccaggacccggagttccggcgaatgttctcccagtacgccgaggagctcaccgacccggagaaccggcggcgctacgaggcggagatcaccgcgctagagcgtgagcgcggggtggaagtgcggttcgtgcacccggagcccggccatgtgctgcgcaccagcctggacggggcgcggcgctgctttgtgaatgtctgcagcaacgcgttggtgggcgcgcccagcagccggcccggctccggtggcgaccggggcgcagctcctggcagccactggtccctgccctacagcctggcgcccggccgcgagtacgcggggcgcagcagcagccgctacatggtctacgacgtggtcttccatccagacgcgcttgcgctggcccggcggcacgagggcttccgccagatgctggacgccacggccctggaggccgtcgagaagcagttcggcgtgaagctggaccgcaggaatgccaagaccctgaaggccaagtataaggggaccccagaggctgcggtgctgcgcacgcccctgcccggggtcatccccgcaaggcctgacggggagccgaagggtcctctcccggacttcccctacccttaccagtacccggcagcccccgggccccgggcgccctcccctccggaagcggccttgcagcccgcccccaccgagcctcgctacagcgtggtgcagcgccaccacgtggacctccaggattaccgctgctccagggactcagccccgagccccgtgccccatgagctggtgatcaccatcgaactgccgctgttgcgctcggccgagcaggcggcgctggaggtaacgagaaagctgctgtgcctcgactcgaggaaacctgactaccggctgcggctctcgctcccgtacccagtggacgatggccgcggcaaggcacaattcaacaaggcccggcggcagctggtggttacgctgccagtggtgctgccggccgcgcgccgggagcccgctgtcgccgtcgccgccgccgcgccggaagagtccgcggaccggtccggaactgacggccaggcctgcgcttccgctcgcgagggggaggcgggacccgcgaggagtcgcgcggaggacggaggccacgatacctgcgtggctggggctgcgggctccggggtcaccaccctgggcgacccggaggtggcgcctccgccggccgcagctggagaggagcgtgtccccaagccgggggagcaggacttgagcaggcacgcggggtcaccgccgggcagcgtggaggagccatctcctggaggagaaaactcacctggtggcggaggctccccttgtttgtcctcccggagcctggcgtggggttcttctgcgggaagagagagtgcgcgcggagatagcagtgtggaaacacgcgaggagtcggagggcacgggcggccagcgctcagcctgcgccatgggtggtcccgggaccaagagcggggagcctttgtgtcctccgttactgtgtaatcaggacaaagaaaccttgactctgctcattcaggtgcctcggatccagccgcaaagtcttcaaggagatttgaatcccctctggtacaaattacgcttctccgcacaagacttagtttattccttctttttgcaatttgctccagagaataaattgagtaccacagaacctgtgattagcatttcttcaaacaatgcagtgatagaactggcaaaatctccagagagccatggacattggagagagtggtattatggtgtaaacaacgattctttggagttgcaagaatgtagtaactctgatcagctacaaggaaaggaggaaagagtaaatgaagaaagtcatctaactgaaaaggaatatatagaacattgtaacacccctacaactgattctgattcatctatagcagttaaagcactacaaatagatagctttggtttagttacatgctttcaacaagagtctcttgatgtttctcaaatgatacttggaaaatctcagcaacctgagtcaaaaatgcaatctgaatttataaaagaaaaaagtgctacttgttcaaatgaggaaaaagataacttaaacgagtcagtaataactgaagagaaagaaacagatggagatcacctatcttcattactgaacaaaactacggttcacaatatacctggattcgacagcataaaagaaaccaatatgcaggatggtagtgtgcaggtcattaaagatcatgtgaccaattgtgcattcagttttcagaattctttgctatatgatttggattaattctatataattttggacttttaaatattaaggttaaaaaatacctgtatctaaaattgattctgttaactgttgtcttaaaactaaaggtattaaagtataaaattaaaatttgcaattttttttaaaaaattgcaattttgattctcatgggggaaattggagataatttttttttttttgcctctggagtttaaagtttccttatggagataagttttgtgattcctgtaatagatgtgtatgttttctatttgagagttaaaacatttgagagttaaaacatttagttttaatacaacctatgtatatatacttctgtgttaaattttgctttgtcattaataaaatttaaaaatattcactaa

SEQ ID NO: 128474 - DNA, 2169 bp, Homo sapiens
  Payload ID: 5147
  Gene Symbol: DNAAF3
  Gene Name: dynein, axonemal, assembly factor 3
  ENST ID: ENST00000391720
  CDS Start-End: 4-1770
cacatgcttccattgcttgattcctcgaaaagggcggggactctgggcagcggttgtggagtgccgcgggtccacagtgctgcactgagcagagaggaaggggcgtcccgggatatttggaggataaaggtgtgggcaagggtgatgaccacacctgccggctccggcagcggcttcggctccgtgtcctggtggggcctgtccccggcgctggacctgcaggctgaaagtcctcctgtggacccagactcccaggccgatacagtgcacagcaaccccgagctagatgtgctgcttctgggctctgtggatggacggcacctgctgcggaccctgtcccgagcgaagttctggcctcgcaggaggttcaacttctttgtgctggagaataatctggaagctgtggcccgacacatgctgatcttcagcctagccctggaggaaccggagaagatggggctgcaagagcgaagcgagaccttcctggaagtgtgggggaacgcgctgctgcgcccgccagtggccgccttcgtgcgtgcccaggccgacctgctggcgcacctggtccccgagcccgaccgcctggaggaacagctgccctggctcagcctccgcgccctcaagttccgcgagcgggatgccctggaggccgtattccgcttctgggctggcggcgagaaagggccccaggcgttccccatgagccgcctctgggactcgcgcctgcgccactacctgggctcccgctacgacgcccggcgcggtgtcagcgactgggacctgcgcatgaagctgcatgaccgcggggctcaagtcattcacccccaggagttccgacgctggcgggacacaggcgtcgcctttgaactcagggactccagcgcctatcatgtgcccaaccggaccctggcgtccggtcgcctcctgagctaccgtggggagcgcgtggcagcgcgcgggtactggggggacatcgccacggggcccttcgtggccttcggcatcgaagcggacgacgagagcctcctgcggacgagcaacggccagccagtcaagacggccggggagatcactcaacacaacgtgacggagctgctccgcgacgtggccgcctgggggcgcgcgagagccaccgggggggacctggaggagcagcagcacgcggagggaagcccggagccagggactccagcagccccgaccccggaatctttcaccgtccacttcctgccgctcaattctgctcagactctccaccacaagagctgctacaacggccgattccagctcctctatgtggcctgtggtatggtccatcttctcatccctgagcttggggcctgtgtggcacccggagggaacttgattgtggaattagcccggtacctggtggacgtgcggcaggagcagctgcagggattcaacacccgggtcagggagctagctcaggcagctggatttgctccacagaccggggccaggccttcagagaccttcgcacgtttctgcaagtcccaggaatcagctctgggcaacactgtcccagctgtggaacccggaactccgccccttgacatcctggcccagcctcttgaagccagcaacccagcccttgagggcctgacccagcctctgcagggtgggaccccacactgtgagccctgccagctgccctctgagtctccaggttcactctcagaggttctggctcagcctcagggggccttggctccgcccaactgtgagtcagactccaaaactggagtctgacccaacccctagacaccccttatctccaacttccaaagtcaggttgtaggatgagaacccgctgataccattctaagtccgctgctagagtcctcaattttattctaatcattcccactcagtacccgccacccccaccccgggagtgttggtagactttcaaattccatttctgagattctatggtctattcctagaattctagattgttctctcagaattccaaattccacttctgaggctctaagcccagcctaggatctgacactgagtctcaggcccttgactttggcccccttgttcccaggcaccctgtggctgactaggggctggggtgtctcctcaccagggcctggtcagcacccagatggttcaagtaaagcaagttgtgtccaccct

SEQ ID NO: 128475 - DNA, 2318 bp, Homo sapiens
  Payload ID: 5147
  Gene Symbol: DNAAF3
  Gene Name: dynein, axonemal, assembly factor 3
  ENST ID: ENST00000455045
  CDS Start-End: 454-1917
attggccaaaagtttgtagagggcgggcctcgctcactctcattggtcagttgctcgctgtggtcccatcccacatgcttccattgcttgattcctcgaaaagggcggggactctgggcagcggttgtggagtgccgcgggtccacagtgctgcactgagcagagaggaaggggcgtcccgggatatttggaggataaaggtgtgggcaagggtgatgaccacacctgccggctccggcagcggcttcggctccgtgtcctggtggggcctgtccccggcgctggacctgcaggctgaaagtcctcctgtggacccagactcccaggccgatacagtgcacagcaaccccgagctagatgtgctgcttctgggctctgtggatggacggcacctgctgcggaccctgtcccgagcgaagttctggcctcgcaggaggttcaacgtgagctgggatgaagatgagagcccagattcccgagtccttgagggaggaagggattgaaattctaaaacctcagttctttgtgctggagaataatctggaagctgtggcccgacacatgctgatcttcagcctagccctggaggaaccggagaagatggggctgcaagagcgaagcgagaccttcctggaagtgtgggggaacgcgctgctgcgcccgccagtggccgccttcgtgcgtgcccaggccgacctgctggcgcacctggtccccgagcccgaccgcctggaggaacagctgccctggctcagcctccgcgccctcaagttccgcgagcgggatgccctggaggccgtattccgcttctgggctggcggcgagaaagggccccaggcgttccccatgagccgcctctgggactcgcgcctgcgccactacctgggctcccgctacgacgcccggcgcggtgtcagcgactgggacctgcgcatgaagctgcatgaccgcggggctcaagtcattcacccccaggagttccgacgctggcgggacacaggcgtcgcctttgaactcagggactccagcgcctatcatgtgcccaaccggaccctggcgtccggtcgcctcctgagctaccgtggggagcgcgtggcagcgcgcgggtactggggggacatcgccacggggcccttcgtggccttcggcatcgaagcggacgacgagagcctcctgcggacgagcaacggccagccagtcaagacggccggggagatcactcaacacaacgtgacggagctgctccgcgacgtggccgcctgggggcgcgcgagagccaccgggggggacctggaggagcagcagcacgcggagggaagcccggagccagggactccagcagccccgaccccggaatctttcaccgtccacttcctgccgctcaattctgctcagactctccaccacaagagctgctacaacggccgattccagctcctctatgtggcctgtggtatggtccatcttctcatccctgagcttggggcctgtgtggcacccggagggaacttgattgtggaattagcccggtacctggtggacgtgcggcaggagcagctgcagggattcaacacccgggtcagggagctagctcaggcagctggatttgctccacagaccggggccaggccttcagagaccttcgcacgtttctgcaagtcccaggaatcagctctgggcaacactgtcccagctgtggaacccggaactccgccccttgacatcctggcccagcctcttgaagccagcaacccagcccttgagggcctgacccagcctctgcagggtgggaccccacactgtgagccctgccagctgccctctgagtctccaggttcactctcagaggttctggctcagcctcagggggccttggctccgcccaactgtgagtcagactccaaaactggagtctgacccaacccctagacaccccttatctccaacttccaaagtcaggttgtaggatgagaacccgctgataccattctaagtccgctgctagagtcctcaattttattctaatcattcccactcagtacccgccacccccaccccgggagtgttggtagactttcaaattccatttctgagattctatggtctattcctagaattctagattgttctctcagaattccaaattccacttctgaggctctaagcccagcctaggatctgacactgagtctcaggcccttgactttggcccccttgttcccaggcaccctgtggctgactaggggctggggtgtctcctcaccagggcctggtcagcacccagatggttcaagtaaagcaagttgtgtccacccttc

SEQ ID NO: 128476 - DNA, 2059 bp, Homo sapiens
  Payload ID: 5147
  Gene Symbol: DNAAF3
  Gene Name: dynein, axonemal, assembly factor 3
  ENST ID: ENST00000524407
  CDS Start-End: 35-1660
ggggcgtcccgggatatttggaggataaagggtgatgaccacacctgccggctccggcagcggcttcggctccgtgtcctggtggggcctgtccccggcgctggacctgcaggctgaaagtcctcctgtggacccagactcccaggccgatacagtgcacagcaaccccgagctagatgtgctgcttctgggctctgtggatggacggcacctgctgcggaccctgtcccgagcgaagttctggcctcgcaggaggttcaacttctttgtgctggagaataatctggaagctgtggcccgacacatgctgatcttcagcctagccctggaggaaccggagaagatggggctgcaagagcgaagcgagaccttcctggaagtgtgggggaacgcgctgctgcgcccgccagtggccgccttcgtgcgtgcccaggccgacctgctggcgcacctggtccccgagcccgaccgcctggaggaacagctgccctggctcagcctccgcgccctcaagttccgcgagcgggatgccctggaggccgtattccgcttctgggctggcggcgagaaagggccccaggcgttccccatgagccgcctctgggactcgcgcctgcgccactacctgggctcccgctacgacgcccggcgcggtgtcagcgactgggacctgcgcatgaagctgcatgaccgcggggctcaagtcattcacccccaggagttccgacgctggcgggacacaggcgtcgcctttgaactcagggactccagcgcctatcatgtgcccaaccggaccctggcgtccggtcgcctcctgagctaccgtggggagcgcgtggcagcgcgcgggtactggggggacatcgccacggggcccttcgtggccttcggcatcgaagcggacgacgagagcctcctgcggacgagcaacggccagccagtcaagacggccggggagatcactcaacacaacgtgacggagctgctccgcgacgtggccgcctgggggcgcgcgagagccaccgggggggacctggaggagcagcagcacgcggagggaagcccggagccagggactccagcagccccgaccccggaatctttcaccgtccacttcctgccgctcaattctgctcagactctccaccacaagagctgctacaacggccgattccagctcctctatgtggcctgtggtatggtccatcttctcatccctgagcttggggcctgtgtggcacccggagggaacttgattgtggaattagcccggtacctggtggacgtgcggcaggagcagctgcagggattcaacacccgggtcagggagctagctcaggcagctggatttgctccacagaccggggccaggccttcagagaccttcgcacgtttctgcaagtcccaggaatcagctctgggcaacactgtcccagctgtggaacccggaactccgccccttgacatcctggcccagcctcttgaagccagcaacccagcccttgagggcctgacccagcctctgcagggtgggaccccacactgtgagccctgccagctgccctctgagtctccaggttcactctcagaggttctggctcagcctcagggggccttggctccgcccaactgtgagtcagactccaaaactggagtctgacccaacccctagacaccccttatctccaacttccaaagtcaggttgtaggatgagaacccgctgataccattctaagtccgctgctagagtcctcaattttattctaatcattcccactcagtacccgccacccccaccccgggagtgttggtagactttcaaattccatttctgagattctatggtctattcctagaattctagattgttctctcagaattccaaattccacttctgaggctctaagcccagcctaggatctgacactgagtctcaggcccttgactttggcccccttgttcccaggcaccctgtggctgactaggggctggggtgtctcctcaccagggcctggtcagcacccagatggttcaagtaaagcaagttgtgtccaccct

SEQ ID NO: 128477 - DNA, 537 bp, Homo sapiens
  Payload ID: 5147
  Gene Symbol: DNAAF3
  Gene Name: dynein, axonemal, assembly factor 3
  ENST ID: ENST00000534170
  CDS Start-End: 201-537
agtgctgcactgagcagagaggaaggggcgtcccgggatatttggaggataaaggtgtgggcaagggtgatgaccacacctgccggctccggcagcggcttcggctccgtgtcctggtggggcctgtccccggcgctggacctgcaggctgaaatccattttttataggggatgctacggtggacgctctgccaaccaccatggtgccccagccagctgtcatcttgccaggtcctcctgtggacccagactcccaggccgatacagtgcacagcaaccccgagctagatgtgctgcttctgggctctgtggatggacggcacctgctgcggaccctgtcccgagcgaagttctggcctcgcaggaggttcaacttctttgtgctggagaataatctggaagctgtggcccgacacatgctgatcttcagcctagccctggaggaaccggagaagatggggctgcaagagcgaagcgagaccttcctggaagtgtgggggaacgcgctgctgcgcccgccagtggccgccttcgtgc

SEQ ID NO: 128478 - DNA, 570 bp, Homo sapiens
  Payload ID: 5147
  Gene Symbol: DNAAF3
  Gene Name: dynein, axonemal, assembly factor 3
  ENST ID: ENST00000532817
  CDS Start-End: 254-570
attgcttgattcctcgaaaagggcggggactctgggcagcggttgtggagtgccgcgggtccacagtgctgcactgagcagagaggaaggggcgtcccgggatatttggaggataaagggtgatgaccacacctgccggctccggcagcggcttcggctccgtgtcctggtggggcctgtccccggcgctggacctgcaggctgaaatccattttttataggggatgctacggtggacgctctgccaaccaccatggtgccccagccagctgtcatcttgccaggtcctcctgtggacccagactcccaggccgatacagtgcacagcaaccccgagctagatgtgctgcttctgggctctgtggatggacggcacctgctgcggaccctgtcccgagcgaagttctggcctcgcaggaggttcaacttctttgtgctggagaataatctggaagctgtggcccgacacatgctgatcttcagcctagccctggaggaaccggagaagatggggctgcaagagcgaagcgagaccttcctggaagtgtgggggaacgcgctgctgcgccc

SEQ ID NO: 128479 - DNA, 485 bp, Homo sapiens
  Payload ID: 5147
  Gene Symbol: DNAAF3
  Gene Name: dynein, axonemal, assembly factor 3
  Uniprot ID: Q8N9W5
  ENST ID: ENST00000534214
  CDS Start-End: 59-346
agtgctgcactgagcagagaggaaggggcgtcccgggatatttggaggataaagggtgatgaccacacctgccggctccggcagcggcttcggctccgtgtcctggtggggcctgtccccggcgctggacctgcaggctgaaagtcctcctgtggacccagactcccaggccgatacagtgcacagcaaccccgagctagatgtgctgcttctgggctctgtggatggacggcacctgctgcggaccctgtcccgagcgaagttctggcctcgcaggaggttcaacgtgagctgggatgaagatgagagcccagattcccgagtccttgagggaggaagggattgaaattctaaaacctcagttctttgtgctggagaataatctggaagctgtggcccgacacatgctgatcttcagcctagccctggaggaaccggagaagatggggctgcaagagcgaagcgagaccttcctggaagtgtgg

SEQ ID NO: 128480 - DNA, 2215 bp, Homo sapiens
  Payload ID: 5147
  Gene Symbol: DNAAF3
  Gene Name: dynein, axonemal, assembly factor 3
  Uniprot ID: Q8N9W5
  ENST ID: ENST00000528412
  CDS Start-End: 115-402
agggcggggactctgggcagcggttgtggagtgccgcgggtccacagtgctgcactgagcagagaggaaggggcgtcccgggatatttggaggataaaggtgtgggcaagggtgatgaccacacctgccggctccggcagcggcttcggctccgtgtcctggtggggcctgtccccggcgctggacctgcaggctgaaagtcctcctgtggacccagactcccaggccgatacagtgcacagcaaccccgagctagatgtgctgcttctgggctctgtggatggacggcacctgctgcggaccctgtcccgagcgaagttctggcctcgcaggaggttcaacgtgagctgggatgaagatgagagcccagattcccgagtccttgagggaggaagggattgaaattctaaaacctcagttctttgtgctggagaataatctggaagctgtggcccgacacatgctgatcttcagcctagccctggaggaaccggagaagatggggctgcaagagcgaagcgagaccttcctggaagtgtgggggaacgcgctgctgcgcccgccagtggccgccttcgtgcgtgcccaggccgacctgctggcgcacctggtccccgagcccgaccgcctggaggaacagctgccctggctcagcctccgcgccctcaagttccgcgagcgggatgccctggaggccgtattccgcttctgggctggcggcgagaaagggccccaggcgttccccatgagccgcctctgggactcgcgcctgcgccactacctgggctcccgctacgacgcccggcgcggtgtcagcgactgggacctgcgcatgaagctgcatgaccgcggggctcaagtcattcacccccaggagttccgacgctggcgggacacaggcgtcgcctttgaactcagggactccagcgcctatcatgtgcccaaccggaccctggcgtccggtcgcctcctgagctaccgtggggagcgcgtggcagcgcgcgggtactggggggacatcgccacggggcccttcgtggccttcggcatcgaagcggacgacgagagcctcctgcggacgagcaacggccagccagtcaagacggccggggagatcactcaacacaacgtgacggagctgctccgcgacgtggccgcctgggggcgcgcgagagccaccgggggggacctggaggagcagcagcacgcggagggaagcccggagccagggactccagcagccccgaccccggaatctttcaccgtccacttcctgccgctcaattctgctcagactctccaccacaagagctgctacaacggccgattccagctcctctatgtggcctgtggtatggtccatcttctcatccctgagcttggggcctgtgtggcacccggagggaacttgattgtggaattagcccggtacctggtggacgtgcggcaggagcagctgcagggattcaacacccgggtcagggagctagctcaggcagctggatttgctccacagaccggggccaggccttcagagaccttcgcacgtttctgcaagtcccaggaatcagctctgggcaacactgtcccagctgtggaacccggaactccgccccttgacatcctggcccagcctcttgaagccagcaacccagcccttgagggcctgacccagcctctgcagggtgggaccccacactgtgagccctgccagctgccctctgagtctccaggttcactctcagaggttctggctcagcctcagggggccttggctccgcccaactgtgagtcagactccaaaactggagtctgacccaacccctagacaccccttatctccaacttccaaagtcaggttgtaggatgagaacccgctgataccattctaagtccgctgctagagtcctcaattttattctaatcattcccactcagtacccgccacccccaccccgggagtgttggtagactttcaaattccatttctgagattctatggtctattcctagaattctagattgttctctcagaattccaaattccacttctgaggctctaagcccagcctaggatctgacactgagtctcaggcccttgactttggcccccttgttcccaggcaccctgtggctgactaggggctggggtgtctcctcaccagggcctggtcagcacccagatggttcaagtaaagcaagttgtgtccaccct

SEQ ID NO: 128481 - DNA, 2228 bp, Homo sapiens
  Payload ID: 5147
  Gene Symbol: DNAAF3
  Gene Name: dynein, axonemal, assembly factor 3
  ENST ID: ENST00000527223
  CDS Start-End: 3-1829
acatgcttccattgcttgattcctcgaaaagggcggggactctgggcagcggttgtggagtgccgcgggtccacagtgctgcactgagcagagaggaaggggcgtcccgggatatttggaggataaaggtgtgggcaagggtgatgaccacacctgccggctccggcagcggcttcggctccgtgtcctggtggggcctgtccccggcgctggacctgcaggctgaaagggatgctacggtggacgctctgccaaccaccatggtgccccagccagctgtcatcttgccaggtcctcctgtggacccagactcccaggccgatacagtgcacagcaaccccgagctagatgtgctgcttctgggctctgtggatggacggcacctgctgcggaccctgtcccgagcgaagttctggcctcgcaggaggttcaacttctttgtgctggagaataatctggaagctgtggcccgacacatgctgatcttcagcctagccctggaggaaccggagaagatggggctgcaagagcgaagcgagaccttcctggaagtgtgggggaacgcgctgctgcgcccgccagtggccgccttcgtgcgtgcccaggccgacctgctggcgcacctggtccccgagcccgaccgcctggaggaacagctgccctggctcagcctccgcgccctcaagttccgcgagcgggatgccctggaggccgtattccgcttctgggctggcggcgagaaagggccccaggcgttccccatgagccgcctctgggactcgcgcctgcgccactacctgggctcccgctacgacgcccggcgcggtgtcagcgactgggacctgcgcatgaagctgcatgaccgcggggctcaagtcattcacccccaggagttccgacgctggcgggacacaggcgtcgcctttgaactcagggactccagcgcctatcatgtgcccaaccggaccctggcgtccggtcgcctcctgagctaccgtggggagcgcgtggcagcgcgcgggtactggggggacatcgccacggggcccttcgtggccttcggcatcgaagcggacgacgagagcctcctgcggacgagcaacggccagccagtcaagacggccggggagatcactcaacacaacgtgacggagctgctccgcgacgtggccgcctgggggcgcgcgagagccaccgggggggacctggaggagcagcagcacgcggagggaagcccggagccagggactccagccccgaccccggaatctttcaccgtccacttcctgccgctcaattctgctcagactctccaccacaagagctgctacaacggccgattccagctcctctatgtggcctgtggtatggtccatcttctcatccctgagcttggggcctgtgtggcacccggagggaacttgattgtggaattagcccggtacctggtggacgtgcggcaggagcagctgcagggattcaacacccgggtcagggagctagctcaggcagctggatttgctccacagaccggggccaggccttcagagaccttcgcacgtttctgcaagtcccaggaatcagctctgggcaacactgtcccagctgtggaacccggaactccgccccttgacatcctggcccagcctcttgaagccagcaacccagcccttgagggcctgacccagcctctgcagggtgggaccccacactgtgagccctgccagctgccctctgagtctccaggttcactctcagaggttctggctcagcctcagggggccttggctccgcccaactgtgagtcagactccaaaactggagtctgacccaacccctagacaccccttatctccaacttccaaagtcaggttgtaggatgagaacccgctgataccattctaagtccgctgctagagtcctcaattttattctaatcattcccactcagtacccgccacccccaccccgggagtgttggtagactttcaaattccatttctgagattctatggtctattcctagaattctagattgttctctcagaattccaaattccacttctgaggctctaagcccagcctaggatctgacactgagtctcaggcccttgactttggcccccttgttcccaggcaccctgtggctgactaggggctggggtgtctcctcaccagggcctggtcagcacccagatggttcaagtaaagcaagttgtgtccaccct

SEQ ID NO: 128482 - DNA, 893 bp, Homo sapiens
  Payload ID: 5147
  Gene Symbol: DNAAF3
  Gene Name: dynein, axonemal, assembly factor 3
  ENST ID: ENST00000588076
  CDS Start-End: 1-625
cctggaggagcagcagcacgcggagggaagcccggagccagggactccagccccgaccccggaatctttcaccgtccacttcctgccgctcaattctgctcagactctccaccacaagagctgctacaacggccgattccagctcctctatgtggcctgtggtatggtccatcttctcatccctgagcttggggcctgtgtggcacccggagggaacttgattgtggaattagcccggtacctggtggacgtgcggcaggagcagctgcagggattcaacacccgggtcagggagctagctcaggcagctggatttgctccacagaccggggccaggccttcagagaccttcgcacgtttctgcaagtcccaggaatcagctctgggcaacactgtcccagctgtggaacccggaactccgccccttgacatcctggcccagcctcttgaagccagcaacccagcccttgagggcctgacccagcctctgcagggtgggaccccacactgtgagccctgccagctgccctctgagtctccaggttcactctcagaggttctggctcagcctcagggggccttggctccgcccaactgtgagtcagactccaaaactggagtctgacccaacccctagacaccccttatctccaacttccaaagtcaggttgtaggatgagaacccgctgataccattctaagtccgctgctagagtcctcaattttattctaatcattcccactcagtacccgccacccccaccccgggagtgttggtagactttcaaattccatttctgagattctatggtctattcctagaattctagattgttctctcagaattccaaattccacttctgaggctctaagcccagcctaggatctgacac

SEQ ID NO: 128483 - DNA, 565 bp, Homo sapiens
  Payload ID: 5147
  Gene Symbol: DNAAF3
  Gene Name: dynein, axonemal, assembly factor 3
  ENST ID: ENST00000526003
  CDS Start-End: 86-565
agtgctgcactgagcagagaggaaggggcgtcccgggatatttggaggataaaggtgtgggcaagaatgtcttttccgcagggtgatgaccacacctgccggctccggcagcggcttcggctccgtgtcctggtggggcctgtccccggcgctggacctgcaggctgaaagtcctcctgtggacccagactcccaggccgatacagtgcacagcaaccccgagctagatgtgctgcttctgggctctgtggatggacggcacctgctgcggaccctgtcccgagcgaagttctggcctcgcaggaggttcaacttctttgtgctggagaataatctggaagctgtggcccgacacatgctgatcttcagcctagccctggaggaaccggagaagatggggctgcaagagcgaagcgagaccttcctggaagtgtgggggaacgcgctgctgcgcccgccagtggccgccttcgtgcgtgcccaggccgacctgctggcgcacctggtccccgagcccgaccgcctggaggaacagctgccctggctcagcctccgcgccctcaag

SEQ ID NO: 128484 - DNA, 3410 bp, Homo sapiens
  Payload ID: 5148
  Gene Symbol: DNAAF5
  Gene Name: dynein, axonemal, assembly factor 5
  Uniprot ID: Q86Y56
  ENST ID: ENST00000297440
  CDS Start-End: 21-2588
tgaccggcgacgcgggcaagatggcggcgctgggggtggcggaggccgtggcggccccacacccggctgagggggccgagacggctgaggcggtggagctgagccgcgccctgagccgcctgctgccggggctggaggccgacagcaagccgggccggcggcgcgccttggaggccctgcggcgcgcgctggaggagccaggccctgccgccgaccccaccgctttccagggcccctgggcgcgcctactgctgccgcgcttgctgcgctgcctgagcgaccccgccgagggctgccgcgcgctggcagtgcacctgctggatctgggcctgcgccgcgccgcgcggccccgcgatgccctgccgcgcctgctgcccgcgctcgccgcgcgcttggccggccccgtgcccgcgcgccgcccgcccgaggcctgtgaggagctgcgcctggcgcttgtgcagctgctgggcctggccgtggacctgtgcggcgccgcgctcgcgccccacctggacgacgctctgcgcgcgctgcgctgctccctgctcgaccccttcgccgccgtgcgccgcgagagctgcagctgcgccgccgccctggcgcaggccacgcccgaccacttccacatgcagtcggagtctctgatcgggcccctgatgcagaccatctcccaccagcactggaaggtccgtgtggccgccattgaagccacaggcgcagtgatccattttggcaacgggaagtccgtggacgacgtgctttcccattttgctcagcgactgtttgatgacgtcccgcaggtccggcgggcggtggcctccgtggtgggcggctggctgctgtgtctgcgtgaccgttactccttcttccacaagctcatccctctgctgctcagtagcctcaacgacgaggtgcctgaggtcaggcagctggctgccagcctctgggaggacgttggcctgcagtggcagaaggagaatgaggaggacctgaaggacaagctggactttgcccctcccaccccaccccattaccctccacatgagcgccgccctgtgctgggctgccgggagctcgtcttcaggaacctctccaagatcctccctgccctgtgccacgacatcaccgactgggtggtggggacccgagtgaagtcggcacagctgctcccagtgctgctgctgcatgccgaggaccacgccacgcagcacctggaggtcgtcctccggaccctgttccaggcctgcaccgacgaggaggcagccgtggtccaaagttgtaccagatccgcagagctcgtcgggacgtttgtcagccctgaggtgtttctgaagctgatcttatcgacgctgaagaagacgccctctgcctccggcctcctggtgctggcctccgccatgcggggttgcccccgagaagccctccagccgcacctggcagccatcgccacagagctggcacaggcccacatctgccaggcatctgaaaacgacctctacctggagcgcctgctgctgtgtgtgcaggctctggtgtctgtgtgtcatgaggactgtggcgtggccagcctgcagctcttggacgtgctgctgacaatagtggccctcgcaggtgctaccggcctgagggacaaggcacaggagacgatggactcactggccatggtggagggtgtcagcagctgccaggacctctaccgcaagcacattggtcccctcctggagcgggtgaccgcgtcgcaccttgactggaccgcacactcgccggagctcctgcagttcagtgtcatcgtcgcacagtcaggccctgccctgggagaagccctgccacacgtcgtgcccacgctgagggcctgtctgcagccctcccaagacccgcagatgcgcctgaagctgttctccatcctgtccaccgtgctgctcagagccacggacaccatcaactcccaggggcagtttcccagctacctcgagacggtgacaaaggacatcctggcccccaatctgcagtggcatgcggggaggacagccgcggccatccgcacggctgccgtgtcctgcctctgggcgctcaccagcagcgaggtcctgtcggcagagcagatacgggacgtgcaggaaacactgatgccccaggtcctgaccaccctggaggaggattcgaagatgacgcgactgatctcatgccgtattatcaacacgttcttaaaaacctcgggcggcatgacggatccagagaaactcatcaggatttatcctgaactcttaaaacgcctagatgacgtgtccaacgatgtgaggatggcagccgcctccaccttggtcacctggctgcagtgtgtcaagggtgccaacgcaaaatcctactatcagagcagtgtccagtacctgtaccgagagttgctggttcaccttgacgatccagagagggccatccaggatgcaattttagaggtcctcaaagagggcagcgggctgttcccagatctcctggtgagggagacggaggccgtcatccacaagcaccgctcggccacctactgcgagcagctcctgcagcatgtgcaggccgtgccagccacacagtgaccacgctggtttcagccacggcacacccttgtccccacctgagccagagtttgtggcctttaaatctcataaacaaggcacctctgtgccagcagtgagactgtgacagcaagaatgtactcctcaggacacctgcccactctttccctggaataacagcctctgagtggattctgcatgttatgtgatttgttctgttcatcgagagggctcccaaacatctgcagctgatttgaaattaaaagtaagtcgcagccgctcctcccgcagccacttcagcagcatcttagattttaagcctcacgtgcgcagctggttcatgaactattggctgcatcctgcttaggtgcccaccaagaaggtttttacctacttaacaaaaaagaaagaagccaaagtgattagaaagaaatgaaatctctttttgggttctgtctactgaaatttaatatctcagtgaacagactaaaaggaatttagaatcctaacaacttatcagatttctcctgttttaaatatactgggactttaaaggttatatgtccggtcaccgtatgttttaagtcggtgttaatgctaacagtgttgaaaacaatatttcatgagatctaattgtggttgcccctataggtagcaggaaagtaaagttgcatttccctctcgcacattctacacccaagtgcctaaaagatctcattgtaagtgggtagtgttaccggaagccattgtgttcacacgggggaaatgccgtatatatttttcaacaaatattaacgtttatactttcatgtttgaaaatttaattaaaaatgtttgttttaa

SEQ ID NO: 128485 - DNA, 1907 bp, Homo sapiens
  Payload ID: 5148
  Gene Symbol: DNAAF5
  Gene Name: dynein, axonemal, assembly factor 5
  ENST ID: ENST00000403952
  CDS Start-End: 674-1516
gaagtgtccgtgcagcgagcaggagctcgcgctgggagggcagacaagtggtccagtggaagtgtccgtgctgcaagcaggagcgctagtgctgggagggcagacacgtggcccaggcggaagtgtccacgcctacctcgagcaggagcgctcatgctgggaaggcagatgggtggcccgggcagaagtgtccgtgctgcaagcaggagcgctcatgctgggaaggcagacacgtggcccaggcgtcaggtttgaacattcttgacagcaagtggctcacccgtcagcgtgcttctttttcccatcccaggagttggacttgacctgtggacatttggctgttttctttttgtttttaagccagaaacactgtcttgtttccagtttaagatgtagagagggtgaaacagtcagaaactgggtcagaagcagcgtggttctcgtggcagggcggcacttggcccaagactcgtgctctggcgggaggctcaagtcaggcgtcccagcagcttcggtgcaacgcctcctgcccggctgcgtggggaggccctccaagacaccagctggtctcaccgcgaggcctgacttcgagccagagcagcgagtacattgcgtctccgtgtggcaagggcaggtgcgggggtctcagtccactaccgagcagcctgctctgatgactggcggcgccagggagaaggctcacatcgcgaggtccccagcaacggctcaaggccctgccctgggagaagccctgccacacgtcgtgcccacgctgagggcctgtctgcagccctcccaagacccgcagatgcgcctgaagctgttctccatcctgtccaccgtgctgctcagagccacggacaccatcaactcccaggggcagtttcccagctacctcgagacggtgacaaaggacatcctggcccccaatctgcagtggcatgcggggaggacagccgcggccatccgcacggctgccgtgtcctgcctctgggcgctcaccagcagcgaggtcctgtcggcagagcagatacgggacgtgcaggaaacactgatgccccaggtcctgaccaccctggaggaggattcgaagatgacgcgactgatctcatgccgtattatcaacacgttcttaaaaacctcgggcggcatgacggatccagagaaactcatcaggatttatcctgaactcttaaaacgcctagatgacgtgtccaacgatgtgaggatggcagccgcctccaccttggtcacctggctgcagtgtgtcaagggtgccaacgcaaaatcctactatcagagcagtgtccagtacctgtaccgagagttgctggttcaccttgacgatccagagagggccatccaggatgcaattttagaggtcctcaaagagggcagcgggctgttcccagatctcctggtgagggagacggaggccgtcatccacaagcaccgctcggccacctactgcgagcagctcctgcagcatgtgcaggccgtgccagccacacagtgaccacgctggtttcagccacggcacacccttgtccccacctgagccagagtttgtggcctttaaatctcataaacaaggcacctctgtgccagcagtgagactgtgacagcaagaatgtactcctcaggacacctgcccactctttccctggaataacagcctctgagtggattctgcatgttatgtgatttgttctgttcatcgagagggctcccaaacatctgcagctgatttgaaattaaaagtaagtcgcagccgctcctcccgcagccacttcagcagcatcttagattttaagcctcacgtgcgcagctggttcatgaactattggctgcatcctgcttaggtgcccaccaagaaggtttttacctacttaacaaaaaagaaagaa

SEQ ID NO: 128486 - DNA, 2350 bp, Homo sapiens
  Payload ID: 5148
  Gene Symbol: DNAAF5
  Gene Name: dynein, axonemal, assembly factor 5
  ENST ID: ENST00000440747
  CDS Start-End: 1-1972
ttcgccgccgtgcgccgcgagagctgcagctgcgccgccgccctggcgcaggccacgcccgcactggaaggtccgtgtggccgccattgaagccacaggcgcagtgatccattttggcaacgggaagtccgtggacgacgtgctttcccattttgctcagcgactgtttgatgacgtcccgcaggtccggcgggcggtggcctccgtggtgggcggctggctgctgtgtctgcgtgaccgttactccttcttccacaagctcatccctctgctgctcagtagcctcaacgacgaggtgcctgaggtcaggcagctggctgccagcctctgggaggacgttggcctgcagtggcagaaggagaatgaggaggacctgaaggacaagctggactttgcccctcccaccccaccccattaccctccacatgagcgccgccctgtgctgggctgccgggagctcgtcttcaggaacctctccaagatcctccctgccctgtgccacgacatcaccgactgggtggtggggacccgagtgaagtcggcacagctgctcccagtgctgctgctgcatgccgaggaccacgccacgcagcacctggaggtcgtcctccggaccctgttccaggcctgcaccgacgaggaggcagccgtggtccaaagttgtaccagatccgcagagctcgtcgggacgtttgtcagccctgaggtgtttctgaagctgatcttatcgacgctgaagaagacgccctctgcctccggcctcctggtgctggcctccgccatgcggggttgcccccgagaagccctccagccgcacctggcagccatcgccacagagctggcacaggcccacatctgccaggcatctgaaaacgacctctacctggagcgcctgctgctgtgtgtgcaggctctggtgtctgtgtgtcatgaggactgtggcgtggccagcctgcagctcttggacgtgctgctgacaatagtggccctcgcaggtgctaccggcctgagggacaaggcacaggagacgatggactcactggccatggtggagggtgtcagcagctgccaggacctctaccgcaagcacattggtcccctcctggagcgggtgaccgcgtcgcaccttgactggaccgcacactcgccggagctcctgcagttcagtgtcatcgtcgcacagtcaggccctgccctgggagaagccctgccacacgtcgtgcccacgctgagggcctgtctgcagccctcccaagacccgcagatgcgcctgaagctgttctccatcctgtccaccgtgctgctcagagccacggacaccatcaactcccaggggcagtttcccagctacctcgagacggtgacaaaggacatcctggcccccaatctgcagtggcatgcggggaggacagccgcggccatccgcacggctgccgtgtcctgcctctgggcgctcaccagcagcgaggtcctgtcggcagagcagatacgggacgtgcaggaaacactgatgccccaggtcctgaccaccctggaggaggattcgaagatgacgcgactgatctcatgccgtattatcaacacgttcttaaaaacctcgggcggcatgacggatccagagaaactcatcaggatttatcctgaactcttaaaacgcctagatgacgtgtccaacgatgtgaggatggcagccgcctccaccttggtcacctggctgcagtgtgtcaagggtgccaacgcaaaatcctactatcagagcagtgtccagtacctgtaccgagagttgctggttcaccttgacgatccagagagggccatccaggatgcaattttagaggtcctcaaagagggcagcgggctgttcccagatctcctggtgagggagacggaggccgtcatccacaagcaccgctcggccacctactgcgagcagctcctgcagcatgtgcaggccgtgccagccacacagtgaccacgctggtttcagccacggcacacccttgtccccacctgagccagagtttgtggcctttaaatctcataaacaaggcacctctgtgccagcagtgagactgtgacagcaagaatgtactcctcaggacacctgcccactctttccctggaataacagcctctgagtggattctgcatgttatgtgatttgttctgttcatcgagagggctcccaaacatctgcagctgatttgaaattaaaagtaagtcgcagccgctcctcccgcagccacttcagcagcatcttagattttaagcctcacgtgcgcagctggttcatgaactattggctgcatcctgcttaggtgcccaccaagaaggtttttacctacttaac

SEQ ID NO: 128487 - DNA, 585 bp, Homo sapiens
  Payload ID: 5148
  Gene Symbol: DNAAF5
  Gene Name: dynein, axonemal, assembly factor 5
  ENST ID: ENST00000437419
  CDS Start-End: 1-585
gctctgcgcgcgctgcgctgctccctgctcgaccccttcgccgccgtgcgccgcgagagctgcagctgcgccgccgccctggcgcaggccacgcccggtccggcgggcggtggcctccgtggtgggcggctggctgctgtgtctgcgtgaccgttactccttcttccacaagctcatccctctgctgctcagtagcctcaacgacgaggtgcctgaggtcaggcagctggctgccagcctctgggaggacgttggcctgcagtggcagaaggagaatgaggaggacctgaaggacaagctggactttgcccctcccaccccaccccattaccctccacatgagcgccgccctgtgctgggctgccgggagctcgtcttcaggaacctctccaagatcctccctgccctgtgccacgacatcaccgactgggtggtggggacccgagtgaagtcggcacagctgctcccagtgctgctgctgcatgccgaggaccacgccacgcagcacctggaggtcgtcctccggaccctgttccaggcctgcaccgacgaggaggcagccgtggtccaaagttgtaccagatc

SEQ ID NO: 128488 - DNA, 13104 bp, Homo sapiens
  Payload ID: 5149
  Gene Symbol: DNAH1
  Gene Name: dynein, axonemal, heavy chain 1
  Uniprot ID: Q9P2D7
  ENST ID: ENST00000420323
  CDS Start-End: 262-13059
ggggggtacccaacctatacgcagacccattgagcagccagactgccctaaacagggctatggagtccttgtcccttctaagagctgtggacaccttgcctccagttcccctcacagtcctttcttccttctgcagtgatcactgagtacctgtgtgaatgccaacaagaaaaataaaaccacagtttggattcaggaaaggttgcaccaccatcaggtcttgaagggagcttcggctggggcatctccctgagaagcagcatggagcagcctaacagtaaaggctatagcctgggaaggacccctcagggcccagagtgcagcagtgctcctgcagtccaagtggggacccacaggggcctagagtataacccggggaagattcttccaggatcagactatgggttgggaaatcctccagcccttgaccccaagctcccacatttacccctgcccccggccccacccacactctcagacttggggcagccacggaagtcacccctgacaggcactgataagaagtacccgctgatgaagcagcgtgggttctactccgacatcctcagccctggaaccttagatcaacttggggaggtatgtcgtggcccccgaatgagccagaacctcctgcggcaggctgaccttgacaagttcaccccaagagtcggaagctttgaggttcctgaagacttccaggagcgcatggagcagcagtgcatcgggtccaccacccggctgctcgcccagactgacttcccactgcaggcctacgagcccaagatgcaggtgcctttccaggtgctgccaggccagcatcctcgcaagattgagatcgagaggaggaaacagcagtacctgagcctggacattgagcagttgctgttcagccagggcatcgactccaacaagctcatgcccaggcacctggaccaccagcacccccaaaccatcgaacagggccatgacccaatcttccccatctacctcccactgaaggtatttgacaatgaggactttgactgccggactcccagagagtggatcaacatgggcttggagccagggtctctggacaggaaacctgtcccgggaaaagccctcttgcccactgatgacttcctggggcatgaggaccccaagagtcagaagctgaagtacaaatggtgcgaggtcggcgtcctggactacgacgaggagaagaagctatacctggtacacaagacagacgagaaaggcctggtgcgagatgagatggggaggcccatcctgaatgcaggggtcaccactgaaggaaggccaccccttcaggtctgtcagtactgggtgccacggatccagcttctcttctgcgctgaggacccttgcatgttcgcacaacgtgtggtccaggccaacgccctgcgcaagaacacggaagcactgctgctctacaacttgtatgtggactgcatgccctctgacggccagcatgtcatcagtgaacagagcctgagcaagatcaagcagtgggccctgagcacgcctcggatgcgcaaaggcccctcggttctagagcacctcagcagtcttgccagagaagtgagcctggactatgagcgcagcatgaacaagatcaactttgaccacgttgtctcttccaagcccgagaccttctcctacgtcaccctccccaagaaggaggaggagcaggtgcctgagcgagggctggtgagtgtccccaagtaccacttctgggagcagaaggaggacttcactttcgtgtccctgctcacacggccagaggtcatcacggccctcagcaaggtgagggccgagtgcaacaaggtgaccgccatgtccctgttccactcgagcctctccaagtacagccacctggaggaatttgagcagatccagtcacagaccttctcccaggtgcagatgttcctcaaggacagctggatcagctcgctaaaggtggccatgcgcagcagcctgcgcgacatgagcaagggctggtacaacctctacgagaccaactgggaggtgtacctcatgtccaagctgcgcaagctgatggagctggtgaagtacatgctgcaggacacactgcgcttcctggtgcaggactcacttgccagcttctcacagttcatcagcgacacctgttgcagcgtgctcaactgcaccgatgacatggtctggggtgacgacttaattaacagcccctacaggccccggaagaatcccctgttcatcatggacctggtgctggacagctctggggtgcactatagcaccccactggagcagtttgaggcatctctgctgaacctcttcgacaagggcatcctggccacccatgccgtgccccagctggagaagctggtgatggaggacatcttcatcagcggtgaccccctgctggagtccgtgggccttcatgagccactggtggaagagctacgggccaccattgccagtgccgtgtccaaggccatgatcccactgcaggcctacgccaaggagtaccgaaagtacctggagctgaacaacaatgacattgcctcctttctcaaaacctaccagacgcagggcctgttggcccaggaggtgcgggaggtagtgctcacccacctgcgggagaaggagatcctggacagctcgctgcccagcagcatcatcattgggcctttctacatcaacaccgacaatgtcaagcagagcctgtccaagaaacgcaaggccctggccacttccgtgctggacatccttgccaagaacctgcataaggaggtggatagcatctgcgaggagttccgcagcatcagccgcaagatctatgagaagcccaacagcattgaggagctggctgagctgcgagagtggatgaagggcatcccggagaggctggtgggcctggaggagcggattgtgaaggtcatggatgactaccaggtcatggatgaattcctctacaacctcagctcagatgacttcaatgacaaatggattgccagcaactggccttctaagatccttgggcagatagagctggtgcagcagcagcatgtggaggatgaggagaagttccgcaaaatccagatcatggatcagaacaacttccaagagaagctggaagggctgcagctggtagtagctggcttctccatccatgtggagatttcacgtgcacacgagatcgccaacgaggtgcggcgtgtcaagaagcagctgaaggactgccagcagctggccatgctctacaacaaccgcgagcgcatcttcagcttgcccatcaccaattatgacaagctctccaggatggtgaaggagttccaaccctacctggacctttggaccacagcgtctgactggctgcgctggtcggagagctggatgaatgaccccctctctgccatcgatgctgagcagctggagaagaacgtggttgaagccttcaagaccatgcacaagtgcgtgaagcagtttaaggacatgccagcctgccaggaagtggccttggacatccgggcccgcatcgaggagttcaaaccatacatcccactgatccaggggctgcgcaaccctggcatgcggatccggcactgggagacactgtccaaccagatcaacatcaatgtcaggcccaaggccaacctgacctttgctcgctgcctggagatgaacctgcaggaccatatcgagagcatcagcaaggtggctgaggtggctggcaaggagtacgccatcgagcaggcactggacaagatggagaaggagtggtcgaccatcctgttcaatgtactgccctacaaggcgacagacacctacatcctgaagagcccggacgaggcctcacagctgctggacgaccacatcgtcatgacccagaatatgtcattttcaccctacaagaagccctttgagcagcgcatcaactcctgggagaacaaactgaagctgacccaggaggttctggaggagtggctgaactgtcagcggtcctggctctacctggagcccatctttagctctgaggacatcaaccagcagctgcctgtggagagcaagcgctaccagaccatggagcggatctggaagaagatcatgaagaatgcctacgagaaccgggaggtgatcaatgtgtgttccgacctgagaatgctggacagcctgcgggactgcaacaagattctggacctggtgcagaagggcctcagcgagtatctggagaccaagaggagcgccttccccagattctacttcctgtcagatgatgaactactagagatcttgtcgcagacaaaggaccccacggccgtgcagccacacctgcgcaagtgcttcgagaacatcgctcggctgctattccaggaggacctggagatcacgcacatgtactcagccgagggggaggaggtacagttgtgcttctccatctacccctccagcaacgtggaggactggctgcgggaggtggagcgcagcatgaaggccagtgtgcacgacatcattgagaaggccatcagggcctaccccacgatgcccaggacccagtgggttctgaactggcctggccaggtgaccatcgctgggtgccagacctactggaccatggaggtggcagaggctctggaggccggcaacctcagaagccaactgttcccccagctctgccagcagctcagtgatctggtggcccttgtgcgggggaagctgtcccgcatgcagcgggcagtgctgtcagcgctaatcgtcattgaggtccatgccaaggacgtggtgagcaagctaatccaggagaacgtggtcagcgtgaatgacttccagtggatctcacagctgaggtactactggacaaataatgacctgtatatccgtgctgtgaatgctgagttcatctatggctatgagtacctgggcaacagtgggaggctggtgatcacgcccctcaccgacaggtgctacctgacactgaccggagctctgcacctcaagtttgggggtgccccagctggcccagctggcacaggcaaaactgagaccaccaaagacctgggtaaggccttggccatacagaccgttgtgttcaactgctctgaccagctcgacttcatggccatgggcaagttcttcaagggcctggccagtgctggggcctgggcctgcttcgacgagttcaatcgcatcgacatcgaggtgctgtctgtggtggcgcagcagatcaccaccatccagaaggcgcagcagcagcgggtggaacgcttcatgtttgagggtgtggagatcccactggtgccatcctgcgcagtgtttatcaccatgaacccgggctacgctggccgcacggagctgcctgacaatctgaaggcgctcttccgacccgtggccatgatggttccagattacgccatgatcactgagatctccctctattcctttggctttaatgaggccagtgtgctggctaagaagatcacaaccaccttcaagctgtcttctgagcagctcagctcccaggatcactatgacttcgggatgagagccgtgaaaactgtgatctcggctgctgggaacctcaagcgagaaaaccccagcatgaatgaggagctgatctgcctccgggccatccgtgatgtgaacgtgcccaagttcctgcaggaggacctcaagctcttctctggcatcgtgtccgacctgtttcccaccatcaaggaggaggacacggactacggcatcctggatgaggccatccgcgaggcctgcaggaacagcaacctcaaggatgtggagggcttcctgacaaagtgcatccagctctacgagaccacggtggtacgacacggcctcatgctcgtcgggcccacaggctccggcaagagtacttgttacagagtcctggcagctgccatgacgtcactgaaagggcagccatccatcagtggtggcatgtacgaggctgtcaactactacgtgctcaaccccaagtccatcacgatgggccagctgtacggggagtttgacctcctcacccatgagtggacagacgggatattctcctcgttcatccgggcgggggccatcacctccgacaccaacaagaagtggtacatgttcgatgggccggtggatgccatctggattgagaacatgaacacggtgctggatgacaacaagaagctgtgcctcagctctggggagatcatcaagctcacagaggcaatgaccatgatgttcgaggtgcaagacctggcggtggcttcaccagctacagtctcccgctgtggcatggtgtacctggagcccagcatcctggggctcatgcccttcatcgagtgctggctgaggaagctgcctcccttgctgaagccctatgaggagcatttcaaggccctctttgtcagcttcctggaggaatccatctccttcgttcggtcctcagtgaaggaggtgatcgcctcaaccaactgcaacctgaccatgagcctcctcaagctgctggactgcttcttcaagccctttctgcctagagagggcctcaagaaaataccctctgaaaagctgagtcgcatcgtagagttgatcgagccctggttcatcttctccctgatctggagcgtgggtgccactggggacagcagtggccgcaccagtttcagccactggctaaggctcaagatggagaacgaacagctgactctgcttttcccagaagaggggctggtgttcgattacaggctggaggacgcgggcatcagtggcaccaacgacagtgaggatgaagaggaggaatacaagcaggttgcctgggtgaagtggatggactcctcagctccattcaccatggtaccagacaccaactactgcaacatcattgtgcccaccatggacaccgtgcagatgtcccatttactggacatgctgctcaccaacaagaagcccgtgctgtgcattgggccaacaggcacggggaagacgctcaccatctctgacaagctcctcaagaacctggcactggattacatcagccacttcctcaccttctcagcccgcacttcagccaaccagacccaggacttcattgacagcaagctggacaagaggcggaagggtgtgtttggaccacctctggggcgcaactttatcttcttcatcgatgacctgaacatgccggccctggagacctacggtgcacagccacccatcgagctgttgcgccagtggatggaccacggcggctggtacgaccgcaagatcattggtgccttcaagaacctagtggacatcaactttgtctgtgccatgggccccccgggtggaggcaggaacaccgtcaccccgcggctgatgcgtcacttcaactacctgtctttcgctgagatggacgaggtcagcaagaaacgcatcttctccaccatcctgggcaactggttggatggactccttggagaaaaaagctaccgggagcgtgtgcctggggccccccacattgcccacttcacggagccccttgtggaagccaccatcatggtgtatgcaaccatcacctcccagctgctgcccactccagccaagtcccactacaccttcaacctgagggacctctccaaggtcttccaaggcatgctcatggctgacccggccaaggtcgaggaccaagtgcagctgctgcgactgtggtatcacgagaactgccgcgtgttccgggaccgactggtgaatgaggaggaccgcagctggttcgaccagctcctcaagcgctgcatggagcagtgggaggtgaccttcaacaaggtctgccccttccagcccattctttacggggacttcatgtcaccaggctccgatgtcaagtcctacgagctcatcaccagtgagagtaagatgatgcaggtgatagaggagtacatagaggactacaaccagatcaacacggccaagctgaagctggtcctcttcatggacgccatgagccacatctgtcgcatcagccgcaccctacgccaggcgctgggcaatgcactcctgctgggcgtgggtggcagcggccgcagctccctcacaaggctcgcctcgcacatggccgagtacgagtgcttccagattgaactatccaagaactacggcatgtccgagtggcgagatgatgtgaagaaggtcctgctcaaggcgggcctacagaacctacccatcaccttcctcttctcagacacccagatcaagaacgaatccttcctggaagatatcaacaacgtcctaaactctggtgacattcccaatctgtatactgcggacgagcaggaccagatcgtcagcaccatgcggccctatatccaggagcagggcctacagcccaccaaggccaacctcatggctgcttacacagggcgtgtgcgcagcaacatccacatggtgctgtgcatgagccccatcggagaggtcttccgagctcgtctgaggcagtttccctccctggtcaactgctgtaccatcgactggtttaacgagtggccggcagaagccctgaagtctgtggccaccgtgttcctcaatgagatcccagaactggaatcctcccaggaagaaatccaaggactgatccaggtctgtgtgtacatccaccagtcggtgtccaagaagtgcatcgagtacctggcagagctgacccgccacaactatgtgacccccaagagctacttggagctgcttcatattttctccatcctcatcgggcagaagaaactggagctgaaaactgccaagaaccgcatgaagagcggcctcgacaagctgctgcgcacttctgaggatgtagccaagatgcaggaggacctggagagtatgcaccccctgctggaggaggctgccaaggacaccatgctcaccatggagcagatcaaggtggatacggccatcgccgaggagacccggaattcagtgcagacagaggagatcaaagccaatgagaaggccaagaaggcacaagctattgctgacgatgcccagaaggacctggacgaggcgttgccagccctggatgcggctctggccagcctgcgcaacctcaacaagaacgatgtgaccgaggtacgtgccatgcagcggccacccccgggtgtgaaactggtcatagaagctgtgtgcattatgaaaggcatcaagcccaagaaggtgcctggagaaaagccaggcaccaaggtggatgactactgggagcctggcaaggggctgctgcaggacccgggccacttccttgagagcctcttcaagtttgacaaggacaacattggggatgtggtgatcaaagccatccagccgtacatcgataatgaagagttccagccagccaccattgccaaggtgtccaaggcttgcacctccatctgccagtgggtgcgcgccatgcacaagtaccactttgtggccaaggccgtggagcccaagcggcaagccctgctggaggcccaggatgacctgggggtgacacagaggatcctggatgaggcaaaacagcgccttcgtgaggtggaggacggcatcgccacaatgcaggctaagtaccgggaatgcattaccaagaaggaggagctggagctgaagtgtgagcagtgtgagcagcggctgggccgagctggcaagctcatcaacgggctgtcggatgagaaggtgcgctggcaggagacggtggagaacctgcagtacatgctcaacaacatctccggcgatgtcctggtggccgctggctttgtggcctacctgggccccttcacgggccagtaccgcacggtgctctacgacagctgggtcaagcagctcaggagccacaatgtcccacacacctccgagcccacgctaatcgggacgctggggaaccctgtgaagatccgatcgtggcagatcgctggcctccccaacgacacactgtcagtggagaacggggtcatcaaccagttttcccagcgctggacccacttcattgaccctcagagccaggccaacaaatggatcaagaacatggagaaggacaatgggctggatgtgttcaagttgagtgaccgcgacttcctgcgcagcatggagaacgccatccgctttggcaagccatgtctcctggagaacgtgggcgaggagctagacccagccctggagccagtgctgctcaagcagacgtacaagcagcagggaaacacggtgctgaagctgggggacacggtgatcccctaccatgaggacttcaggatgtacatcaccaccaagctgcccaacccacactacacgcccgagatctccaccaaactcaccctcatcaacttcaccctgtcgcccagtggcctagaggaccagctactgggccaggtagtggcagaggagcgacccgacctggaggaggccaagaaccagctgattatcagtaatgccaagatgcgccaggagctgaaggacattgaggaccagatcctgtaccggctcagctcctccgagggcaaccctgtagatgacatggaactcatcaaggtgctggaagcctccaagatgaaggctgctgagatccaggccaaagtcaggattgcagagcagacggagaaggacatcgacctgacgcgcatggagtacatacccgtggccatccgcacccagatcctcttcttctgtgtgtccgacctggccaacgtggaccccatgtaccagtactcccttgagtggtttctcaacatcttcctctcgggcatcgccaactcagagagagcagacaacctgaagaagcgcatctccaacatcaaccgctacctgacctacagcctctacagcaacgtctgccgcagcctctttgagaagcacaagctgatgtttgccttcctgctgtgtgttcgcatcatgatgaacgagggcaaaatcaaccagagtgagtggcgatacctcctgtctgggggctccatctcgatcatgactgagaatccggcaccggactggctgtcagaccgggcttggcgagacatcctagcactctcgaacctgccaaccttttcctccttctcttccgacttcgtgaagcacctctcagaattccgggtcatcttcgacagccttgagccccaccgggagcctttgcctggcatctgggaccagtacctagaccagttccagaagctgctagtcctccgctgcctgcgtggggacaaggttaccaacgccatgcaggactttgtggccaccaacctggagccacgcttcattgaaccccagacagccaatctgtcagtggtgttcaaagactccaactccaccacacccctcatctttgtgctgtcacccggcacagaccctgctgccgacctctacaagtttgccgaagaaatgaagttctccaaaaagctctctgccatctccctgggccaggggcagggccctcgggcagaagccatgatgcgcagctccatagagaggggcaaatgggtcttcttccagaactgccacctggcaccaagctggatgccagccctagaacgcctcatcgagcacatcaaccccgacaaggtacacagggacttccgcctctggctcaccagcctgcccagcaacaagttcccagtgtccatcctgcagaacggctccaagatgaccattgagccgccacgcggtgtcagggccaacctgctgaagtcctatagtagccttggtgaagacttcctcaactcctgccacaaggtgatggagttcaagtctctgctgctgtctctgtgcttgttccatgggaacgccctggagcgccgtaagtttgggcccctgggcttcaacatcccctatgagttcacggatggagatctgcgcatctgcatcagccagctcaagatgttcctggacgaatatgatgacatcccctacaaggtcctcaagtacacggcaggggagatcaattacgggggccgtgtcactgatgactgggaccggcgctgcatcatgaacatcttggaggacttctacaaccctgacgtgctctcccctgagcacagctacagcgcctcgggcatctaccaccagatcccgcctacctacgacctccacggctacctctcctacatcaagagcctcccactcaatgatatgcctgagatctttggcctgcatgacaatgccaacatcacctttgcccagaacgagacgttcgccctcctgggcaccatcatccagctgcaacccaaatcatcttctgcaggcagccagggccgggaggagatagtggaggacgtcacccaaaacattctgctcaaggtgcctgagcctatcaacttgcaatgggtgatggccaagtacccagtgctgtatgaggaatcaatgaacacagtactagtacaagaggtcattaggtacaatcggctgctgcaggtgatcacacagacactgcaagacctactcaaggcactcaaggggctggtagtgatgtcctctcagctggagctgatggctgccagcctgtacaacaatactgtgcctgagctctggagtgccaaggcctacccatcgctcaagcctctgtcatcatgggtcatggacctgctgcaacgcctggactttctgcaggcctggatccaagatggcatcccagctgtcttctggatcagtggattcttcttcccccaggctttcttaacaggcactctgcagaattttgcccgcaaatttgtcatctccattgacaccatctcctttgatttcaaggtgatgtttgaggcaccatcagagttaacacaaagaccccaagtagggtgctatatccatggattattcctggaaggtgcccgctgggatccagaggccttccagctggctgagtctcagcccaaggagctgtacacagagatggccgttatctggctcttgccaacacccaaccgcaaggcccaggaccaggacttttacctgtgccccatctacaagacactgactcgtgctggaacactatcaaccacaggacactctaccaactatgtcattgctgtggagatccccacccatcagccccagcgacactggataaagcgtggtgtggccctcatctgtgccctggactactagactcagacagaagggctggggccattaaagctgaattttctaagc

SEQ ID NO: 128489 - DNA, 579 bp, Homo sapiens
  Payload ID: 5149
  Gene Symbol: DNAH1
  Gene Name: dynein, axonemal, heavy chain 1
  ENST ID: ENST00000480649
  CDS Start-End: 1-579
ctccggcgatgtcctggtggccgctggctttgtggcctacctgggccccttcacgatcgctggcctccccaacgacacactgtcagtggagaacggggtcatcaaccagttttcccagcgctggacccacttcattgaccctcagagccaggccaacaaatggatcaagaacatggagaaggacaatgggctggatgtgttcaagttgagtgaccgcgacttcctgcgcagcatggagaacgccatccgctttggcaagccatgtctcctggagaacgtgggcgaggagctagacccagccctggagccagtgctgctcaagcagacgtacaagcagcagggaaacacggtgctgaagctgggggacacggtgatcccctaccatgaggacttcaggatgtacatcaccaccaagctgcccaacccacactacacgcccgagatctccaccaaactcaccctcatcaacttcaccctgtcgcccagtggcctagaggaccagctactgggccaggtagtggcagaggagcgacccgacctggaggaggccaagaaccagctgattatcagtaatgccaa

SEQ ID NO: 128490 - DNA, 3408 bp, Homo sapiens
  Payload ID: 5149
  Gene Symbol: DNAH1
  Gene Name: dynein, axonemal, heavy chain 1
  ENST ID: ENST00000490713
  CDS Start-End: 1-2787
aagaaggaggagctggagctgaagtgtgagcagtgtgagcagcggctgggccgagctggcaagctcatcaacgggctgtcggatgagaaggtgcgctggcaggagacggtggagaacctgcagtacatgctcaacaacatctccggcgatgtcctggtggccgctggctttgtggcctacctgggccccttcacgggccagtaccgcacggtgctctacgacagctgggtcaagcagctcaggagccacaatgtcccacacacctccgagcccacgctaatcgggacgctggggaaccctgtgaagatccgatcgtggcagatcgctggcctccccaacgacacactgtcagtggagaacggggtcatcaaccagttttcccagcgctggacccacttcattgaccctcagagccaggccaacaaatggatcaagaacatggagaaggacaatgggctggatgtgttcaagttgagtgaccgcgacttcctgcgcagcatggagaacgccatccgctttggcaagccatgtctcctggagaacgtgggcgaggagctagacccagccctggagccagtgctgctcaagcagacgtacaagcagcagggaaacacggtgctgaagctgggggacacggtgatcccctaccatgaggacttcaggatgtacatcaccaccaagctgcccaacccacactacacgcccgagatctccaccaaactcaccctcatcaacttcaccctgtcgcccagtggcctagaggaccagctactgggccaggtagtggcagaggagcgacccgacctggaggaggccaagaaccagctgattatcagtaatgccaagatgcgccaggagctgaaggacattgaggaccagatcctgtaccggctcagctcctccgagggcaaccctgtagatgacatggaactcatcaaggtgctggaagcctccaagatgaaggctgctgagatccaggccaaagtcaggattgcagagcagacggagaaggacatcgacctgacgcgcatggagtacatacccgtggccatccgcacccagatcctcttcttctgtgtgtccgacctggccaacgtggaccccatgtaccagtactcccttgagtggtttctcaacatcttcctctcgggcatcgccaactcagagagagcagacaacctgaagaagcgcatctccaacatcaaccgctacctgacctacagcctctacagcaacgtctgccgcagcctctttgagaagcacaagctgatgtttgccttcctgctgtgtgttcgcatcatgatgaacgagggcaaaatcaaccagagtgagtggcgatacctcctgtctgggggctccatctcgatcatgactgagaatccggcaccggactggctgtcagaccgggcttggcgagacatcctagcactctcgaacctgccaaccttttcctccttctcttccgacttcgtgaagcacctctcagaattccgggtcatcttcgacagccttgagccccaccgggagcctttgcctggcatctgggaccagtacctagaccagttccagaagctgctagtcctccgctgcctgcgtggggacaaggttaccaacgccatgcaggactttgtggccaccaacctggagccacgcttcattgaaccccagacagccaatctgtcagtggtgttcaaagactccaactccaccacacccctcatctttgtgctgtcacccggcacagaccctgctgccgacctctacaagtttgccgaagaaatgaagttctccaaaaagctctctgccatctccctgggccaggggcagggccctcgggcagaagccatgatgcgcagctccatagagaggggcaaatgggtcttcttccagaactgccacctggcaccaagctggatgccagccctagaacgcctcatcgagcacatcaaccccgacaaggtacacagggacttccgcctctggctcaccagcctgcccagcaacaagttcccagtgtccatcctgcagaacggctccaagatgaccattgagccgccacgcggtgtcagggccaacctgctgaagtcctatagtagccttggtgaagacttcctcaactcctgccacaaggtgatggagttcaagtctctgctgctgtctctgtgcttgttccatgggaacgccctggagcgccgtaagtttgggcccctgggcttcaacatcccctatgagttcacggatggagatctgcgcatctgcatcagccagctcaagatgttcctggacgaatatgatgacatcccctacaaggtcctcaagtacacggcaggggagatcaattacgggggccgtgtcactgatgactgggaccggcgctgcatcatgaacatcttggaggacttctacaaccctgacgtgctctcccctgagcacagctacagcgcctcgggcatctaccaccagatcccgcctacctacgacctccacggctacctctcctacatcaagagcctcccactcaatgatatgcctgagatctttggcctgcatgacaatgccaacatcacctttgcccagaacgagacgttcgccctcctgggcaccatcatccagctgcaacccaaatcatcttctgcaggcagccagggccgggaggaggtacaatcggctgctgcaggtgatcacacagacactgcaagacctactcaaggcactcaaggggctggtagtgatgtcctctcagctggagctgatggctgccagcctgtacaacaatactgtgcctgagctctggagtgccaaggcctacccatcgctcaagcctctgtcatcatgggtcatggacctgctgcaacgcctggactttctgcaggcctggatccaagatggcatcccagctgtcttctggatcagtggattcttcttcccccaggctttcttaacaggcactctgcagaattttgcccgcaaatttgtcatctccattgacaccatctcctttgatttcaaggtgatgtttgaggcaccatcagagttaacacaaagaccccaagtagggtgctatatccatggattattcctggaaggtgcccgctgggatccagaggccttccagctggctgagtctcagcccaaggagctgtacacagagatggccgttatctggctcttgccaacacccaaccgcaaggcccaggaccaggacttttacctgtgccccatctacaagacactgactcgtgctggaacactatcaaccacaggacactctaccaactatgtcattgctgtggagatccccacccatcagccccagcgacactggataaagcgtggtgtggccctcatctgtgccctggactactagactcagacagaagggctggggccattaaagctgaattttct

SEQ ID NO: 128491 - DNA, 14473 bp, Homo sapiens
  Payload ID: 5150
  Gene Symbol: DNAH10
  Gene Name: dynein, axonemal, heavy chain 10
  Uniprot ID: Q8IVF4
  ENST ID: ENST00000409039
  CDS Start-End: 333-13748
cgggcgcggggcactgccgagcttgcagcccccagcgccggcgccgtcggcggggcgagctgcggccgtttccggggcgcccattgctagggccgccgttgccacggacgcccgccctgcgcccggctccctctgcactgcgcggcgccatggacgacctgcgggtgctgtggatgcgcgaccgcgtgtatgcggctttcggcatcaccgacccccagcttttcgaggacctgctcaaccgcgacgacggccagggcgaggacctcatcttgcacttcctcaaccaggcgagcgaggaggaggggccctcggcgctcttcatctaccgcactatggtgccggaggaggtggaggtggagattgatgagatacctgtcctgtctgaagagggagaagaggaagaagagacttattctcaaaaagtggagtccgtggataaagtgcgagctaagcgtgtgtcactgagaaccgaatctctaggccaacctctaaacagagaggatgaagaaatggacaaagagatttcagaaaaactcccttccaaaagaactgcgaagcacatcatggaaaagatgcatctccacatgctctgtacccctcttcccgaggagttcctggaccaaaacgtggtgtttttcctcagaaataccaaagaggcaatctctgaagctaccgacatgaaggaagctatggaaattatgccagaaacactggagtatggaattataaacgctaatgtgctccattttctgaagaatattatatgtcaggtttttttgccagcattgtccttcaatcagcacaggacgagtacaaccgtgggagtcacatctggagaagtctctaattcctctgagcatgaatcagacctgccgcccatgcctggggaggcagtagaatatcacagtattcaattaatacgggatgaatttttaatgaacgtgcagaaatttgcaagtaatattcaaagaaccatgcagcaacttgaaggtgagatcaagttagaaatgccaatcatcagtgtggagggagaggtgtctgacctggcagctgacccggaaaccgttgacatcttggagcagtgtgtgataaactggctgaatcagatatccacagcggttgaggcccaactgaagaagacacctcagggtaaaggccctctggctgaaattgaattctggagggaaagaaatgcaaccttaagtgcgctgcatgaacaaacaaagcttccaatagtcagaaaagtcttggatgtgatcaaggaatccgactccatgcttgtggctaatctgcagccagtgttcaccgagttattcaagttccacacggaggcctcagacaatgtgcgctttctctccaccgtggagcgttatttcaagaacataacgcacgggtctggcttccacgtggtcctggacaccatccccgccatgatgagtgccctgcggatggtgtggatcatctcccgacactacaacaaagacgagaggatgattccgctcatggagcgcatcgcctgggaaatcgctgagagagtctgccgagtggtcaacctgcggactttgttcaaagaaaatcgagcgagtgcccaaagcaaaaccttggaagccaggaacaccctcaggctgtggaaaaaggcctattttgacacccgggccaagatagaggcttcggggagggaagatcggtgggagtttgaccggaagcggctgttcgagaggacggattatatggccaccatctgccaggacctctccgacgttctgcagattttggaggaattttataacatatttggtccagaactaaaggcagtgacgggggaccccaagcgcattgatgatgtcctatgcagagtggacggcctagtcacccccatggaaaacctgacctttgaccccttcagcatcaagtcctcccagttctggaaatatgtgatggatgaattcaagattgaagttctgattgacatcattaataaaatctttgtccagaaccttgaaaatccaccactgtataagaatcaccctccagtagcaggtgcaatatactgggaacgatctctgttctttcggattaagcataccatcctccgatttcaagaggtacaagagatactggacagtgatcgaggacaggaggtcaaacaaaaatatttggaagtaggtaggacaatgaaggagtatgaagacagaaagtatgagcagtggatggaggtgacggagcaggtgctgccagctctcatgaagaagagccttttgaccaagtcttccatcgccacagaggagccttcgactttagaaaggggagctgtttttgcaatcaacttttcaccggctctcagagagattattaatgaaacaaagtacttagagcagctggggttcactgtccctgaattagcaagaaatgttgctctccaggaagacaaattccttaggtacacagctgggatacagcgcatgttggatcattatcacatgctcataggaacgttaaacgatgcggagtctgtgcttctcaaagatcattcccaggaactgctccgagtgtttaggtcgggatataagaggttgaactggaactcactaggtatcggtgactatataactggttgcaaacaggccattgggaaatttgagtctctcgtccaccagattcataagaatgcagatgacatttcttccaggctgacattaatagaggccataaatctctttaaatatccagccgctaaaagtgaggaagaactcccaggcgtgaaggaattttttgaacacattgagcgagaaagggccagcgacgtggaccacatggtccggtggtatcttgccattggaccactgctgaccaaagttgagggcctggtcgtccacaccaacacaggcaaggcccccaagctggcctcctactacaaatactgggaaaagaaaatttatgaggtcctgacaaagctcatcctgaagaacttgcagtcttttaattctttgatccttggaaatgtccctctgttccacactgaaaccattctgacggcacctgagatcatccttcatcccaacacaaatgagatcgacaagatgtgcttccattgtgtccggaattgcgtggagatcaccaagcattttgttcgttggatgaatggcagctgcatagaatgcccacctcagaagggggaggaagaggaagttgttataataaacttttacaatgatatctctctgaaccctcagataattgaacaagctgttatgatcccccaaaatgtccacaggattctgatcaatcttatgaagtatctacaaaaatggaagcggtatcgacctctctggaaattggacaaagctattgtgatggagaaatttgctgccaagaaacctccttgtgtagcatatgatgaaaagttgcagttctattccaagatagcttatgaggttatgcgccaccctctaattaaggatgagcattgcatcagacttcagctcaggcatctggcaaacacagtgcaggaaaatgccaagtcctgggtgatttcgcttggaaaacttctcaatgagtcagcaaaagaggagctctataatctccatgaagagatggagcacctggccaaaaaccttaggaagatccccaatacccttgaagatctcaagtttgtccttgcaacaattgcagaaattagaagtaaatctctagtcatggaactcagatatagggacgtccaggagcgataccgtaccatggcaatgtataacctctttcctcctgatgcagagaaagaactggttgataagattgagagcatatggtccaatctgtttaatgattcagtgaatgtggagcatgctcttggggacataaagagaactttcacagagcttactcgaggcgaaataatgaactacagagttcagatagaggagtttgcaaagcgtttttacagtgaaggccctggttctgttggtgatgatcttgataaaggagtagagcttttaggtgtttatgaaagagagctggcaagacatgaaaagagccgtcaggaactggctaacgctgagaaacttttcgatcttcctattacaatgtacccagagctgctgaaagtgcagaaggaaatgagtgggctgaggatgatttacgagctctatgaaggactaaaggttgcaaaagaagaatggtctcagaccctttggatcaacctgaatgtgcagattctccaggaaggaattgaaggttttctcagggctctcagaaagctacctcggccagtccgtggcttatcagtgacctactacttggaagcaaaaatgaaggcattcaaagactcgattcctttacttcttgacttgaaaaacgaggcactaagagacaggcattggaaagaacttatggaaaaaacgtctgtcttttttgaaatgaccgaaacgttcaccttggaaaatatgtttgctatggaactgcacaaacacacagatgttctcaatgagattgtcacagcagcaatcaaggaggttgccattgagaaggctgtgaaggaaatcctagacacgtgggaaaatatgaaattcactgtagtcaagtattgcaaaggcacacaggagcgaggctacatcctgggttctgttgacgaaattattcagtctcttgatgacaacactttcaacctgcagagcatctcaggaagcagatttgtggggccttttctgcaaactgttcacaaatgggaaaaaacgctttctctaataggggaagtcattgagatttggatgttggttcagagaaaatggatgtatcttgaaagtatttttattggtggagatataagatcacaacttccggaagaggcaaaaaagtttgacaacatcgataaagtatttaaaaggatcatgggtgagaccttaaaagaccccgtgatcaagaggtgctgtgaagccccaaaccgcctcagtgacctacagaacgtcagcgagggcctggagaaatgccagaaaagcctcaacgactacttagattcgaagagaaatgctttcccaaggttcttcttcatttctgacgatgagttgcttagcattctggggagcagcgacccactctgcgtccaggagcacatgatcaagatgtacgacaacatagcatcactgaggtttaatgacggcgatagtggagaaaaactggtgtccgcgatgatttcagcagaaggagaagtcatggagtttcggaagatcttgcgggctgaagggcgcgtggaggactggatgacggcagttttgaatgagatgagaagaactaatagactaattaccaaagaggctatttttagatactgtgaagacagaagcagagtcgactggatgctcctgtaccagggcatggtggtgctggccgctagccaggtgtggtggacctgggaggtggaagacgtcttccacaaagcgcaaaaaggggagaagcaggccatgaagaactatggcaggaaaatgcaccggcagatcgatgagttggtaacgcgcatcaccatgccgctaagcaaaaacgacaggaaaaaatacaacactgttctcatcattgatgtgcatgccagagacatagttgattctttcataagaggcagtatcctggaggcccgagagtttgactgggaaagtcagttgcggttttattgggaccgggagccggatgagctgaacatccgccagtgcacgggaacctttggctacggctacgagtacatgggcctgaacggcaggctggtcatcacgcccctcaccgatcggatttacctgacgctcacccaggcgctgtccatgtatctaggtggggcccccgccggcccagcaggaaccggcaaaaccgagaccaccaaggacctggcgaaagccttgggcttgctctgtgttgtcaccaactgtggcgaaggcatggattacagggccgtggggaagattttctctggcctggcacagtgcggggcttggggctgctttgatgagtttaatcgaatcgatgcttctgtgctctccgtgatctcctcccagatccagacgatccgaaatgctctgatccatcagttaaccacgttccagtttgaagggcaggagatttccctggactcccgcatgggcatcttcatcaccatgaaccccggctacgcaggccgcacggagctgcccgagtcggtgaaggcgctgttcaggcctgtggtcgtgatcgtgcccgacctgcagcagatctgtgagatcatgctcttctctgagggcttcctggaggccaagactctggcgaaaaagatgacggttctgtataagctggcccgggagcagctgtccaagcagtatcactatgattttggactcagagccctgaaatcggtgctggtcatggctggtgagctgaagagaggctcctctgaccttagggaggacgtggtgctgatgagggccttgcgagacatgaacttgcccaaatttgtgtttgaagatgttcctcttttccttggtttgatttcggatctgtttcctgggctggactgccctcgcgtccgctaccctgacttcaacgatgcggtagagcaggtcctggaggagaacggctacgcggtcctacccatccaggtggataaagtggttcaaatgttcgagaccatgttaacccgccacacgacgatggtggtggggcccaccagagggggcaagtccgtcgtcattaacactctgtgtcaggcccagaccaagcttgggctgacgacaaagttgtacatcctgaaccccaaagccgtgagtgtcatagaactctacggcatcctggacccaaccacccgagactggacagatggggtgttgtcaaacatcttcagggaaatcaacaagccaacagacaagaaggagcgaaagtatattttatttgatggtgatgtggatgctctatgggtggaaaacatgaattctgtgatggatgacaacaggttgttgacattggccaacggggaacgcatccggctccaagcacactgtgccctgctctttgaggttggagatttacagtatgcctcccctgcaactgtctctcgatgtggaatggtttatgtggatcctaaaaacttgaaatatcgaccatactggaaaaaatgggttaatcaaataccaaacaaggtggagcaatacaatttgaatagtctctttgagaagtatgtgccctatctcatggatgtgatagtggaaggaattgtggatggaagacaagcagaaaagctgaagacaatagttcctcagacagacctcaatatggtaacccagttagccaagatgttggatgcgttgctagaaggagaaatagaagaccttgacctgctggagtgctacttcctggaggctttgtactgctctctgggagcctccctgcttgaggatggaaggatgaaatttgacgaatatatcaaacgccttgcttctttgtctactgttgacacagaaggagtttgggccaaccctggggaactgccaggtcaacttccaaccttgtatgactttcattttgataacaaacggaatcaatgggtcccatggagtaaattagttccagagtatattcatgcccccgagaggaaattcatcaacatcctggttcacacagtggataccactcggactacctggatattggaacaaatggttaaaattaagcaacctgttatttttgttggtgaatctggcacttctaagacagccactacccagaatttcctcaaaaatctgagtgaagaaactaacattgtgttaatggtcaacttctcctcccgcaccacgtccatggatatccaaagaaatttagaagcaaatgtggaaaagcgaaccaaagatacttacggcccacccatgggaaaacgcctgctggtgttcatggatgacatgaatatgccaagggtggatgaatatggcacgcagcagcccattgccttgctgaagctgctgttggaaaaaggctacttatatgaccgtgggaaggagctgaactgtaaaagcattcgagaccttggctttattgctgcaatgggaaaggctggaggaggccgcaatgaagttgacccaagatttatttcgctattcagtgtcttcaatgtgccatttccttcagaggagtctctgcatttaatttattcctccatcctgaaaggccacacctcgacgtttcatgagagcattgtggctgtgagtggcaagctgacattctgcacgctagcactttacaaaaatattgtgcaagacctacctcccactccgtcaaagttccattacatcttcaaccttcgagatctctcacgggtttttaatggtcttgtcctcactaacccggagcgattccagacggtggcccagatggtgagagtctggaggaatgagtgtctgagagtcttccacgaccggctgatcagtgaaacagacaagcagctggtacaacagcacataggcagcttggttgtggaacattttaaagatgacgtggaggtggtgatgagggatcccatattgtttggagacttccagatggctctgcacgaaggagaaccacgcatttatgaagacatccaggactacgaggcggccaaggctctgttccaggaaattcttgaagagtataatgaaagcaacaccaaaatgaacttggttctcttcgacgatgctctggagcatttaacccgggtgcaccgtatcatccgcatggaccgcggccacgccctgctggtcggggtagggggctcagggaagcagtctctttcgaggctggctgccttcacagccagctgtgaggtgtttgagatcctgctgagccgaggctactcggagaacagtttccgggaagacctgaagagcctctatttgaaacttgggattgagaacaaagcgatgatctttctgttcacggatgcccatgtggctgaggagggcttcctggagctcatcaacaacatgctgacctcaggaattgtacctgcgcttttttctgaagaggagaaagagtctatcctgagtcagattggacaggaagctctgaagcaaggcatggggccggccaaggagtctgtgtggcagtacttcgtgaacaaaagtgcaaataacctgcacattgtcctgggcatgtcgccagtgggggacaccctgaggacctggtgcagaaacttcccaggtatggtaaataacactggtattgactggttcatgccctggcctccccaagccctccatgcggtcgcaaagtcctttctagggtataatccaatgatcccggcagaaaatatagaaaatgtggtgaagcatgttgtcttggttcaccaatccgtggaccactacagccaacagtttctacagaaattgaggcgcagcaactatgtcactcccaagaactaccttgattttattaacacctattcaaaattgctggatgagaaaactcagtgtaatatagctcagtgcaagcgtctggatgggggactggacaagctgaaggaggccaccatccagctggacgagctgaaccagaagctggccgagcagaagatcgtgctggcggagaagtccgccgcctgcgaggccttgctggaggagatcgccgtcaacaccgctgtagccgaggagaagaagaaactggcagaggaaaaggccatggagatagaggagcagaacaaagtcattgccatggagaaggccgaggccgagacgaccctggcagaggtcatgcccatcctggaggccgccaagctggaactgcagaagctggacaagtcggacgtgactgagattaggtcgtttgctaagcccccgaagcaggtgcagacggtctgcgaatgcatcctcatcatgaaagggtacaaagagctgaactggaaaacagccaagggcgtgatgtccgacccgaatttcctgcggtctctgatggagattgattttgattcgattacccagagccaagtgaaaaacatcaaaggcctcttgaagactcttaataccacaactgaagaaatggaagctgtcagcaaagccgggctggggatgctgaaatttgttgaagctgtaatgggctactgtgatgttttcagagaaatcaagcccaaaagagagaaggtggccaggctggagcggaatttttacctcactaaacgggaactggaaaggatccagaatgagttggcagcaattcagaaagagctggaaacattgggtgccaaatatgaggccgccatactggaaaagcagaagctgcaggaagaagccgagatcatggagaggcggctgattgccgcagacaaactcatctcgggtctggggtcagaaaacatcaggtggctgaacgacctggatgagctgatgcaccggcgcgtgaagctgctgggggactgcctgctctgcgcggctttcctcagctacgagggagccttcacctgggagttccgtgacgagatggtcaatcggatttggcaaaatgacatcctggagcgggagatccccctgagccagcctttccggctggaaagcctgctcacggatgatgttgagatcagcagatggggatcccagggccttccccccgatgagctctccgttcagaatggcatcctcaccacccgggccagccgcttccctctgtgtatcgacccccagcagcaggccctcaactggatcaagagaaaagaggagaagaacaatctgcgggtcgcttcctttaatgaccctgacttcctcaagcagctagagatgtccataaagtacgggacccctttcctgttccgcgatgttgatgaatacatcgatcctgtgattgacaacgtcttagaaaaaaatataaaagtctcccaaggacggcagtttattatcctgggagacaaggaagtggactatgattcaaatttcagactgtacctgaacaccaagctggccaatcccagatattccccatccgtgtttgggaaagctatggtgatcaattacactgtcacgctgaagggcctggaggaccagctgctgagcgtgctggtggcttacgagaggcgggagctggaggagcagcgggagcacctcatccaggagaccagcgagaacaagaacctgctcaaggacctggaagattccctccttcgggagctggccacgtccacggggaacatgctggacaatgtggacctggtgcacaccctggaggagaccaaatccaaggcaacagaggtctcagagaaactcaagctggcggagaagacagccttggacatcgacaggctgcgggatggctaccggccagcagccaggaggggggccatcctgttcttcgtcctgtctgagatggccctggtgaactccatgtaccagtactccctgattgccttcttagaggtcttcaggctgtcactgaagaagtcgctgcctgattccatcctcatgaaacgcctgaggaacatcatggacacgctgaccttcagcatctataaccacggctgcacagggctgtttgagaggcacaagctactcttttcttttaatatgaccatcaagatagaacaagcagaagggagagtccctcaagaagaactagatttctttttaaaaggaaacatttccctggagaaaagcaaaagaaaaaagccctgcgcttggttgtctgaccaaggatgggaagatatcattcttttatcagaaatgttttcagacaactttgggcaacttcctgatgatgttgagaataatcagactgtctggcaggagtggtatgacctggattcactggagcagtttcccgtccccttgggttacgataacaacatcacccctttccagaagttgcttattttgcgctgtttccgtgtggatcgggtctatcgggccgtgactgactatgtgactgtaacaatgggagagaagtatgtgcagcccccaatgatcagctttgaagctatttttgagcagagcactccacattcgcccattgtgtttatcctgagtcctggctccgaccctgccactgatcttatgaaattagcagagcgaagtggttttggaggaaatcgcctcaaattccttgcaatgggtcaaggtcaagaaaaggtggccctgcagctgctggagacggcggtggctcgggggcagtggctgatgctgcagaactgccacctcctggtcaagtggctgaaagatctggagaagtccctggagaggatcaccaagccccacccagacttccgcctgtggctcaccacggaccccaccaagggcttccccattgggattctgcagaagtccctaaaggttgtcaccgagccacccaatgggctgaaactcaacatgagggcaacttacttcaagatctctcacgaaatgctggaccagtgcccgcaccctgccttcaagccgctggtctacgtgctggcgttctttcatgctgtggtgcaggagagaaggaagtttgggaagattggctggaacgtgtactatgacttcaatgagtctgacttccaggtctgcatggaaattctgaacacgtacttaacgaaagccttccagcaacgggacccaaggatcccgtggggcagcctcaagtacctaattggagaggtcatgtatggaggacgggccatcgacagctttgatcgccgcatcctgaccatctacatggatgagtacctgggggacttcatttttgatactttccagccattccacttcttccggaacaaggaagtggactacaaaatccctgttggtgatgaaaaggagaaatttgttgaagccatcgaggccctcccgcttgccaacacgccagaagtgtttggtctccaccccaacgctgagattggctattacacgcaggcggctcgagacatgtgggctcacctgctggagctgcagcctcagacaggggaatccagcagtggtatcagccgcgatgattatattggccaagtggccaaagaaatagaaaacaagatgcccaaagtctttgacttggaccaggtgaggaagcgcctcggaacaggactctcccccacttcggtggtgctcctgcaggaactggaacgcttcaacaagcttgtggtccggatgacgaagtctctggctgaacttcaaagggccttggctggagaagttggaatgagcaatgagttagatgatgtggccaggtctctttttatcgggcatatccctaatatctggagaaggcttgctcctgacaccttaaagtcccttggaaactggatggtctacttcctgcggcggttcagccagtacatgttgtgggtgaccgagagcgagcccagcgtgatgtggctctcggggctgcacatccctgagtcctacctcacggcgctggtgcaggccacctgccggaagaacggctggccactggaccgctccaccttgttcacacaagtgaccaagttccaggatgcagatgaagtgaatgagcgggcgggacaaggatgctttgtctcaggactgtacctggaaggtgctgactgggatatagaaaaaggatgtcttatcaagagcaaacccaaggtgctggttgtggacctgccgatcctgaagatcatccccattgaagcccatcgcctcaagctgcagaatactttccggacccccgtctacaccacctccatgagaaggaacgccatgggagtcggcttggtttttgaagctgatctctttaccacgaggcacatttctcactgggtgctgcaaggagtatgcctcaccctgaattctgattaacctttgggtgaagaaaactgcttaatgaattcggagcctggggttgtcagagtgatcgggtctgctgtcatttcttggggcctctcaagaggcaggagggggactgacactgatttttcatttgaaatcagccacttaaatctctttccatacaaattaacctgaatggttttgtttttaatactactttttaaaaggaatttatataatcaaaaagtaaatattggagagtattttaagatgtgtggagttttcttttccttctcagagaaaacacttgattaggcaaaagtgcctggcatacatagcattggcacaagtgagaatcctaatgtaatttccaaaggtgtgttttcgatgatccaggtctgtttcagcagatgctcctttttggcaagaagggctgatgatgtcgggcacagagcagaagtgaccagtcacctggagccacttctcccccttccagaactctctggccctagcttctttggctctgacctgctacggcgactgtgaagttgttgagcttagtgtttagttcctgcatgagcttctacccccagcctgcctgggtctgtgtggggtcaggtaaggacacagaacctccaggaccagtggtcactgggcaccccttccctctgtgcaccatgaggctggcctggagccctggctggccacctggaggtgaggggtggcttcactccatgagggaggagaggggctag

SEQ ID NO: 128492 - DNA, 3890 bp, Homo sapiens
  Payload ID: 5150
  Gene Symbol: DNAH10
  Gene Name: dynein, axonemal, heavy chain 10
  ENST ID: ENST00000497783
  CDS Start-End: 1-1947
cttgaaagtatttttattggtggagatataagatcacaacttccggaagaggcaaaaaagtttgacaacatcgataaagtatttaaaaggatcatgggtgagaccttaaaagaccccgtgatcaagaggtgctgtgaagccccaaaccgcctcagtgacctacagaacgtcagcgagggcctggagaaatgccagaaaagcctcaacgactacttagattcgaagagaaatgctttcccaaggttcttcttcatttctgacgatgagttgcttagcattctggggagcagcgacccactctgcgtccaggagcacatgatcaagatgtacgacaacatagcatcactgaggtttaatgacggcgatagtggagaaaaactggtgtccgcgatgatttcagcagaaggagaagtcatggagtttcggaagatcttgcgggctgaagggcgcgtggaggactggatgacggcagttttgaatgagatgagaagaactaatagactaattaccaaagaggctatttttagatactgtgaagacagaagcagagtcgactggatgctcctgtaccagggcatggtggtgctggccgctagccaggtgtggtggacctgggaggtggaagacgtcttccacaaagcgcaaaaaggggagaagcaggccatgaagaactatggcaggaaaatgcaccggcagatcgatgagttggtaacgcgcatcaccatgccgctaagcaaaaacgacaggaaaaaatacaacactgttctcatcattgatgtgcatgccagagacatagttgattctttcataagaggcagtatcctggaggcccgagagtttgactgggaaagtcagttgcggttttattgggaccgggagccggatgagctgaacatccgccagtgcacgggaacctttggctacggctacgagtacatgggcctgaacggcaggctggtcatcacgcccctcaccgatcggatttacctgacgctcacccaggcgctgtccatgtatctaggtggggcccccgccggcccagcaggaaccggcaaaaccgagaccaccaaggacctggcgaaagccttgggcttgctctgtgttgtcaccaactgtggcgaaggcatggattacagggccgtggggaagattttctctggcctggcacagtgcggggcttggggctgctttgatgagtttaatcgaatcgatgcttctgtgctctccgtgatctcctcccagatccagacgatccgaaatgctctgatccatcagttaaccacgttccagtttgaagggcaggagatttccctggactcccgcatgggcatcttcatcaccatgaaccccggctacgcaggccgcacggagctgcccgagtcggtgaaggcgctgttcaggcctgtggtcgtgatcgtgcccgacctgcagcagatctgtgagatcatgctcttctctgagggcttcctggaggccaagactctggcgaaaaagatgacggttctgtataagctggcccgggagcagctgtccaagcagtatcactatgattttggactcagagccctgaaatcggtgctggtcatggctggtgagctgaagagaggctcctctgaccttagggaggacgtggtgctgatgagggccttgcgagacatgaacttgcccaaatttgtgtttgaagatgttcctcttttccttggtttgatttcggatctgtttcctgggctggactgccctcgcgtccgctaccctgacttcaacgatgcggtagagcaggtcctggaggagaacggctacgcggtcctacccatccaggtggataaagtggttcaaatgttcgagaccatgttaacccgccacacgacgatggtggtggggcccaccagagggggcaagtccgtcgtcattaacactctgtgtcaggcccagaccaacctctcttgatttaggcttgggctgacgacaaagttgtacatcctgaaccccaaagccgtgagtgtcatagaactctacggcatcctggacccaaccacccgagactggacagatggggtgttgtcaaacatcttcagggaaatcaacaagccaacagacaagaaggagcgaaagtatattttatttgatggtgatgtggatgctctatgggtggaaaacatgaattctgtgatggatgacaacaggttgttgacattggccaacggggaacgcatccggctccaagcacactgtgccctgctctttgaggttggagatttacagtatgcctcccctgcaactgtctctcgatgtggaatggtttatgtggatcctaaaaacttgaaatatcgaccatactggaaaaaatgggttaatcaaataccaaacaaggtggagcaatacaatttgaatagtctctttgagaagtatgtgccctatctcatggatgtgatagtggaaggaattgtggatggaagacaagcagaaaagctgaagacaatagttcctcagacagacctcaatatggtaacccagttagccaagatgttggatgcgttgctagaaggagaaatagaagaccttgacctgctggagtgctacttcctggaggctttgtactgctctctgggagcctccctgcttgaggatggaaggatgaaatttgacgaatatatcaaacgccttgcttctttgtctactgttgacacagaaggagtttgggccaaccctggggaactgccaggtcaacttccaaccttgtatgactttcattttgataacaaacggaatcaatgggtcccatggagtaaattagttccagagtatattcatgcccccgagaggaaattcatcaacatcctggacgtttcatgagagcattgtggctgtgagtggcaagctgacattctgcacgctagcactttacaaaaatattgtgcaagacctacctcccactccgtcaaagttccattacatcttcaaccttcgagatctctcacgggtttttaatggtcttgtcctcactaacccggagcgattccagacggtggcccagatggtgagagtctggaggaatgagtgtctgagagtcttccacgaccggctgatcagtgaaacagacaagcagctggtacaacagcacataggcagcttggttgtggaacattttaaagatgacgtggaggtggtgatgagggatcccatattgtttggagacttccagatggctctgcacgaaggagaaccacgcatttatgaagacatccaggactacgaggcggccaaggctctgttccaggaaattcttgaagagtataatgaaagcaacaccaaaatgaacttggttctcttcgacgatgctctggagcatttaacccgggtgcaccgtatcatccgcatggaccgcggccacgccctgctggtcggggtagggggctcagggaagcagtctctttcgaggctggctgccttcacagccagctgtgaggtcagtccacgtaccctcccagaaataggtttacgatgccagtttctgcagttggtagttcgtgtacatattggaacaatccacagcagatcatagcatgatgttttcatagagtatcgaggtgggtgttttggtttgttttattttttcttgtttttggcttgatattactatattttaactgaatagccagagcatctaagtacaggtgttctttggcttaggatagggttacatcctgataaaataatcataagtcaaaaatattgtcagttgaaaatacatttaatatcccaattaacccatcataaagttgaaaaatcctaagtggaaccatcaaagccggggaccatctgtattgctttgtttttaggatggagaatgtcagatcaagttagaaagtcaaatacaagcacatcctgtg

SEQ ID NO: 128493 - DNA, 1003 bp, Homo sapiens
  Payload ID: 5150
  Gene Symbol: DNAH10
  Gene Name: dynein, axonemal, heavy chain 10
  ENST ID: ENST00000540041
  CDS Start-End: 45-1003
cctctttcttctctggctcaccccagcctcctaccagagcacaaatgcctgggcccctgcctggccgcccccacactgcatccatgccctccgggacctctgtctcctgctcttctctcctgcttttccttcctctcctgctttgccttgtctgtgctgttctcttccacttctgtctttccatggcgtggtctgggagactcctgtggctttcactgaccttgcctggcagtgggatgccccggtcgtttgctaagcccccgaagcaggtgcagacggtctgcgaatgcatcctcatcatgaaagggtacaaagagctgaactggaaaacagccaagggcgtgatgtccgacccgaatttcctgcggtctctgatggagattgattttgattcgattacccagagccaagtgaaaaacatcaaaggcctcttgaagactcttaataccacaactgaagaaatggaagctgtcagcaaagccgggctggggatgctgaaatttgttgaagctgtaatgggctactgtgatgttttcagagaaatcaagcccaaaagagagaaggtggccaggctggagcggaatttttacctcactaaacgggaactggaaaggatccagaatgagttggcagcaattcagaaagagctggaaacattgggtgccaaatatgaggccgccatactggaaaagcagaagctgcaggaagaagccgagatcatggagaggcggctgattgccgcagacaaactcatctcgggtctggggtcagaaaacatcaggtggctgaacgacctggatgagctgatgcaccggcgcgtgaagctgctgggggactgcctgctctgcgcggctttcctcagctacgagggagccttcacctgggagttccgtgacgagatggtcaatcggatttggcaaaatgacatcctggagcgggagatccccctgagccagcctttccggctggaaagcctgctcacggatgatgttgagatcagcag

SEQ ID NO: 128494 - DNA, 3484 bp, Homo sapiens
  Payload ID: 5150
  Gene Symbol: DNAH10
  Gene Name: dynein, axonemal, heavy chain 10
  ENST ID: ENST00000614082
  CDS Start-End: 572-3484
ctcggcgctcttcatctaccgcactatggtgccggaggaggtggaggtggagattgatgagatacctgtcctgtctgaagagggagaagaggaagaagagacttattctcaaaaagtggagtccgtggataaagtgcgagctaagcgtgtgtcactgagaaccgaatctctaggccaacctctaaacagagaggatgaagaaatggacaaagagatttcagaaaaactcccttccaaaagaactgcgaagcacatcatggaaaagatgcatctccacatgctctgtacccctcttcccgaggagttcctggaccaaaacgtggtgtttttcctcagaaataccaaagaggcaatctctgaagctaccgacatgaaggaagctatggaaattatgccagaaacactggagtatggaattataaacgctaatgtgctccattttctgaagaatattatatgtcaggtttttttgccagcattgtccttcaatcagcacaggacgagtacaaccgtgggagtcacatctggagaagtctctaattcctctgagcatgaatcagacctgccgcccatgcctggggaggcagtagaatatcacagtattcaattaatacgggatgaatttttaatgaacgtgcagaaatttgcaagtaatattcaaagaaccatgcagcaacttgaaggtgagatcaagttagaaatgccaatcatcagtgtggagggagaggtgtctgacctggcagctgacccggaaaccgttgacatcttggagcagtgtgtgataaactggctgaatcagatatccacagcggttgaggcccaactgaagaagacacctcagggtaaaggccctctggctgaaattgaattctggagggaaagaaatgcaaccttaagtgcgctgcatgaacaaacaaagcttccaatagtcagaaaagtcttggatgtgatcaaggaatccgactccatgcttgtggctaatctgcagccagtgttcaccgagttattcaagttccacacggaggcctcagacaatgtgcgctttctctccaccgtggagcgttatttcaagaacataacgcacgggtctggcttccacgtggtcctggacaccatccccgccatgatgagtgccctgcggatggtgtggatcatctcccgacactacaacaaagacgagaggatgattccgctcatggagcgcatcgcctgggaaatcgctgagagagtctgccgagtggtcaacctgcggactttgttcaaagaaaatcgagcgagtgcccaaagcaaaaccttggaagccaggaacaccctcaggctgtggaaaaaggcctattttgacacccgggccaagatagaggcttcggggagggaagatcggtgggagtttgaccggaagcggctgttcgagaggacggattatatggccaccatctgccaggacctctccgacgttctgcagattttggaggaattttataacatatttggtccagaactaaaggcagtgacgggggaccccaagcgcattgatgatgtcctatgcagagtggacggcctagtcacccccatggaaaacctgacctttgaccccttcagcatcaagtcctcccagttctggaaatatgtgatggatgaattcaagattgaagttctggttattgagaaagaagcaaaacattttattgatgaatcttttaagacgcttcgatctgctgaagcagcatttgacatgcttttaaaatttaagcacattcgttcacgggaggctgttaatcgacaaatgatgatgaaatttaatgatattcttgcacagtactgtaaagagattgacatcattaataaaatctttgtccagaaccttgaaaatccaccactgtataagaatcaccctccagtagcaggtgcaatatactgggaacgatctctgttctttcggattaagcataccatcctccgatttcaagaggtacaagagatactggacagtgatcgaggacaggaggtcaaacaaaaatatttggaagtaggtaggacaatgaaggagtatgaagacagaaagtatgagcagtggatggaggtgacggagcaggtgctgccagctctcatgaagaagagccttttgaccaagtcttccatcgccacagaggagccttcgactttagaaaggggagctgtttttgcaatcaacttttcaccggctctcagagagattattaatgaaacaaagtacttagagcagctggggttcactgtccctgaattagcaagaaatgttgctctccaggaagacaaattccttaggtacacagctgggatacagcgcatgttggatcattatcacatgctcataggaacgttaaacgatgcggagtctgtgcttctcaaagatcattcccaggaactgctccgagtgtttaggtcgggatataagaggttgaactggaactcactaggtatcggtgactatataactggttgcaaacaggccattgggaaatttgagtctctcgtccaccagattcataagaatgcagatgacatttcttccaggctgacattaatagaggccataaatctctttaaatatccagccgctaaaagtgaggaagaactcccaggcgtgaaggaattttttgaacacattgagcgagaaagggccagcgacgtggaccacatggtccggtggtatcttgccattggaccactgctgaccaaagttgagggcctggtcgtccacaccaacacaggcaaggcccccaagctggcctcctactacaaatactgggaaaagaaaatttatgaggtcctgacaaagctcatcctgaagaacttgcagtcttttaattctttgatccttggaaatgtccctctgttccacactgaaaccattctgacggcacctgagatcatccttcatcccaacacaaatgagatcgacaagatgtgcttccattgtgtccggaattgcgtggagatcaccaagcattttgttcgttggatgaatggcagctgcatagaatgcccacctcagaagggggaggaagaggaagttgttataataaacttttacaatgatatctctctgaaccctcagataattgaacaagctgttatgatcccccaaaatgtccacaggattctgatcaatcttatgaagtatctacaaaaatggaagcggtatcgacctctctggaaattggacaaagctattgtgatggagaaatttgctgccaagaaacctccttgtgtagcatatgatgaaaagttgcagttctattccaagatagcttatgaggttatgcgccaccctctaattaaggatgagcattgcatcagacttcagctcaggcatctggcaaacacagtgcaggaaaatgccaagtcctgggtgatttcgcttggaaaacttctcaatgagtcagcaaaagaggagctctataatctccatgaagagatggaggtactcaatcgctgtgtgtaa

SEQ ID NO: 128495 - DNA, 448 bp, Homo sapiens
  Payload ID: 5150
  Gene Symbol: DNAH10
  Gene Name: dynein, axonemal, heavy chain 10
  ENST ID: ENST00000538983
  CDS Start-End: 1-246
gaacgcttcaacaagcttgtggtccggatgacgaagtctctggctgaacttcaaagggccttggctggagaagttggaatgagcaatgagttagatgatgtggccaggtctctttttatcgggcatatccctaatatctggagaaggcttgctcctgacaccttaaagtcccttggaaactggatggtctacttcctgcggcggttcagccagtacatgttgtggctcttgttggatggttcttagaaaggctgaaaccacagtctatgagagtgcttctttcctcactccgctgcaatgctgcgttcttaacattttggatcactgtctccctgataggtgaccgagagcgagcccagcgtgatgtggctctcggggctgcacatccctgagtcctacctcacggcgctggtgcaggccacctgccggaagaacggctggccactgg

SEQ ID NO: 128496 - DNA, 1003 bp, Homo sapiens; identical to SEQ ID NO: 128493
  Payload ID: 5150
  Gene Symbol: DNAH10
  Gene Name: dynein, axonemal, heavy chain 10
  ENST ID: ENST00000631648
  CDS Start-End: 45-1003

SEQ ID NO: 128497 - DNA, 448 bp, Homo sapiens
  Payload ID: 5150
  Gene Symbol: DNAH10
  Gene Name: dynein, axonemal, heavy chain 10
  ENST ID: ENST00000631771
  CDS Start-End: 1-255
gaacgcttcaacaagcttgtggtccggatgacgaagtctctggctgaacttcaaagggccttggctggagaagttggaatgagcaatgagttagatgatgtggccaggtctctttttatcgggcatatccctaatatctggagaaggcttgctcctgacaccttaaagtcccttggaaactggatggtctacttcctgcggcggttcagccagtacatgttgtggctcttgttggatggttcttggaaaggctgaaaccacagtctatgagagtgcttctttcctcactccgctgcaatgctgcgttcttaacattttggatcactgtctccctgataggtgaccgagagcgagcccagcgtgatgtggctctcggggctgcacatccctgagtcctacctcacggcgctggtgcaggccacctgccggaagaacggctggccactgg

SEQ ID NO: 128498 - DNA, 9824 bp, Homo sapiens
  Payload ID: 5150
  Gene Symbol: DNAH10
  Gene Name: dynein, axonemal, heavy chain 10
  ENST ID: ENST00000631855
  CDS Start-End: 1-9591
gttgcaaaagaagaatggtctcagaccctttggatcaacctgaatgtgcagattctccaggaaggaattgaaggttttctcagggctctcagaaagctacctcggccagtccgtggcttatcagtgacctactacttggaagcaaaaatgaaggcattcaaagactcgattcctttacttcttgacttgaaaaacgaggcactaagagacaggcattggaaagaacttatggaaaaaacgtctgtcttttttgaaatgaccgaaacgttcaccttggaaaatatgtttgctatggaactgcacaaacacacagatgttctcaatgagattgtcacagcagcaatcaaggaggttgccattgagaaggctgtgaaggaaatcctagacacgtgggaaaatatgaaattcactgtagtcaagtattgcaaaggcacacaggagcgaggctacatcctgggttctgttgacgaaattattcagtctcttgatgacaacactttcaacctgcagagcatctcaggaagcagatttgtggggccttttctgcaaactgttcacaaatgggaaaaaacgctttctctaataggggaagtcattgagatttggatgttggttcagagaaaatggatgtatcttgaaagtatttttattggtggagatataagatcacaacttccggaagaggcaaaaaagtttgacaacatcgataaagtatttaaaaggatcatgggtgagaccttaaaagaccccgtgatcaagaggtgctgtgaagccccaaaccgcctcagtgacctacagaacgtcagcgagggcctggagaaatgccagaaaagcctcaacgactacttagattcgaagagaaatgctttcccaaggttcttcttcatttctgacgatgagttgcttagcattctggggagcagcgacccactctgcgtccaggagcacatgatcaagatgtacgacaacatagcatcactgaggtttaatgacggcgatagtggagaaaaactggtgtccgcgatgatttcagcagaaggagaagtcatggagtttcggaagatcttgcgggctgaagggcgcgtggaggactggatgacggcagttttgaatgagatgagaagaactaatagactaattaccaaagaggctatttttagatactgtgaagacagaagcagagtcgactggatgctcctgtaccagggcatggtggtgctggccgctagccaggtgtggtggacctgggaggtggaagacgtcttccacaaagcgcaaaaaggggagaagcaggccatgaagaactatggcaggaaaatgcaccggcagatcgatgagttggtaacgcgcatcaccatgccgctaagcaaaaacgacaggaaaaaatacaacactgttctcatcattgatgtgcatgccagagacatagttgattctttcataagaggcagtatcctggaggcccgagagtttgactgggaaagtcagttgcggttttattgggaccgggagccggatgagctgaacatccgccagtgcacgggaacctttggctacggctacgagtacatgggcctgaacggcaggctggtcatcacgcccctcaccgatcggatttacctgacgctcacccaggcgctgtccatgtatctaggtggggcccccgccggcccagcaggaaccggcaaaaccgagaccaccaaggacctggcgaaagccttgggcttgctctgtgttgtcaccaactgtggcgaaggcatggattacagggccgtggggaagattttctctggcctggcacagtgcggggcttggggctgctttgatgagtttaatcgaatcgatgcttctgtgctctccgtgatctcctcccagatccagacgatccgaaatgctctgatccatcagttaaccacgttccagtttgaagggcaggagatttccctggactcccgcatgggcatcttcatcaccatgaaccccggctacgcaggccgcacggagctgcccgagtcggtgaaggcgctgttcaggcctgtggtcgtgatcgtgcccgacctgcagcagatctgtgagatcatgctcttctctgagggcttcctggaggccaagactctggcgaaaaagatgacggttctgtataagctggcccgggagcagctgtccaagcagtatcactatgattttggactcagagccctgaaatcggtgctggtcatggctggtgagctgaagagaggctcctctgaccttagggaggacgtggtgctgatgagggccttgcgagacatgaacttgcccaaatttgtgtttgaagatgttcctcttttccttggtttgatttcggatctgtttcctgggctggactgccctcgcgtccgctaccctgacttcaacgatgcggtagagcaggtcctggaggagaacggctacgcggtcctacccatccaggtggataaagtggttcaaatgttcgagaccatgttaacccgccacacgacgatggtggtggggcccaccagagggggcaagtccgtcgtcattaacactctgtgtcaggcccagaccaagcttgggctgacgacaaagttgtacatcctgaaccccaaagccgtgagtgtcatagaactctacggcatcctggacccaaccacccgagactggacagatggggtgttgtcaaacatcttcagggaaatcaacaagccaacagacaagaaggagcgaaagtatattttatttgatggtgatgtggatgctctatgggtggaaaacatgaattctgtgatggatgacaacaggttgttgacattggccaacggggaacgcatccggctccaagcacactgtgccctgctctttgaggttggagatttacagtatgcctcccctgcaactgtctctcgatgtggaatggtttatgtggatcctaaaaacttgaaatatcgaccatactggaaaaaatgggttaatcaaataccaaacaaggtggagcaatacaatttgaatagtctctttgagaagtatgtgccctatctcatggatgtgatagtggaaggaattgtggatggaagacaagcagaaaagctgaagacaatagttcctcagacagacctcaatatggtaacccagttagccaagatgttggatgcgttgctagaaggagaaatagaagaccttgacctgctggagtgctacttcctggaggctttgtactgctctctgggagcctccctgcttgaggatggaaggatgaaatttgacgaatatatcaaacgccttgcttctttgtctactgttgacacagaaggagtttgggccaaccctggggaactgccaggtcaacttccaaccttgtatgactttcattttgataacaaacggaatcaatgggtcccatggagtaaattagttccagagtatattcatgcccccgagaggaaattcatcaacatcctggttcacacagtggataccactcggactacctggatattggaacaaatggttaaaattaagcaacctgttatttttgttggtgaatctggcacttctaagacagccactacccagaatttcctcaaaaatctgagtgaagaaactaacattgtgttaatggtcaacttctcctcccgcaccacgtccatggatatccaaagaaatttagaagcaaatgtggaaaagcgaaccaaagatacttacggcccacccatgggaaaacgcctgctggtgttcatggatgacatgaatatgccaagggtggatgaatatggcacgcagcagcccattgccttgctgaagctgctgttggaaaaaggctacttatatgaccgtgggaaggagctgaactgtaaaagcattcgagaccttggctttattgctgcaatgggaaaggctggaggaggccgcaatgaagttgacccaagatttatttcgctattcagtgtcttcaatgtgccatttccttcagaggagtctctgcatttaatttattcctccatcctgaaaggccacacctcgacgtttcatgagagcattgtggctgtgagtggcaagctgacattctgcacgctagcactttacaaaaatattgtgcaagacctacctcccactccgtcaaagttccattacatcttcaaccttcgagatctctcacgggtttttaatggtcttgtcctcactaacccggagcgattccagacggtggcccagatggtgagagtctggaggaatgagtgtctgagagtcttccacgaccggctgatcagtgaaacagacaagcagctggtacaacagcacataggcagcttggttgtggaacattttaaagatgacgtggaggtggtgatgagggatcccatattgtttggagacttccagatggctctgcacgaaggagaaccacgcatttatgaagacatccaggactacgaggcggccaaggctctgttccaggaaattcttgaagagtataatgaaagcaacaccaaaatgaacttggttctcttcgacgatgctctggagcatttaacccgggtgcaccgtatcatccgcatggaccgcggccacgccctgctggtcggggtagggggctcagggaagcagtctctttcgaggctggctgccttcacagccagctgtgaggtgtttgagatcctgctgagccgaggctactcggagaacagtttccgggaagacctgaagagcctctatttgaaacttgggattgagaacaaagcgatgatctttctgttcacggatgcccatgtggctgaggagggcttcctggagctcatcaacaacatgctgacctcaggaattgtacctgcgcttttttctgaagaggagaaagagtctatcctgagtcagattggacaggaagctctgaagcaaggcatggggccggccaaggagtctgtgtggcagtacttcgtgaacaaaagtgcaaataacctgcacattgtcctgggcatgtcgccagtgggggacaccctgaggacctggtgcagaaacttcccaggtatggtaaataacactggtattgactggttcatgccctggcctccccaagccctccatgcggtcgcaaagtcctttctagggtataatccaatgatcccggcagaaaatatagaaaatgtggtgaagcatgttgtcttggttcaccaatccgtggaccactacagccaacagtttctacagaaattgaggcgcagcaactatgtcactcccaagaactaccttgattttattaacacctattcaaaattgctggatgagaaaactcagtgtaatatagctcagtgcaagcgtctggatgggggactggacaagctgaaggaggccaccatccagctggacgagctgaaccagaagctggccgagcagaagatcgtgctggcggagaagtccgccgcctgcgaggccttgctggaggagatcgccgtcaacaccgctgtagccgaggagaagaagaaactggcagaggaaaaggccatggagatagaggagcagaacaaagtcattgccatggagaaggccgaggccgagacgaccctggcagaggtcatgcccatcctggaggccgccaagctggaactgcagaagctggacaagtcggacgtgactgagattaggtcgtttgctaagcccccgaagcaggtgcagacggtctgcgaatgcatcctcatcatgaaagggtacaaagagctgaactggaaaacagccaagggcgtgatgtccgacccgaatttcctgcggtctctgatggagattgattttgattcgattacccagagccaagtgaaaaacatcaaaggcctcttgaagactcttaataccacaactgaagaaatggaagctgtcagcaaagccgggctggggatgctgaaatttgttgaagctgtaatgggctactgtgatgttttcagagaaatcaagcccaaaagagagaaggtggccaggctggagcggaatttttacctcactaaacgggaactggaaaggatccagaatgagttggcagcaattcagaaagagctggaaacattgggtgccaaatatgaggccgccatactggaaaagcagaagctgcaggaagaagccgagatcatggagaggcggctgattgccgcagacaaactcatctcgggtctggggtcagaaaacatcaggtggctgaacgacctggatgagctgatgcaccggcgcgtgaagctgctgggggactgcctgctctgcgcggctttcctcagctacgagggagccttcacctgggagttccgtgacgagatggtcaatcggatttggcaaaatgacatcctggagcgggagatccccctgagccagcctttccggctggaaagcctgctcacggatgatgttgagatcagcagatggggatcccagggccttccccccgatgagctctccgttcagaatggcatcctcaccacccgggccagccgcttccctctgtgtatcgacccccagcagcaggccctcaactggatcaagagaaaagaggagaagaacaatctgcgggtcgcttcctttaatgaccctgacttcctcaagcagctagagatgtccataaagtacgggacccctttcctgttccgcgatgttgatgaatacatcgatcctgtgattgacaacgtcttagaaaaaaatataaaagtctcccaaggacggcagtttattatcctgggagacaaggaagtggactatgattcaaatttcagactgtacctgaacaccaagctggccaatcccagatattccccatccgtgtttgggaaagctatggtgatcaattacactgtcacgctgaagggcctggaggaccagctgctgagcgtgctggtggcttacgagaggcgggagctggaggagcagcgggagcacctcatccaggagaccagcgagaacaagaacctgctcaaggacctggaagattccctccttcgggagctggccacgtccacggggaacatgctggacaatgtggacctggtgcacaccctggaggagaccaaatccaaggcaacagaggtctcagagaaactcaagctggcggagaagacagccttggacatcgacaggctgcgggatggctaccggccagcagccaggaggggggccatcctgttcttcgtcctgtctgagatggccctggtgaactccatgtaccagtactccctgattgccttcttagaggtcttcaggctgtcactgaagaagtcgctgcctgattccatcctcatgaaacgcctgaggaacatcatggacacgctgaccttcagcatctataaccacggctgcacagggctgtttgagaggcacaagctactcttttcttttaatatgaccatcaagatagaacaagcagaagggagagtccctcaagaagaactagatttctttttaaaaggaaacatttccctggagaaaagcaaaagaaaaaagccctgcgcttggttgtctgaccaaggatgggaagatatcattcttttatcagaaatgttttcagacaactttgggcaacttcctgatgatgttgagaataatcagactgtctggcaggagtggtatgacctggattcactggagcagtttcccgtccccttgggttacgataacaacatcacccctttccagaagttgcttattttgcgctgtttccgtgtggatcgggtctatcgggccgtgactgactatgtgactgtaacaatgggagagaagtatgtgcagcccccaatgatcagctttgaagctatttttgagcagagcactccacattcgcccattgtgtttatcctgagtcctggctccgaccctgccactgatcttatgaaattagcagagcgaagtggttttggaggaaatcgcctcaaattccttgcaatgggtcaaggtcaagaaaaggtggccctgcagctgctggagacggcggtggctcgggggcagtggctgatgctgcagaactgccacctcctggtcaagtggctgaaagatctggagaagtccctggagaggatcaccaagccccacccagacttccgcctgtggctcaccacggaccccaccaagggcttccccattgggattctgcagaagtccctaaaggttgtcaccgagccacccaatgggctgaaactcaacatgagggcaacttacttcaagatctctcacgaaatgctggaccagtgcccgcaccctgccttcaagccgctggtctacgtgctggcgttctttcatgctgtggtgcaggagagaaggaagtttgggaagattggctggaacgtgtactatgacttcaatgagtctgacttccaggtctgcatggaaattctgaacacgtacttaacgaaagccttccagcaacgggacccaaggatcccgtggggcagcctcaagtacctaattggagaggtcatgtatggaggacgggccatcgacagctttgatcgccgcatcctgaccatctacatggatgagtacctgggggacttcatttttgatactttccagccattccacttcttccggaacaaggaagtggactacaaaatccctgttggtgatgaaaaggagaaatttgttgaagccatcgaggccctcccgcttgccaacacgccagaagtgtttggtctccaccccaacgctgagattggctattacacgcaggcggctcgagacatgtgggctcacctgctggagctgcagcctcagacaggggaatccagcagtggtatcagccgcgatgattatattggccaagtggccaaagaaatagaaaacaagatgcccaaagtctttgacttggaccaggtgaggaagcgcctcggaacaggactctcccccacttcggtggtgctcctgcaggaactggaacgcttcaacaagcttgtggtccggatgacgaagtctctggctgaacttcaaagggccttggctggagaagttggaatgagcaatgagttagatgatgtggccaggtctctttttatcgggcatatccctaatatctggagaaggcttgctcctgacaccttaaagtcccttggaaactggatggtctacttcctgcggcggttcagccagtacatgttgtgggtgaccgagagcgagcccagcgtgatgtggctctcggggctgcacatccctgagtcctacctcacggcgctggtgcaggccacctgccggaagaacggctggccactggaccgctccaccttgttcacacaagtgaccaagttccaggatgcagatgaagtgaatgagcgggcgggacaaggatgctttgtctcaggactgtacctggaaggtgctgactgggatatagaaaaaggatgtcttatcaagagcaaacccaaggtgctggttgtggacctgccgatcctgaagatcatccccattgaagcccatcgcctcaagctgcagaatactttccggacccccgtctacaccacctccatgagaaggaacgccatgggagtcggcttggtttttgaagctgatctctttaccacgaggcacatttctcactgggtgctgcaaggagtatgcctcaccctgaattctgattaacctttgggtgaagaaaactgcttaatgaattcggagcctggggttgtcagagtgatcgggtctgctgtcatttcttggggcctctcaagaggcaggagggggactgacactgatttttcatttgaaatcagccacttaaatctctttccatacaaattaacctgaatggttttgtttttaatactactttttaaaaggaatttatataatcaaaaagtaaatattggagagta

SEQ ID NO: 128499 - DNA, 3890 bp, Homo sapiens; identical to SEQ ID NO: 128492
  Payload ID: 5150
  Gene Symbol: DNAH10
  Gene Name: dynein, axonemal, heavy chain 10
  ENST ID: ENST00000632605
  CDS Start-End: 1-1947

SEQ ID NO: 128500 - DNA, 5040 bp, Homo sapiens
  Payload ID: 5151
  Gene Symbol: DNAH10OS
  Gene Name: dynein, axonemal, heavy chain 10 opposite strand
  Uniprot ID: P0CZ25
  ENST ID: ENST00000514254
  CDS Start-End: 402-893
cacctctggaaggaccggcatccacacacacatacagccgcgccttttccaggaagcagctatccgtagcttttatcacggctccaagactctccccagcccataaagcttaggcacccctgttttaaaaagtaggactgttggaaaccacctcagccataactacagtcagaagaggaagggccctggtgtcagagaggaggggctgggaccttcacctgcagcttgaggcgatgggcttcaatggggatgatcttcaggatcggcaggtccacaaccagcaccttgggtttgctcttgataagacatcctttttctatatcccagtcagcaccttccaggtacagtcctgagacaaagcatcctagggacacaaggcagagactggatacaactggagcatgcacagcctgccacggagtggctctatcaggcgcacacacagcgacacacaggccactggctggcctcctccccagcgcattggggacagcccaggcccttctccagcatttctgtcctgcccaccttccctctgtggaggagcagcccagacaggagaccctgtggccctgccccatggcccagagaaatgggtgtggggcggtggcctctcccccaggaatcctcattcctggggcatcaaggcccacggacttagaccaccctgggcccccaggctagaaagatgcatggtcccagagtcagaatgggcaccatggcaaccccagctaccctgtgagccgaagtggctggggagcaggaagtcgaagcctcacagagaaagtggtctccggggaggaggacccagcagatgtgcaaagagaggaacacactcctgtggccccagagagagtggtggcccggacacctgccacctcccctgccactgagacctggagagtccctgcatctttaccggattttgtagtccacttccttgttccggaagaagtggaatggctggaaagtatcaaaaatgaagtcccccaggtactcatccatgtagatggtcaggatgcggcgatcaaagctgtcgatggcccgtcctccatacatgacctgaaattagagggcctgagagccagccaggagctcagaacctactgtgtgcaccctgggggcccggggccagaggctcacccagggtcaagagactccagcagcctggctgctgcaaggcttgaacctgttgacttgcataacctttcgggccactgttcacacaattgatctgtggctttgctggcttcccaagggatagggcccaaagcagtaagaagccctcaggaagtgttgggagctcctgtgcagcaggcaaagtcccccaaacacatcaaacaaacagctgaagaagccagcagctgcttctgtctttggaattgatgtcactgcctgagccgtgtgcagaccaccggggatgcttcctgtgagctctgtatacagcaacagctgaggcaaggggctagaggatgccttgcctggatccccagccatggatccagctcagggaacctccatgtgaacagagctcacttaggacaaagaacaaccaggtgagagcagagagaattgtcacagaaacccaaggggaacacaggggcagaagaggctggttctgagggctcagaggaaaataggggcacgaggccacagctctgtagccccagaggcacctgcggaaggatccccggtcacccctacctctccaattaggtacttgaggctgccccacgggatccttgggtcccgttgctggaaggctttcgttaagtacgtgttcagaatttccatgcagaccttgaaagaagagaacacgctcagttatactgaaacccaccaagctgttcacattctgatacttttctgaaaaggctgctgggaacggtgcaaccctgctgtggttgaacccggaggaaagtcgggaggaagtgggccgcctaaggaagccatttccaaggagaagcagccactgtcacctggaagtcagactcattgaagtcatagtacacgttccagccaatcttcccaaacttccttctctcctgcaccacagcatgaaagaacgccagcacgtagaccagcggcttgaaggcagggtgcgggcactggtccagcatttcgtgagagatcttgaagtaagttgccctcatgttgagtttcagcccattgggtggctcggtgacaaccttcagaagagaagaaaacacacagtgatggagaccgcaggcccacaagcttggaagagtgtgcacaatgcaggcactgcgctttccttcctctctacggagccatctgtctgagacctccaatagctaaagtctcttgtccagggcccaggctgagaagttaaaggactagatgttctggctctcagggtcaagggtcaagagtctttgaccttcctctgaaccatgagatcctttactatatataaaatgaaagtaaagtcttccctccacctccccagagagagagagagagacagagaatgacaaaacctttccaaaagaatttcccggagaataaattaaatggggcatgtaaaccacgcgaaactcctgcagtcagcactagcgaactgcaggctgtgtgtgggggggggggccgtgaagtttatgaaaagtagcgtagatattgttagggacacatgcagaattggtagagataggcctgggagtcacaaacacccaacccaggacagcggctccctctaaagagagaggtgggattgagaagggtttcaaccgcaaggtttcacctgcagcctaaggtttatttctacacagacaaaggcacaccccggccccagagcagcatgcaggtgttctgagaagctgcgtgctggcatgttgatgtccatcctgaagccagacctttagggacttctgcagaatcccaatggggaagcccttggtggggtccgtggtgagccacaggcggaagtctgggtggggcttggtgatcctctccagggacttctccagatctttcagccacttgaccaggaggtggcagttctgcagcatcagccactgcccccgagccaccgccgtctccagcagctgcagggccacctgcgccgggggagagggaagaggagaggggttggcatccaaacccaaccccgtgctctccagagacccactccacacccacagaagggcgatggcagctccagcagaagccaaaagcaagccgaggatccaggagctacaggtggagccttcaaataaaccatctttgagaaaccccatgggccccgtgggtgcactgagctggtcacacccagcctggaagatgggtgagcattttgcactcatctgcctccctggccctggaagtcccagctcctcccacacagtcgctcctgtcccctgaggactcctgagcagggctgcaagagaccagctaaagcccaccaggaagtcgggactgtcctggccactgtaagatcttcagggccctaggcctggaaaacaatcaccatgtcccctcccaaatgtaattcaaagcacaaacaagctaaacacccaaatcaagccttgctttctgaaatggcttaaaacacatgagtgctggcgttacaatagcttatttcagtgttgtggttgagagagctggcccgccttgctggtgcccagggcttgcctcctgggccatccagcatgggtattgccatcctcatctcacccaggggctttcagcagtagaggggcttacccaaagcctcacagttcatagcaaagccaggactggcagtcagctccctctgaccccaacacgcatgcctgcaaccatcacacttactgacgcacagacttttcctgcaagctttgtcccacattgtactgaacttgtgtagcaagttctagcagggagcactgtgatgcagagaggcaagacctcagcaaagaaagctcactggctcagaaaggtaggaggatttgcaccacagttctgtcctgaatggtcctgggctcagcctctctccacccactcccttggccatgcaattggggccataataatcctgatccacaatgaggctgttcagggactaaggaaggtaaggactgtgtgtgaaagggctttgaaaacagcacagcctgagcatcgtgtctcatgcctgtgatcccaacactttgggaggccgaagtggaaggatcgcttgagcccaggagttcaagaccagccagggcaacatggtgacgtgtttgtatttttctctacagaaaataccaaaaaaattagccaggcatggtgacgcatgcctgtagtctcagctgctactggggaggctgaggcaggacgatcacttcacaatcaggaggtcgaggctgcagtgagctatgttcgcaccactgcactccagcctgggtgacagagtgagaccctgtctcaaaaagaaaagaaaaaggaaaaaaaaagaaaacagcacagcaccatgatcacaacatgaggttgtgaaatcataactattattgtcatcttcccagtgtttcattactgcttcttagctcggaaatgcatccaactgatttgtggcgtggcactcagcttaaacccaggttagctccttcttagcagacaccagggacctcccctaaacgtagagcttgttcctttcagccacaaattaccttttcttgaccttgacccattgcaaggaatttgaggcgatttcctccaaaaccacttcgctctgctaatttcataagatcagtggcagggtcggagccaggactcaggataaacacaatgggcgaatgtggagtgctctgctcaaaaatagcttcaaagctgatcattgggggctgcacatacctggtgaaagaaacacagtcagaaaactctcccgcgaggacagctccagaccaggggctggtctgtctgatcagcgctgcctcctccggtgtccagaaccttctgaccactcctctgggatagctcgttgcagtcttccctgttttagattctagtttctatgcacgtctcccaccctgatggggaactcctgagtggcagggacttctctgt

SEQ ID NO: 128501 - DNA, 13917 bp, Homo sapiens
  Payload ID: 5152
  Gene Symbol: DNAH11
  Gene Name: dynein, axonemal, heavy chain 11
  ENST ID: ENST00000328843
  CDS Start-End: 32-13603
ccggcctcgcgttccctcggacggttgcccaatggcagcccaggtggcagcccgggaggcgcgagacttcagagaagccccgacccttcgcctaacctcgggggccggcctggaggcagtgggcgctgtggagctcgaggaggaggaggagaacgaggaggaggcggcggccaggagagcgcggagtttcgcccaagacgcgcgggtgcgcttcctcggcggccgcctggcgatgatgctggggttcacggaggagaaatggagccagtatttggaaagcgaggacaaccggcaggttcttggggagtttctggaaagcaccagcccggcttgccttgtgtttagcttcgccgcctcggggcgccttgcggcttcccaggagattccaagagatgcaaaccataaacttgtttttatttccaagaagattactgaaagcattggagtaaatgacttttctcaagtggttttatttggagagttacctgcgttgtctcttggacatgtatctgctttccttgatgagattttagtgccagttctttctaataagaacaaccataagtcctggtcctgttttacttcacaagatatggaatatcacatagaagtcatgaaaaagaagatgtatatttttaggggcaaaatgtctagaagaactcttctaccaattcccactgttgcaggaaagatggatctggatcagaattgttcagagaacaagccaccgtcaaacgaaaggataatacttcatgcaattgaatctgtggttattgaatggtcacatcaaatccaagaaattatagaaagagattcagtgcagcgtttgttgaatggtcttcacttgtctcctcaagcagaactagatttctggatgatgaggagagaaaatctgtcatgcatttatgatcaacttcaggcacctgttgtcctcaaaatggttaagatcctgacaactaaacaaagcagctattttcctactctgaaggacatttttctggctgtggaaaatgctcttctcgaagcccaagatgtggaactttacctgagacctctgaggagacacatccagtgtctccaggagacggaattcccacagacacgcatattaatcgctccattatttcataccatctgtctgatctggagtcattccaagttttataacaccccagctcgggttatagttttattgcaagagttttgtaatctcttcattaaccaggcaacagcttacctttcacctgaggaccttttgaggggagaaatagaagagtcactggaaaaggtgcaggtggctgttaacatcttaaagactttcaaaaactcctttttcaactatagaaaaaaattggcaagctactttatgggaagaaagctgagaccatgggatttccagtctcatctggtgttttgcagatttgacaagtttcttgatcgtttaataaaaatagaggatatatttgccaccactttggaatttgaaaagctggaaagactggaatttggtggtaccaaaggagcaattttaaatggacaagtccacgagatgagtgaagaacttatggaactctgtaaactttttaaacagagcacttatgacccatctgattgcactaacatggagtttgaaagtgattatgtggcatttaagtccaaaactctggaatttgacagaaggcttgggacaattatttgtgaagctttctttaactgcaatggcttagaagctgcatttaagcttttgaccatatttggaaattttctagagaagccagttgtcatggaaattttcagcctacattacagcacactagtgcatatgtttaatacagagctggatgtgtgtaagcaactgtataatgaacacatgaaacagattgaatgtggtcatgtagttcttaacaagaacatgccatttacctcaggaaatatgaaatgggcccagcaggttctccaacgacttcaaatgttttggtcaaacttcgcatctctccgttatctatttttgggcaatcctgatcacgctttagtttatcaaaagtatgttgaaatgaccactttgcttgatcaatttgaaagtcgtatctataatgaatggaaaagtaatgtggatgaaatctgtgaattcaatttgaatcaacccttggttaaattcagtgccataaatggtcttctctgtgtcaattttgacccaaagctagtggctgtattgagagaagtgaaatatcttttgatgttgaagaaacaagacataccagattcagctttagccatcttcaagaaaaggaacactattttaaagtacattggaaatcttgaccttcttgtgcaagggtataataaactcaaacagacgctcctggaagttgaataccctctgattgaagatgagctgagggctattgacgagcagctgacagcagccacaacgtggctgacatggcaggatgactgctggggctacatcgagagggtgagggcagccacgtccgagttggagcacagagttgagcgcacacagaaaaacgtgaaggtgatccagcagaccatgaggggctgggccaggtgcgtgctacctcccaggagagagcacagacgagaggcagccttcaccttggaggacaagggtgatttgtttacaaaaaaatacaagttaatccaaggagatggctgcaagatccacaacttggtcgaggaaaataggaagctcttcaaagccaatccctctctggatacctggaaaatttatgtagaattcattgacgacattgtggtggaaggcttttttcaggctataatgcacgacttagacttctttctgaagaatacagagaaacaattgaaaccggcaccgttttttcaagcacaaatgatcttgttgcctcctgagattgtgtttaaaccttccctagacagagaggctggggatggcttctatgatcttgtagaagaaatgttatgcaatagttttagaatgtctgcccagatgaaccgaatagcaacacacctggaaattaaaaattatcagaatgatatggataacatgttaggcctggcagaggtcaggcaggagatcatgaacagagtggtgaatgtcatcaacaaagtcttagatttcagaaacaccctggagacccacacttacctctgggtggatgatcgagctgagtttatgaagcattttctcttgtatggccatgctgtgtcttccgatgaaatggatgctcatgcaaatgaagaaattcccgaacaaccaccaactcttgagcaattcaaagaacagattgacatttatgaagctttgtatgttcaaatgagcaaatttgaggactttagagtgtttgatagttggttcaaggtggacatgaagcctttcaaagtgagcttgttaaccataattaagaaatggagctggatgtttcaggagcatcttttgagatttgtcattgacagtctgaatgagctacaagaatttataaaggagacagattccggacttcagagagaattaaatgaaggtgatcatgatggtttagttgacatcatggtgcatcttctggctgtaagaagccgacagagagctactgatgaactctttgaacctctaaaagaaacgatcaccctcttggaaagctatggccagaagatgcctgagcaggtctatattcagctagaggaattacctgaaagatgggaaactaccaaaaagatcgcagcaactgtcagacatgaagtctcacctctccataatgcggaagtcactcttataaggaaaaaatgtattttgtttgacgcaaagcaggcagagttcagagagagattcagacactatgcccctcttggatttaatgcagaaaatccatacacagcgcttgataaggcaaatgaagagcttgaggccttagaagaagaaatgttgcagatgcaagaatctactcgtctttttgaagtggctcttccagagtacaaacaaatgaaacagtgtcgcaaagaaataaaattgctcaagggactgtgggatgtcattatttatgttcgaagaagcattgataattggactaaaacccagtggagacagattcatgtggaacagatggatgtagaactcagaaggtttgccaaggcgagttccataactgaaatttggtcactcaacaaggaagtccgcgtctgggatgcttacacgggcctggaaggcacagttaaggacatgacagcctccctgagggccatcacagagttacagagccctgccctcagggacaggcattggcaccagctgatgaaagctattggggtcaagtttttaataaatgaagccacaactttggcagatttgttagcactgcggttacacagagtggaagatgatgtccgaaggattgtggacaaggcggtgaaagagctggggactgagaaggttattactgaaatcagtcagacctgggcaaccatgaagttttcttacgaagttcactatcgaacaggcattccattactaaagtctgatgaacaactttttgaaactctagagcacaaccaagttcagttgcagactcttcttcaaagcaagtatgtagaatatttcattgagcaagtgttaagctggcaaaataaattaaacatagcagacttggtcatcttcacttggatggaagtccagcgaacttggtctcacctggaaagcatttttgtctgttcagaagatattcgaatccagcttgtgaaagatgctagaagatttgatggggtggatgctgaatttaaggagttaatgttcaagacagccaaagtagaaaatgtgttagaagcaacgtgcagacctaatctctatgaaaaacttaaagatttacagtccaggctttctctttgtgaaaaagctctcgctgaatacctggaaaccaagcgcatagcctttcctcgcttctatttcgtctcttctgctgatttacttgacattctctcaaaaggagctcagcctaaacaggtaacatgtcaccttgccaaacttttcgacagcattgcagatctgcagtttgaagacaatcaggatgtttctgcacacagggcagttggaatgtacagcaaagaaaaggagtatgtcccattccaagccgagtgtgaatgtgtgggccatgtggaaacatggcttctgcaacttgaacagactatgcaagaaacggtgcgtcattctataacagaagccatagtggcctacgaggaaaaacctagggaactgtggatttttgatttcccagctcaggttgcactaaccagctcacaaatatggtggaccacagatgtaggaatagccttcagtagactggaagaaggctacgaaacagccctgaaggatttccataaaaaacagatttctcagctgaatacactgattacacttttgctgggagaacttccacctggagacagacagaagatcatgacaatttgtaccatagatgtccatgccagagacgtggtggcaaaacttatttctcagaagaaagtggttgtcagtccccaagcttttacatggctgtctcaacttcgtcaccgatgggaggatacccagaaacactgctttgttaatatttgtgatgcccagttccagtacttctatgaatacttaggaaacagccctcgactagtgatcactcctctaactgacaggtgttatattaccttaactcaatcacttcatctaaccatgagtggggctcctgctggcccagctggtaccgggaaaacagagaccaccaaagacctaggacgtgcccttggcatgatggtctatgtattcaactgttcagagcaaatggactacaaatccataggcaatatctataagggattggtgcagacaggagcttggggctgctttgatgagttcaaccgaatctctgtggaagttctgtcagtggtggcagtacaagtgaaaatgattcatgatgccatcagaaacaggaagaagagatttgtatttcttggggaagctatcacactgaagccatcagttggaatatttattactatgaacccgggttatgctggtcgaaccgaattaccggaaaatctcaaagctcttttcagaccctgtgccatggtggcccctgacattgagctaatctgtgaaatcttgttagttgctgaaggttttgtggatgcgcgtgcattagcccgaaagttcattacgttgtacacgctttgcaaggagcttctctccaagcaggatcattacgactggggacttcgtgctattaagtctgtcttggttgtggctggatctctgaaacgaggagataaaaatagacccgaagatcaggtactcatgagagcattaagggatttcaatatgcccaaaatagtgactgacgacatcccagtgtttctgggcctggtcggtgacctgtttccagccctggatgtgccccggaggaggaagctgcactttgaacagatggtcaggcagtctaccctggagctccgcctgcagcctgaagagagcttcatcctcaaagttgtccagcttgaggaactgttggctgtgcggcactcggtctttgtagttggaaatgcaggcacaggaaagagtaagattttgagaacactgaaccgaacatatgttaacatgaaacagaagccggtttggaatgacttaaaccctaaagctgtgacaacagatgaactctttggtttcatacatcatgctacccgagaatggaaagatggcaagattgtttactcttattttataggtctcttctcatccattctacgagaacaagcaaatcttaagcatgatggaccaaaatggatagtcctggatggcgatattgaccccatgtggattgaatcactgaatactgtaatggatgataacaaggtgctgaccctcgccagcaatgagcgcattgcactcactcccttcatgaggcttctgtttgagatacatcacttaaggagcgcaaccccggccactgtttccagagctggtattctgtatgtgaacccacaagatctgggctggaatccgtatgtggccagttggatagacagaaggcggcatcaatcagaaaaggccaatttgactattctttttgataaatatgtccctgcatgcttggataaactgagaacaagctttaaaaccatcacttcaattcctgagagtagcctggtgcagactctatgtgttcttttggagtgcttgctgactcctgaaaatgtaccttctgacagcccaaaagaagtttatgaagtctattttgtatttgcttgtatctgggcttttggaggcaccctgctacaagatcagatttctgattatcaagctgacttcagtcggtggtggcagaaagagatgaaagcagtgaaatttccgtcgcagggaacaatctttgattattatgtggaccacaaaactaagaaattattgccctgggctgacaaaattgcccagtttactatggatccagatgtgcctctgcagacagttctcgttcacacaacagagacagctcgtcttagatatttcatggagttgttgcttgagaaaggaaaacctctaatgctagtaggaaatgcaggagtgggaaaaacagtctttgtaggtgacacattggcaagtctctctgaggattacatagtatcccgtgtgcctttcaactactacacgacatccacagctctgcaaaaaattcttgagaaacccctagagaaaaaagctggtcataactatggtcctggaggaaataaaaaattgatttattttatcgacgacatgaacatgcctgaagtggacttatatggcaccgttcagcctcacaccctgatccggcagcatattgattatggacattggtatgatagacagaaggtgatgcttaaagaaatccataactgccagtatgtcgcctgcatgaatccgatggtgggcagcttcaccatcaatcccaggctacagagacatttcacagtgtttgcattcaattttccatctttggatgcactaaacaccatctatggccaaatctttagcttccatttccaacagcaagcatttgctccatcaattctcaggagtggccccactttgatccaggcaacaatagcattccatcagacaatgatgtgtaactttttacccacggctattaaattccactacatctttaatctgagagatttatcaaacgtcttccaggggattttatttgcttctcctgagtgtttaaaaggtccacttgatttaatacatctgtggcttcatgaatctgcccgtgtttatggagacaaactgatagacaaaaaagattgtgatttgtttcagagaagaatgctggaaactgcttataaatattttgaaggtatagatagtcacatgctgcttcaacagcccctcatttattgccactttgctgatagagggaaggacccacattacatgccagtgaaggactgggaagtgctgaagacgattcttacagaaacgttagacaactacaatgaactaaatgctgccatgcacctagttttgtttgaagatgccatgcaacatgtgtgtcgcatcagccggatcttacgaacccctcagggctgtgctctcttggttggagttgggggcagtggcaagcagagcttgtccaggctggcagcttaccttcgtggccttgaggtctttcagatcactctgaccgagggctatggaatccaggaacttcgggtagatcttgccaatttgtacatccgaactggagccaagaacatgcccactgtgttcctgctgacagatgcccaggttctagatgagagcttcctcgtgctgattaatgacttgctggcatcaggagaaatcccagatctgttcagcgatgaagatgtggacaagataatttctggaattcataatgaagttcatgctctgggcatggtagactccagggaaaactgttggaaattctttatggccagggtgcgactacagctcaaaatcattttgtgtttctctccagttggtcgcacgctgagagttagagctcggaagttcccagccatagttaactgcacggctattgactggtttcatgcgtggccgcaggaggctctggtctccgtcagcaggaggttcattgaggaaaccaagggaattgagccagtgcacaaagactctattagccttttcatggcacatgttcacaccactgtaaatgaaatgagtaccagatattaccagaatgagagaagacacaactataccaccccaaagagttttctagaacaaatatcactgtttaagaacctgttgaagaagaagcaaaatgaggtatccgagaaaaaagaacgcctggtgaacggcatccaaaagctaaaaaccacagcctctcaggtgggagatctaaaagccagacttgcctctcaagaagccgagctgcaactgagaaatcatgatgccgaagctctgatcacaaagatcggccttcagacggagaaagtgagccgggaaaagaccatcgctgatgctgaggagcgaaaggtgacagccattcagactgaagtgttccagaaacagagagaatgtgaagctgacttactcaaggctgagcctgcactggtggctgctacagctgcactcaatacactcaacagggtcaacctcagtgagctgaaagcctttcccaaccctcccatcgcagttaccaatgttactgcagccgtgatggtccttctggctcctcggggaagagtgcccaaagaccgaagttggaaagcagctaaagtcttcatgggaaaggttgatgattttttgcaagcattaattaactatgacaaagagcacattccagagaactgtctaaaagtggtgaatgaacactatttgaaagacccagagtttaatccaaacctgattcgaaccaaatcttttgcagcagctggcctgtgtgcctgggtcatcaacatcattaaattctatgaggtctactgtgatgtggagccaaaacgccaagcattagcccaagcaaacttagaactggctgcagctactgaaaaactagaggctatcaggaaaaagcttgtggatctggatcgaaatctgagcagactcacggcttcatttgaaaaagcaacagctgagaaagtccggtgtcaagaagaggtgaaccaaaccaacaaaaccatcaaattagctaacagacttgtcaaggaacttgaggcaaagaagattcgctggggtcaatccattaagtcctttgaagctcaagagaagacactctgtggagatgttcttctcacggcggcatttgtgtcttacgtcggacccttcacaaggcagtatcgccaggagctggtgcactgcaagtgggttccctttcttcaacagaaggtttccattccactaaccgaaggcctggacttgatatccatgttgacggatgatgctacaattgccgcctggaataacgaaggactgcccagtgacagaatgtccaccgaaaatgccgctatcctaacacactgtgagcgctggcctctggtgatagatccccagcaacagggaattaagtggatcaagaataagtatggaatggacctgaaagtcacacatttgggccagaaagggtttttgaatgccattgaaactgctttggcctttggtgatgtcatcttaattgaaaatctcgaggaaacgatagatccagtcctggatccactacttggcaggaacacaattaaaaaaggaaagtatatcaggattggagataaagaatgtgaatttaacaagaactttcgccttatccttcacacaaaattggcaaatcctcactataagccggaattacaagctcagacaactctcctcaatttcacagtcacagaagatggtctagaagcccagctgctggcagaggttgtcagtattgaaaggccagatttggagaaacttaagttggtattgacaaagcaccaaaatgattttaaaattgagctcaagtatctggaagacgatctccttttgcgcctttctgcggcagagggaagctttctggatgacaccaaactggtagagagattggaggcaacaaagaccaccgtggcagagatagagcacaaggtgattgaagccaaagaaaatgaaagaaaaatcaacgaggcccgagaatgttacagaccagtggcagcaagagcatctcttctttattttgttattaatgacctccaaaaaatcaaccccctctaccaattctctttgaaggcttttaacgtgctgttccacagagcgatcgagcaggctgacaaggtggaagacatgcagggacgcatctctatcctgatggagagcatcacccatgctgtcttcctctacaccagccaggcgctgtttgagaaggacaagctcaccttcctgtcccagatggcttttcagattttgttgagaaagaaagagatagaccctcttgaattggatttcctgcttcgattcacagttgaacacactcatctgagtcccgttgacttcctaacttctcagtcatggagtgctatcaaggcaattgccgtcatggaagaatttcgaggcatagaccgagatgtggaaggatctgccaagcagtggaggaagtgggtagaatccgagtgtccagaaaaagaaaaattacctcaagaatggaagaagaaaagtttaatacagaagctgattcttctgagagcaatgcgccctgacagaatgacgtatgctctcagaaattttgtagaggaaaaactgggtgcgaagtatgtggagaggaccagattggacttagttaaagcattcgaagaaagcagcccagccacccccatattcttcatcctgtctccgggggtagatgcccttaaagacctggagattcttggcaaaagacttggctttacaattgactctggaaaattccacaatgtgtctttaggacaaggtcaggagacggtggcagaagtggccctggagaaagcttccaaaggaggacactgggtcatcctccaaaatgttcatttggtagccaagtggctaggaaccttggagaagctccttgaaagattcagccaaggaagccacagagattacagggttttcatgagtgctgagtctgcacctacaccagatgagcatatcatccctcaaggactcctggaaaattccattaagatcactaatgaacccccaacagggatgctggccaatttgcatgccgccctgtacaactttgatcaggatacacttgaaatatgctccaaggagcaggagtttaaaagcatccttttttctctctgctacttccacgcctgtgttgctgggagactgaggtttggcccccagggctggagccgaagctatccttttaatcctggagacctcaccatttgtgccagtgtcctctacaactacttagaggcaaactctaaagtcccatgggaagatctccgttatctctttggtgagatcatgtatggaggccacatcacagatgactgggatcgcaaactgtgtcgggtgtatttagaagaattcatgaatccatctctgactgaagatgaactgatgctggcaccaggttttgctgccccaccctacctagattatgcaggctaccaccagtacatagaggagatgcttcctccagaaagcccggcactgtatggcctccacccaaatgctgaaatagaattcctgacagtgacatccaacactctcttcagaactttgctggagatgcagcccaggaatgcactcagtggtgatgaactggggcagtctacagaagaaaaggttaagaatgtcttggatgacattttggagaaacttccagaagagttcaacatggcagagataatgcaaaaaaattcaaatagaagcccatatgttcttgtttgcttccaagaatgtgagaggatgaatattctcattcgggaaatacgtatatcacttgaacaactggaccttagtttgaagggggaattggcattatctcctgctgtggaagcccagcagtttgcattgagttatgacacggtaccagacacttggagcaaactggcttatccttctacttatggcctagcccagtggttcaatgacctcctcctgcgatgccgagaactcgatacttggacacaagaccttacccttccggctgtcgtgtggctctccggcttcttcaaccctcagtccttcttaactgcaatcatgcagacgatggctcgaaaaaatgagtggcccctggataaaacgcgcttgactgctgatgttaccaaaaaaacaaaggaagattatggacacccgccaagggaaggtgcatacctccacggactcttcatggagggcgcccgctgggacacccaagcaggaaccattgttgaagcccgtctcaaggagctggcatgccctatgccggtcatctttgcaaaagccacccccgtggacagacaagaaaccaaacagacctacgagtgccctgtgtatagaaccaaactgagaggccccagctacatctggaccttcaggctgaagagcgaagagaagactgcaaaatgggttctggctggagtggctctgcttctagaagcgtaaggtaacactggcattcctctagcctctgctggagtgcagtgaggattttctagcatgttgctgcactgttcccatgcacattattctaactttttagtaactcacacgtgcattcttttttcaacgctatccttagagtgaaagtcagaaaaaaatactagaaactaactcagggctgagcgtggtggcacacgactgtaatcccagttactcaggaggtaggagaatcacttgaacctaggaggcaaaggttgcagtgagccgaggttgcaccactgcactccctcctgggcaacagaacaagactccatctc

SEQ ID NO: 128502 - DNA, 14167 bp, Homo sapiens
  Payload ID: 5152
  Gene Symbol: DNAH11
  Gene Name: dynein, axonemal, heavy chain 11
  Uniprot ID: Q96DT5
  ENST ID: ENST00000409508
  CDS Start-End: 32-13582
ccggcctcgcgttccctcggacggttgcccaatggcagcccaggtggcagcccgggaggcgcgagacttcagagaagccccgacccttcgcctaacctcgggggccggcctggaggcagtgggcgctgtggagctcgaggaggaggaggagaacgaggaggaggcggcggccaggagagcgcggagtttcgcccaagacgcgcgggtgcgcttcctcggcggccgcctggcgatgatgctggggttcacggaggagaaatggagccagtatttggaaagcgaggacaaccggcaggttcttggggagtttctggaaagcaccagcccggcttgccttgtgtttagcttcgccgcctcggggcgccttgcggcttcccaggagattccaagagatgcaaaccataaacttgtttttatttccaagaagattactgaaagcattggagtaaatgacttttctcaagtggttttatttggagagttacctgcgttgtctcttggacatgtatctgctttccttgatgagattttagtgccagttctttctaataagaacaaccataagtcctggtcctgttttacttcacaagatatggaatatcacatagaagtcatgaaaaagaagatgtatatttttaggggcaaaatgtctagaagaactcttctaccaattcccactgttgcaggaaagatggatctggatcagaattgttcagagaacaagccaccgtcaaacgaaaggataatacttcatgcaattgaatctgtggttattgaatggtcacatcaaatccaagaaattatagaaagagattcagtgcagcgtttgttgaatggtcttcacttgtctcctcaagcagaactagatttctggatgatgaggagagaaaatctgtcatgcatttatgatcaacttcaggcacctgttgtcctcaaaatggttaagatcctgacaactaaacaaagcagctattttcctactctgaaggacatttttctggctgtggaaaatgctcttctcgaagcccaagatgtggaactttacctgagacctctgaggagacacatccagtgtctccaggagacggaattcccacagacacgcatattaatcgctccattatttcataccatctgtctgatctggagtcattccaagttttataacaccccagctcgggttatagttttattgcaagagttttgtaatctcttcattaaccaggcaacagcttacctttcacctgaggaccttttgaggggagaaatagaagagtcactggaaaaggtgcaggtggctgttaacatcttaaagactttcaaaaactcctttttcaactatagaaaaaaattggcaagctactttatgggaagaaagctgagaccatgggatttccagtctcatctggtgttttgcagatttgacaagtttcttgatcgtttaataaaaatagaggatatatttgccaccactttggaatttgaaaagctggaaagactggaatttggtggtaccaaaggagcaattttaaatggacaagtccacgagatgagtgaagaacttatggaactctgtaaactttttaaacagagcacttatgacccatctgattgcactaacatggagtttgaaagtgattatgtggcatttaagtccaaaactctggaatttgacagaaggcttgggacaattatttgtgaagctttctttaactgcaatggcttagaagctgcatttaagcttttgaccatatttggaaattttctagagaagccagttgtcatggaaattttcagcctacattacagcacactagtgcatatgtttaatacagagctggatgtgtgtaagcaactgtataatgaacacatgaaacagattgaatgtggtcatgtagttcttaacaagaacatgccatttacctcaggaaatatgaaatgggcccagcaggttctccaacgacttcaaatgttttggtcaaacttcgcatctctccgttatctatttttgggcaatcctgatcacgctttagtttatcaaaagtatgttgaaatgaccactttgcttgatcaatttgaaagtcgtatctataatgaatggaaaagtaatgtggatgaaatctgtgaattcaatttgaatcaacccttggttaaattcagtgccataaatggtcttctctgtgtcaattttgacccaaagctagtggctgtattgagagaagtgaaatatcttttgatgttgaagaaacaagacataccagattcagctttagccatcttcaagaaaaggaacactattttaaagtacattggaaatcttgaccttcttgtgcaagggtataataaactcaaacagacgctcctggaagttgaataccctctgattgaagatgagctgagggctattgacgagcagctgacagcagccacaacgtggctgacatggcaggatgactgctggggctacatcgagagggtgagggcagccacgtccgagttggagcacagagttgagcgcacacagaaaaacgtgaaggtgatccagcagaccatgaggggctgggccaggtgcgtgctacctcccaggagagagcacagacgagaggcagccttcaccttggaggacaagggtgatttgtttacaaaaaaatacaagttaatccaaggagatggctgcaagatccacaacttggtcgaggaaaataggaagctcttcaaagccaatccctctctggatacctggaaaatttatgtagaattcattgacgacattgtggtggaaggcttttttcaggctataatgcacgacttagacttctttctgaagaatacagagaaacaattgaaaccggcaccgttttttcaagcacaaatgatcttgttgcctcctgagattgtgtttaaaccttccctagacagagaggctggggatggcttctatgatcttgtagaagaaatgttatgcaatagttttagaatgtctgcccagatgaaccgaatagcaacacacctggaaattaaaaattatcagaatgatatggataacatgttaggcctggcagaggtcaggcaggagatcatgaacagagtggtgaatgtcatcaacaaagtcttagatttcagaaacaccctggagacccacacttacctctgggtggatgatcgagctgagtttatgaagcattttctcttgtatggccatgctgtgtcttccgatgaaatggatgctcatgcaaatgaagaaattcccgaacaaccaccaactcttgagcaattcaaagaacagattgacatttatgaagctttgtatgttcaaatgagcaaatttgaggactttagagtgtttgatagttggttcaaggtggacatgaagcctttcaaagtgagcttgttaaccataattaagaaatggagctggatgtttcaggagcatcttttgagatttgtcattgacagtctgaatgagctacaagaatttataaaggagacagattccggacttcagagagaattaaatgaaggtgatcatgatggtttagttgacatcatggtgcatcttctggctgtaagaagccgacagagagctactgatgaactctttgaacctctaaaagaaacgatcaccctcttggaaagctatggccagaagatgcctgagcaggtctatattcagctagaggaattacctgaaagatgggaaactaccaaaaagatcgcagcaactgtcagacatgaagtctcacctctccataatgcggaagtcactcttataaggaaaaaatgtattttgtttgacgcaaagcaggcagagttcagagagagattcagacactatgcccctcttggatttaatgcagaaaatccatacacagcgcttgataaggcaaatgaagagcttgaggccttagaagaagaaatgttgcagatgcaagaatctactcgtctttttgaagtggctcttccagagtacaaacaaatgaaacagtgtcgcaaagaaataaaattgctcaagggactgtgggatgtcattatttatgttcgaagaagcattgataattggactaaaacccagtggagacagattcatgtggaacagatggatgtagaactcagaaggtttgccaaggaaatttggtcactcaacaaggaagtccgcgtctgggatgcttacacgggcctggaaggcacagttaaggacatgacagcctccctgagggccatcacagagttacagagccctgccctcagggacaggcattggcaccagctgatgaaagctattggggtcaagtttttaataaatgaagccacaactttggcagatttgttagcactgcggttacacagagtggaagatgatgtccgaaggattgtggacaaggcggtgaaagagctggggactgagaaggttattactgaaatcagtcagacctgggcaaccatgaagttttcttacgaagttcactatcgaacaggcattccattactaaagtctgatgaacaactttttgaaactctagagcacaaccaagttcagttgcagactcttcttcaaagcaagtatgtagaatatttcattgagcaagtgttaagctggcaaaataaattaaacatagcagacttggtcatcttcacttggatggaagtccagcgaacttggtctcacctggaaagcatttttgtctgttcagaagatattcgaatccagcttgtgaaagatgctagaagatttgatggggtggatgctgaatttaaggagttaatgttcaagacagccaaagtagaaaatgtgttagaagcaacgtgcagacctaatctctatgaaaaacttaaagatttacagtccaggctttctctttgtgaaaaagctctcgctgaatacctggaaaccaagcgcatagcctttcctcgcttctatttcgtctcttctgctgatttacttgacattctctcaaaaggagctcagcctaaacaggtaacatgtcaccttgccaaacttttcgacagcattgcagatctgcagtttgaagacaatcaggatgtttctgcacacagggcagttggaatgtacagcaaagaaaaggagtatgtcccattccaagccgagtgtgaatgtgtgggccatgtggaaacatggcttctgcaacttgaacagactatgcaagaaacggtgcgtcattctataacagaagccatagtggcctacgaggaaaaacctagggaactgtggatttttgatttcccagctcaggttgcactaaccagctcacaaatatggtggaccacagatgtaggaatagccttcagtagactggaagaaggctacgaaacagccctgaaggatttccataaaaaacagatttctcagctgaatacactgattacacttttgctgggagaacttccacctggagacagacagaagatcatgacaatttgtaccatagatgtccatgccagagacgtggtggcaaaacttatttctcagaaggttgtcagtccccaagcttttacatggctgtctcaacttcgtcaccgatgggaggatacccagaaacactgctttgttaatatttgtgatgcccagttccagtacttctatgaatacttaggaaacagccctcgactagtgatcactcctctaactgacaggtgttatattaccttaactcaatcacttcatctaaccatgagtggggctcctgctggcccagctggtaccgggaaaacagagaccaccaaagacctaggacgtgcccttggcatgatggtctatgtattcaactgttcagagcaaatggactacaaatccataggcaatatctataagggattggtgcagacaggagcttggggctgctttgatgagttcaaccgaatctctgtggaagttctgtcagtggtggcagtacaagtgaaaatgattcatgatgccatcagaaacaggaagaagagatttgtatttcttggggaagctatcacactgaagccatcagttggaatatttattactatgaacccgggttatgctggtcgaaccgaattaccggaaaatctcaaagctcttttcagaccctgtgccatggtggcccctgacattgagctaatctgtgaaatcttgttagttgctgaaggttttgtggatgcgcgtgcattagcccgaaagttcattacgttgtacacgctttgcaaggagcttctctccaagcaggatcattacgactggggacttcgtgctattaagtctgtcttggttgtggctggatctctgaaacgaggagataaaaatagacccgaagatcaggtactcatgagagcattaagggatttcaatatgcccaaaatagtgactgacgacatcccagtgtttctgggcctggtcggtgacctgtttccagccctggatgtgccccggaggaggaagctgcactttgaacagatggtcaggcagtctaccctggagctccgcctgcagcctgaagagagcttcatcctcaaagttgtccagcttgaggaactgttggctgtgcggcactcggtctttgtagttggaaatgcaggcacaggaaagagtaagattttgagaacactgaaccgaacatatgttaacatgaaacagaagccggtttggaatgacttaaaccctaaagctgtgacaacagatgaactctttggtttcatacatcatgctacccgagaatggaaagatggcaagattgtttactcttattttataggtctcttctcatccattctacgagaacaagcaaatcttaagcatgatggaccaaaatggatagtcctggatggcgatattgaccccatgtggattgaatcactgaatactgtaatggatgataacaaggtgctgaccctcgccagcaatgagcgcattgcactcactcccttcatgaggcttctgtttgagatacatcacttaaggagcgcaaccccggccactgtttccagagctggtattctgtatgtgaacccacaagatctgggctggaatccgtatgtggccagttggatagacagaaggcggcatcaatcagaaaaggccaatttgactattctttttgataaatatgtccctgcatgcttggataaactgagaacaagctttaaaaccatcacttcaattcctgagagtagcctggtgcagactctatgtgttcttttggagtgcttgctgactcctgaaaatgtaccttctgacagcccaaaagaagtttatgaagtctattttgtatttgcttgtatctgggcttttggaggcaccctgctacaagatcagatttctgattatcaagctgacttcagtcggtggtggcagaaagagatgaaagcagtgaaatttccgtcgcagggaacaatctttgattattatgtggaccacaaaactaagaaattattgccctgggctgacaaaattgcccagtttactatggatccagatgtgcctctgcagacagttctcgttcacacaacagagacagctcgtcttagatatttcatggagttgttgcttgagaaaggaaaacctctaatgctagtaggaaatgcaggagtgggaaaaacagtctttgtaggtgacacattggcaagtctctctgaggattacatagtatcccgtgtgcctttcaactactacacgacatccacagctctgcaaaaaattcttgagaaacccctagagaaaaaagctggtcataactatggtcctggaggaaataaaaaattgatttattttatcgacgacatgaacatgcctgaagtggacttatatggcaccgttcagcctcacaccctgatccggcagcatattgattatggacattggtatgatagacagaaggtgatgcttaaagaaatccataactgccagtatgtcgcctgcatgaatccgatggtgggcagcttcaccatcaatcccaggctacagagacatttcacagtgtttgcattcaattttccatctttggatgcactaaacaccatctatggccaaatctttagcttccatttccaacagcaagcatttgctccatcaattctcaggagtggccccactttgatccaggcaacaatagcattccatcagacaatgatgtgtaactttttacccacggctattaaattccactacatctttaatctgagagatttatcaaacgtcttccaggggattttatttgcttctcctgagtgtttaaaaggtccacttgatttaatacatctgtggcttcatgaatctgcccgtgtttatggagacaaactgatagacaaaaaagattgtgatttgtttcagagaagaatgctggaaactgcttataaatattttgaaggtatagatagtcacatgctgcttcaacagcccctcatttattgccactttgctgatagagggaaggacccacattacatgccagtgaaggactgggaagtgctgaagacgattcttacagaaacgttagacaactacaatgaactaaatgctgccatgcacctagttttgtttgaagatgccatgcaacatgtgtgtcgcatcagccggatcttacgaacccctcagggctgtgctctcttggttggagttgggggcagtggcaagcagagcttgtccaggctggcagcttaccttcgtggccttgaggtctttcagatcactctgaccgagggctatggaatccaggaacttcgggtagatcttgccaatttgtacatccgaactggagccaagaacatgcccactgtgttcctgctgacagatgcccaggttctagatgagagcttcctcgtgctgattaatgacttgctggcatcaggagaaatcccagatctgttcagcgatgaagatgtggacaagataatttctggaattcataatgaagttcatgctctgggcatggtagactccagggaaaactgttggaaattctttatggccagggtgcgactacagctcaaaatcattttgtgtttctctccagttggtcgcacgctgagagttagagctcggaagttcccagccatagttaactgcacggctattgactggtttcatgcgtggccgcaggaggctctggtctccgtcagcaggaggttcattgaggaaaccaagggaattgagccagtgcacaaagactctattagccttttcatggcacatgttcacaccactgtaaatgaaatgagtaccagatattaccagaatgagagaagacacaactataccaccccaaagagttttctagaacaaatatcactgtttaagaacctgttgaagaagaagcaaaatgaggtatccgagaaaaaagaacgcctggtgaacggcatccaaaagctaaaaaccacagcctctcaggtgggagatctaaaagccagacttgcctctcaagaagccgagctgcaactgagaaatcatgatgccgaagctctgatcacaaagatcggccttcagacggagaaagtgagccgggaaaagaccatcgctgatgctgaggagcgaaaggtgacagccattcagactgaagtgttccagaaacagagagaatgtgaagctgacttactcaaggctgagcctgcactggtggctgctacagctgcactcaatacactcaacagggtcaacctcagtgagctgaaagcctttcccaaccctcccatcgcagttaccaatgttactgcagccgtgatggtccttctggctcctcggggaagagtgcccaaagaccgaagttggaaagcagctaaagtcttcatgggaaaggttgatgattttttgcaagcattaattaactatgacaaagagcacattccagagaactgtctaaaagtggtgaatgaacactatttgaaagacccagagtttaatccaaacctgattcgaaccaaatcttttgcagcagctggcctgtgtgcctgggtcatcaacatcattaaattctatgaggtctactgtgatgtggagccaaaacgccaagcattagcccaagcaaacttagaactggctgcagctactgaaaaactagaggctatcaggaaaaagcttgtggatctggatcgaaatctgagcagactcacggcttcatttgaaaaagcaacagctgagaaagtccggtgtcaagaagaggtgaaccaaaccaacaaaaccatcaaattagctaacagacttgtcaaggaacttgaggcaaagaagattcgctggggtcaatccattaagtcctttgaagctcaagagaagacactctgtggagatgttcttctcacggcggcatttgtgtcttacgtcggacccttcacaaggcagtatcgccaggagctggtgcactgcaagtgggttccctttcttcaacagaaggtttccattccactaaccgaaggcctggacttgatatccatgttgacggatgatgctacaattgccgcctggaataacgaaggactgcccagtgacagaatgtccaccgaaaatgccgctatcctaacacactgtgagcgctggcctctggtgatagatccccagcaacagggaattaagtggatcaagaataagtatggaatggacctgaaagtcacacatttgggccagaaagggtttttgaatgccattgaaactgctttggcctttggtgatgtcatcttaattgaaaatctcgaggaaacgatagatccagtcctggatccactacttggcaggaacacaattaaaaaaggaaagtatatcaggattggagataaagaatgtgaatttaacaagaactttcgccttatccttcacacaaaattggcaaatcctcactataagccggaattacaagctcagacaactctcctcaatttcacagtcacagaagatggtctagaagcccagctgctggcagaggttgtcagtattgaaaggccagatttggagaaacttaagttggtattgacaaagcaccaaaatgattttaaaattgagctcaagtatctggaagacgatctccttttgcgcctttctgcggcagagggaagctttctggatgacaccaaactggtagagagattggaggcaacaaagaccaccgtggcagagatagagcacaaggtgattgaagccaaagaaaatgaaagaaaaatcaacgaggcccgagaatgttacagaccagtggcagcaagagcatctcttctttattttgttattaatgacctccaaaaaatcaaccccctctaccaattctctttgaaggcttttaacgtgctgttccacagagcgatcgagcaggctgacaaggtggaagacatgcagggacgcatctctatcctgatggagagcatcacccatgctgtcttcctctacaccagccaggcgctgtttgagaaggacaagctcaccttcctgtcccagatggcttttcagattttgttgagaaagaaagagatagaccctcttgaattggatttcctgcttcgattcacagttgaacacactcatctgagtcccgttgacttcctaacttctcagtcatggagtgctatcaaggcaattgccgtcatggaagaatttcgaggcatagaccgagatgtggaaggatctgccaagcagtggaggaagtgggtagaatccgagtgtccagaaaaagaaaaattacctcaagaatggaagaagaaaagtttaatacagaagctgattcttctgagagcaatgcgccctgacagaatgacgtatgctctcagaaattttgtagaggaaaaactgggtgcgaagtatgtggagaggaccagattggacttagttaaagcattcgaagaaagcagcccagccacccccatattcttcatcctgtctccgggggtagatgcccttaaagacctggagattcttggcaaaagacttggctttacaattgactctggaaaattccacaatgtgtctttaggacaaggtcaggagacggtggcagaagtggccctggagaaagcttccaaaggaggacactgggtcatcctccaaaatgttcatttggtagccaagtggctaggaaccttggagaagctccttgaaagattcagccaaggaagccacagagattacagggttttcatgagtgctgagtctgcacctacaccagatgagcatatcatccctcaaggactcctggaaaattccattaagatcactaatgaacccccaacagggatgctggccaatttgcatgccgccctgtacaactttgatcaggatacacttgaaatatgctccaaggagcaggagtttaaaagcatccttttttctctctgctacttccacgcctgtgttgctgggagactgaggtttggcccccagggctggagccgaagctatccttttaatcctggagacctcaccatttgtgccagtgtcctctacaactacttagaggcaaactctaaagtcccatgggaagatctccgttatctctttggtgagatcatgtatggaggccacatcacagatgactgggatcgcaaactgtgtcgggtgtatttagaagaattcatgaatccatctctgactgaagatgaactgatgctggcaccaggttttgctgccccaccctacctagattatgcaggctaccaccagtacatagaggagatgcttcctccagaaagcccggcactgtatggcctccacccaaatgctgaaatagaattcctgacagtgacatccaacactctcttcagaactttgctggagatgcagcccaggaatgcactcagtggtgatgaactggggcagtctacagaagaaaaggttaagaatgtcttggatgacattttggagaaacttccagaagagttcaacatggcagagataatgcaaaaaaattcaaatagaagcccatatgttcttgtttgcttccaagaatgtgagaggatgaatattctcattcgggaaatacgtatatcacttgaacaactggaccttagtttgaagggggaattggcattatctcctgctgtggaagcccagcagtttgcattgagttatgacacggtaccagacacttggagcaaactggcttatccttctacttatggcctagcccagtggttcaatgacctcctcctgcgatgccgagaactcgatacttggacacaagaccttacccttccggctgtcgtgtggctctccggcttcttcaaccctcagtccttcttaactgcaatcatgcagacgatggctcgaaaaaatgagtggcccctggataaaacgcgcttgactgctgatgttaccaaaaaaacaaaggaagattatggacacccgccaagggaaggtgcatacctccacggactcttcatggagggcgcccgctgggacacccaagcaggaaccattgttgaagcccgtctcaaggagctggcatgccctatgccggtcatctttgcaaaagccacccccgtggacagacaagaaaccaaacagacctacgagtgccctgtgtatagaaccaaactgagaggccccagctacatctggaccttcaggctgaagagcgaagagaagactgcaaaatgggttctggctggagtggctctgcttctagaagcgtaaggtaacactggcattcctctagcctctgctggagtgcagtgaggattttctagcatgttgctgcactgttcccatgcacattattctaactttttagtaactcacacgtgcattcttttttcaacgctatccttagagtgaaagtcagaaaaaaatactagaaactaactcagggctgagcgtggtggcacacgactgtaatcccagttactcaggaggtaggagaatcacttgaacctaggaggcaaaggttgcagtgagccgaggttgcaccactgcactccctcctgggcaacagaacaagactccatctcaaaaaaaaaaaagtacatcataaaagtacatcatatgtgaacatgcaaaagcaatgcagccggaaagaacggagattttaatttttaacaaacaacaaattaaattattagcccttaaactctttcaaaatataaaagcagcaggccccaggtgagtcctgaaggaagaggctagcactctgtaaggcctccagtgtccagtgtctacaatgttgatggtccccttttgttcagtcaagttttaataaaaataaaactgttctacagttaa

SEQ ID NO: 128503 - DNA, 524 bp, Homo sapiens
  Payload ID: 5152
  Gene Symbol: DNAH11
  Gene Name: dynein, axonemal, heavy chain 11
  ENST ID: ENST00000605912
  CDS Start-End: 1-524
acagttctcgttcacacaacagagacagctcgtcttagatatttcatggagttgttgcttgagaaaggaaaacctctaatgctagtaggaaatgcaggagtgggaaaaacagtctttgtaggtgacacattggcaagtctctctgaggattacatagtatcccgtgtgcctttcaactactacacgacatccacagctctgcaaaaaattcttgagaaacccctagagaaaaaagctggtcataactatggtcctggaggaaataaaaaattgatttattttatcgacgacatgaacatgcctgaagtggacttatatggcaccgttcagcctcacaccctgatccggcagcatattgattatggacattggtatgatagacagaaggtgatgcttaaagaaatccataactgccagtatgtcgcctgcatgaatccgatggtgggcagcttcaccatcaatcccaggctacagggtatagatagtcacatgctgcttcaacagcccctcatttattgccactt

SEQ ID NO: 128504 - DNA, 13670 bp, Homo sapiens
  Payload ID: 5152
  Gene Symbol: DNAH11
  Gene Name: dynein, axonemal, heavy chain 11
  ENST ID: ENST00000620169
  CDS Start-End: 32-13603
ccggcctcgcgttccctcggacggttgcccaatggcagcccaggtggcagcccgggaggcgcgagacttcagagaagccccgacccttcgcctaacctcgggggccggcctggaggcagtgggcgctgtggagctcgaggaggaggaggagaacgaggaggaggcggcggccaggagagcgcggagtttcgcccaagacgcgcgggtgcgcttcctcggcggccgcctggcgatgatgctggggttcacggaggagaaatggagccagtatttggaaagcgaggacaaccggcaggttcttggggagtttctggaaagcaccagcccggcttgccttgtgtttagcttcgccgcctcggggcgccttgcggcttcccaggagattccaagagatgcaaaccataaacttgtttttatttccaagaagattactgaaagcattggagtaaatgacttttctcaagtggttttatttggagagttacctgcgttgtctcttggacatgtatctgctttccttgatgagattttagtgccagttctttctaataagaacaaccataagtcctggtcctgttttacttcacaagatatggaatatcacatagaagtcatgaaaaagaagatgtatatttttaggggcaaaatgtctagaagaactcttctaccaattcccactgttgcaggaaagatggatctggatcagaattgttcagagaacaagccaccgtcaaacgaaaggataatacttcatgcaattgaatctgtggttattgaatggtcacatcaaatccaagaaattatagaaagagattcagtgcagcgtttgttgaatggtcttcacttgtctcctcaagcagaactagatttctggatgatgaggagagaaaatctgtcatgcatttatgatcaacttcaggcacctgttgtcctcaaaatggttaagatcctgacaactaaacaaagcagctattttcctactctgaaggacatttttctggctgtggaaaatgctcttctcgaagcccaagatgtggaactttacctgagacctctgaggagacacatccagtgtctccaggagacggaattcccacagacacgcatattaatcgctccattatttcataccatctgtctgatctggagtcattccaagttttataacaccccagctcgggttatagttttattgcaagagttttgtaatctcttcattaaccaggcaacagcttacctttcacctgaggaccttttgaggggagaaatagaagagtcactggaaaaggtgcaggtggctgttaacatcttaaagactttcaaaaactcctttttcaactatagaaaaaaattggcaagctactttatgggaagaaagctgagaccatgggatttccagtctcatctggtgttttgcagatttgacaagtttcttgatcgtttaataaaaatagaggatatatttgccaccactttggaatttgaaaagctggaaagactggaatttggtggtaccaaaggagcaattttaaatggacaagtccacgagatgagtgaagaacttatggaactctgtaaactttttaaacagagcacttatgacccatctgattgcactaacatggagtttgaaagtgattatgtggcatttaagtccaaaactctggaatttgacagaaggcttgggacaattatttgtgaagctttctttaactgcaatggcttagaagctgcatttaagcttttgaccatatttggaaattttctagagaagccagttgtcatggaaattttcagcctacattacagcacactagtgcatatgtttaatacagagctggatgtgtgtaagcaactgtataatgaacacatgaaacagattgaatgtggtcatgtagttcttaacaagaacatgccatttacctcaggaaatatgaaatgggcccagcaggttctccaacgacttcaaatgttttggtcaaacttcgcatctctccgttatctatttttgggcaatcctgatcacgctttagtttatcaaaagtatgttgaaatgaccactttgcttgatcaatttgaaagtcgtatctataatgaatggaaaagtaatgtggatgaaatctgtgaattcaatttgaatcaacccttggttaaattcagtgccataaatggtcttctctgtgtcaattttgacccaaagctagtggctgtattgagagaagtgaaatatcttttgatgttgaagaaacaagacataccagattcagctttagccatcttcaagaaaaggaacactattttaaagtacattggaaatcttgaccttcttgtgcaagggtataataaactcaaacagacgctcctggaagttgaataccctctgattgaagatgagctgagggctattgacgagcagctgacagcagccacaacgtggctgacatggcaggatgactgctggggctacatcgagagggtgagggcagccacgtccgagttggagcacagagttgagcgcacacagaaaaacgtgaaggtgatccagcagaccatgaggggctgggccaggtgcgtgctacctcccaggagagagcacagacgagaggcagccttcaccttggaggacaagggtgatttgtttacaaaaaaatacaagttaatccaaggagatggctgcaagatccacaacttggtcgaggaaaataggaagctcttcaaagccaatccctctctggatacctggaaaatttatgtagaattcattgacgacattgtggtggaaggcttttttcaggctataatgcacgacttagacttctttctgaagaatacagagaaacaattgaaaccggcaccgttttttcaagcacaaatgatcttgttgcctcctgagattgtgtttaaaccttccctagacagagaggctggggatggcttctatgatcttgtagaagaaatgttatgcaatagttttagaatgtctgcccagatgaaccgaatagcaacacacctggaaattaaaaattatcagaatgatatggataacatgttaggcctggcagaggtcaggcaggagatcatgaacagagtggtgaatgtcatcaacaaagtcttagatttcagaaacaccctggagacccacacttacctctgggtggatgatcgagctgagtttatgaagcattttctcttgtatggccatgctgtgtcttccgatgaaatggatgctcatgcaaatgaagaaattcccgaacaaccaccaactcttgagcaattcaaagaacagattgacatttatgaagctttgtatgttcaaatgagcaaatttgaggactttagagtgtttgatagttggttcaaggtggacatgaagcctttcaaagtgagcttgttaaccataattaagaaatggagctggatgtttcaggagcatcttttgagatttgtcattgacagtctgaatgagctacaagaatttataaaggagacagattccggacttcagagagaattaaatgaaggtgatcatgatggtttagttgacatcatggtgcatcttctggctgtaagaagccgacagagagctactgatgaactctttgaacctctaaaagaaacgatcaccctcttggaaagctatggccagaagatgcctgagcaggtctatattcagctagaggaattacctgaaagatgggaaactaccaaaaagatcgcagcaactgtcagacatgaagtctcacctctccataatgcggaagtcactcttataaggaaaaaatgtattttgtttgacgcaaagcaggcagagttcagagagagattcagacactatgcccctcttggatttaatgcagaaaatccatacacagcgcttgataaggcaaatgaagagcttgaggccttagaagaagaaatgttgcagatgcaagaatctactcgtctttttgaagtggctcttccagagtacaaacaaatgaaacagtgtcgcaaagaaataaaattgctcaagggactgtgggatgtcattatttatgttcgaagaagcattgataattggactaaaacccagtggagacagattcatgtggaacagatggatgtagaactcagaaggtttgccaaggcgagttccataactgaaatttggtcactcaacaaggaagtccgcgtctgggatgcttacacgggcctggaaggcacagttaaggacatgacagcctccctgagggccatcacagagttacagagccctgccctcagggacaggcattggcaccagctgatgaaagctattggggtcaagtttttaataaatgaagccacaactttggcagatttgttagcactgcggttacacagagtggaagatgatgtccgaaggattgtggacaaggcggtgaaagagctggggactgagaaggttattactgaaatcagtcagacctgggcaaccatgaagttttcttacgaagttcactatcgaacaggcattccattactaaagtctgatgaacaactttttgaaactctagagcacaaccaagttcagttgcagactcttcttcaaagcaagtatgtagaatatttcattgagcaagtgttaagctggcaaaataaattaaacatagcagacttggtcatcttcacttggatggaagtccagcgaacttggtctcacctggaaagcatttttgtctgttcagaagatattcgaatccagcttgtgaaagatgctagaagatttgatggggtggatgctgaatttaaggagttaatgttcaagacagccaaagtagaaaatgtgttagaagcaacgtgcagacctaatctctatgaaaaacttaaagatttacagtccaggctttctctttgtgaaaaagctctcgctgaatacctggaaaccaagcgcatagcctttcctcgcttctatttcgtctcttctgctgatttacttgacattctctcaaaaggagctcagcctaaacaggtaacatgtcaccttgccaaacttttcgacagcattgcagatctgcagtttgaagacaatcaggatgtttctgcacacagggcagttggaatgtacagcaaagaaaaggagtatgtcccattccaagccgagtgtgaatgtgtgggccatgtggaaacatggcttctgcaacttgaacagactatgcaagaaacggtgcgtcattctataacagaagccatagtggcctacgaggaaaaacctagggaactgtggatttttgatttcccagctcaggttgcactaaccagctcacaaatatggtggaccacagatgtaggaatagccttcagtagactggaagaaggctacgaaacagccctgaaggatttccataaaaaacagatttctcagctgaatacactgattacacttttgctgggagaacttccacctggagacagacagaagatcatgacaatttgtaccatagatgtccatgccagagacgtggtggcaaaacttatttctcagaagcaagttgttgtcagtccccaagcttttacatggctgtctcaacttcgtcaccgatgggaggatacccagaaacactgctttgttaatatttgtgatgcccagttccagtacttctatgaatacttaggaaacagccctcgactagtgatcactcctctaactgacaggtgttatattaccttaactcaatcacttcatctaaccatgagtggggctcctgctggcccagctggtaccgggaaaacagagaccaccaaagacctaggacgtgcccttggcatgatggtctatgtattcaactgttcagagcaaatggactacaaatccataggcaatatctataagggattggtgcagacaggagcttggggctgctttgatgagttcaaccgaatctctgtggaagttctgtcagtggtggcagtacaagtgaaaatgattcatgatgccatcagaaacaggaagaagagatttgtatttcttggggaagctatcacactgaagccatcagttggaatatttattactatgaacccgggttatgctggtcgaaccgaattaccggaaaatctcaaagctcttttcagaccctgtgccatggtggcccctgacattgagctaatctgtgaaatcttgttagttgctgaaggttttgtggatgcgcgtgcattagcccgaaagttcattacgttgtacacgctttgcaaggagcttctctccaagcaggatcattacgactggggacttcgtgctattaagtctgtcttggttgtggctggatctctgaaacgaggagataaaaatagacccgaagatcaggtactcatgagagcattaagggatttcaatatgcccaaaatagtgactgacgacatcccagtgtttctgggcctggtcggtgacctgtttccagccctggatgtgccccggaggaggaagctgcactttgaacagatggtcaggcagtctaccctggagctccgcctgcagcctgaagagagcttcatcctcaaagttgtccagcttgaggaactgttggctgtgcggcactcggtctttgtagttggaaatgcaggcacaggaaagagtaagattttgagaacactgaaccgaacatatgttaacatgaaacagaagccggtttggaatgacttaaaccctaaagctgtgacaacagatgaactctttggtttcatacatcatgctacccgagaatggaaagatggcaagattgtttactcttattttataggtctcttctcatccattctacgagaacaagcaaatcttaagcatgatggaccaaaatggatagtcctggatggcgatattgaccccatgtggattgaatcactgaatactgtaatggatgataacaaggtgctgaccctcgccagcaatgagcgcattgcactcactcccttcatgaggcttctgtttgagatacatcacttaaggagcgcaaccccggccactgtttccagagctggtattctgtatgtgaacccacaagatctgggctggaatccgtatgtggccagttggatagacagaaggcggcatcaatcagaaaaggccaatttgactattctttttgataaatatgtccctgcatgcttggataaactgagaacaagctttaaaaccatcacttcaattcctgagagtagcctggtgcagactctatgtgttcttttggagtgcttgctgactcctgaaaatgtaccttctgacagcccaaaagaagtttatgaagtctattttgtatttgcttgtatctgggcttttggaggcaccctgctacaagatcagatttctgattatcaagctgacttcagtcggtggtggcagaaagagatgaaagcagtgaaatttccgtcgcagggaacaatctttgattattatgtggaccacaaaactaagaaattattgccctgggctgacaaaattgcccagtttactatggatccagatgtgcctctgcagacagttctcgttcacacaacagagacagctcgtcttagatatttcatggagttgttgcttgagaaaggaaaacctctaatgctagtaggaaatgcaggagtgggaaaaacagtctttgtaggtgacacattggcaagtctctctgaggattacatagtatcccgtgtgcctttcaactactacacgacatccacagctctgcaaaaaattcttgagaaacccctagagaaaaaagctggtcataactatggtcctggaggaaataaaaaattgatttattttatcgacgacatgaacatgcctgaagtggacttatatggcaccgttcagcctcacaccctgatccggcagcatattgattatggacattggtatgatagacagaaggtgatgcttaaagaaatccataactgccagtatgtcgcctgcatgaatccgatggtgggcagcttcaccatcaatcccaggctacagagacatttcacagtgtttgcattcaattttccatctttggatgcactaaacaccatctatggccaaatctttagcttccatttccaacagcaagcatttgctccatcaattctcaggagtggccccactttgatccaggcaacaatagcattccatcagacaatgatgtgtaactttttacccacggctattaaattccactacatctttaatctgagagatttatcaaacgtcttccaggggattttatttgcttctcctgagtgtttaaaaggtccacttgatttaatacatctgtggcttcatgaatctgcccgtgtttatggagacaaactgatagacaaaaaagattgtgatttgtttcagagaagaatgctggaaactgcttataaatattttgaaggtatagatagtcacatgctgcttcaacagcccctcatttattgccactttgctgatagagggaaggacccacattacatgccagtgaaggactgggaagtgctgaagacgattcttacagaaacgttagacaactacaatgaactaaatgctgccatgcacctagttttgtttgaagatgccatgcaacatgtgtgtcgcatcagccggatcttacgaacccctcagggctgtgctctcttggttggagttgggggcagtggcaagcagagcttgtccaggctggcagcttaccttcgtggccttgaggtctttcagatcactctgaccgagggctatggaatccaggaacttcgggtagatcttgccaatttgtacatccgaactggagccaagaacatgcccactgtgttcctgctgacagatgcccaggttctagatgagagcttcctcgtgctgattaatgacttgctggcatcaggagaaatcccagatctgttcagcgatgaagatgtggacaagataatttctggaattcataatgaagttcatgctctgggcatggtagactccagggaaaactgttggaaattctttatggccagggtgcgactacagctcaaaatcattttgtgtttctctccagttggtcgcacgctgagagttagagctcggaagttcccagccatagttaactgcacggctattgactggtttcatgcgtggccgcaggaggctctggtctccgtcagcaggaggttcattgaggaaaccaagggaattgagccagtgcacaaagactctattagccttttcatggcacatgttcacaccactgtaaatgaaatgagtaccagatattaccagaatgagagaagacacaactataccaccccaaagagttttctagaacaaatatcactgtttaagaacctgttgaagaagaagcaaaatgaggtatccgagaaaaaagaacgcctggtgaacggcatccaaaagctaaaaaccacagcctctcaggtgggagatctaaaagccagacttgcctctcaagaagccgagctgcaactgagaaatcatgatgccgaagctctgatcacaaagatcggccttcagacggagaaagtgagccgggaaaagaccatcgctgatgctgaggagcgaaaggtgacagccattcagactgaagtgttccagaaacagagagaatgtgaagctgacttactcaaggctgagcctgcactggtggctgctacagctgcactcaatacactcaacagggtcaacctcagtgagctgaaagcctttcccaaccctcccatcgcagttaccaatgttactgcagccgtgatggtccttctggctcctcggggaagagtgcccaaagaccgaagttggaaagcagctaaagtcttcatgggaaaggttgatgattttttgcaagcattaattaactatgacaaagagcacattccagagaactgtctaaaagtggtgaatgaacactatttgaaagacccagagtttaatccaaacctgattcgaaccaaatcttttgcagcagctggcctgtgtgcctgggtcatcaacatcattaaattctatgaggtctactgtgatgtggagccaaaacgccaagcattagcccaagcaaacttagaactggctgcagctactgaaaaactagaggctatcaggaaaaagcttgtggatctggatcgaaatctgagcagactcacggcttcatttgaaaaagcaacagctgagaaagtccggtgtcaagaagaggtgaaccaaaccaacaaaaccatcaaattagctaacagacttgtcaaggaacttgaggcaaagaagattcgctggggtcaatccattaagtcctttgaagctcaagagaagacactctgtggagatgttcttctcacggcggcatttgtgtcttacgtcggacccttcacaaggcagtatcgccaggagctggtgcactgcaagtgggttccctttcttcaacagaaggtttccattccactaaccgaaggcctggacttgatatccatgttgacggatgatgctacaattgccgcctggaataacgaaggactgcccagtgacagaatgtccaccgaaaatgccgctatcctaacacactgtgagcgctggcctctggtgatagatccccagcaacagggaattaagtggatcaagaataagtatggaatggacctgaaagtcacacatttgggccagaaagggtttttgaatgccattgaaactgctttggcctttggtgatgtcatcttaattgaaaatctcgaggaaacgatagatccagtcctggatccactacttggcaggaacacaattaaaaaaggaaagtatatcaggattggagataaagaatgtgaatttaacaagaactttcgccttatccttcacacaaaattggcaaatcctcactataagccggaattacaagctcagacaactctcctcaatttcacagtcacagaagatggtctagaagcccagctgctggcagaggttgtcagtattgaaaggccagatttggagaaacttaagttggtattgacaaagcaccaaaatgattttaaaattgagctcaagtatctggaagacgatctccttttgcgcctttctgcggcagagggaagctttctggatgacaccaaactggtagagagattggaggcaacaaagaccaccgtggcagagatagagcacaaggtgattgaagccaaagaaaatgaaagaaaaatcaacgaggcccgagaatgttacagaccagtggcagcaagagcatctcttctttattttgttattaatgacctccaaaaaatcaaccccctctaccaattctctttgaaggcttttaacgtgctgttccacagagcgatcgagcaggctgacaaggtggaagacatgcagggacgcatctctatcctgatggagagcatcacccatgctgtcttcctctacaccagccaggcgctgtttgagaaggacaagctcaccttcctgtcccagatggcttttcagattttgttgagaaagaaagagatagaccctcttgaattggatttcctgcttcgattcacagttgaacacactcatctgagtcccgttgacttcctaacttctcagtcatggagtgctatcaaggcaattgccgtcatggaagaatttcgaggcatagaccgagatgtggaaggatctgccaagcagtggaggaagtgggtagaatccgagtgtccagaaaaagaaaaattacctcaagaatggaagaagaaaagtttaatacagaagctgattcttctgagagcaatgcgccctgacagaatgacgtatgctctcagaaattttgtagaggaaaaactgggtgcgaagtatgtggagaggaccagattggacttagttaaagcattcgaagaaagcagcccagccacccccatattcttcatcctgtctccgggggtagatgcccttaaagacctggagattcttggcaaaagacttggctttacaattgactctggaaaattccacaatgtgtctttaggacaaggtcaggagacggtggcagaagtggccctggagaaagcttccaaaggaggacactgggtcatcctccaaaatgttcatttggtagccaagtggctaggaaccttggagaagctccttgaaagattcagccaaggaagccacagagattacagggttttcatgagtgctgagtctgcacctacaccagatgagcatatcatccctcaaggactcctggaaaattccattaagatcactaatgaacccccaacagggatgctggccaatttgcatgccgccctgtacaactttgatcaggatacacttgaaatatgctccaaggagcaggagtttaaaagcatccttttttctctctgctacttccacgcctgtgttgctgggagactgaggtttggcccccagggctggagccgaagctatccttttaatcctggagacctcaccatttgtgccagtgtcctctacaactacttagaggcaaactctaaagtcccatgggaagatctccgttatctctttggtgagatcatgtatggaggccacatcacagatgactgggatcgcaaactgtgtcgggtgtatttagaagaattcatgaatccatctctgactgaagatgaactgatgctggcaccaggttttgctgccccaccctacctagattatgcaggctaccaccagtacatagaggagatgcttcctccagaaagcccggcactgtatggcctccacccaaatgctgaaatagaattcctgacagtgacatccaacactctcttcagaactttgctggagatgcagcccaggaatgcactcagtggtgatgaactggggcagtctacagaagaaaaggttaagaatgtcttggatgacattttggagaaacttccagaagagttcaacatggcagagataatgcaaaaaaattcaaatagaagcccatatgttcttgtttgcttccaagaatgtgagaggatgaatattctcattcgggaaatacgtatatcacttgaacaactggaccttagtttgaagggggaattggcattatctcctgctgtggaagcccagcagtttgcattgagttatgacacggtaccagacacttggagcaaactggcttatccttctacttatggcctagcccagtggttcaatgacctcctcctgcgatgccgagaactcgatacttggacacaagaccttacccttccggctgtcgtgtggctctccggcttcttcaaccctcagtccttcttaactgcaatcatgcagacgatggctcgaaaaaatgagtggcccctggataaaacgcgcttgactgctgatgttaccaaaaaaacaaaggaagattatggacacccgccaagggaaggtgcatacctccacggactcttcatggagggcgcccgctgggacacccaagcaggaaccattgttgaagcccgtctcaaggagctggcatgccctatgccggtcatctttgcaaaagccacccccgtggacagacaagaaaccaaacagacctacgagtgccctgtgtatagaaccaaactgagaggccccagctacatctggaccttcaggctgaagagcgaagagaagactgcaaaatgggttctggctggagtggctctgcttctagaagcgtaaggtaacactggcattcctctagcctctgctggagtgcagtgaggattttctagcatgttgctgcact

SEQ ID NO: 128505 - DNA, 9542 bp, Homo sapiens
  Payload ID: 5153
  Gene Symbol: DNAH12
  Gene Name: dynein, axonemal, heavy chain 12
  Uniprot ID: Q6ZR08
  ENST ID: ENST00000351747
  CDS Start-End: 182-9460
gcccttctccagctactcgtttgagagccggtggcgttccggaggtttctccctcgttatccccctgcctttcacctgaggagaggctctgactgtctctctctctctctggcgtctgcgcagcggggaagtagtgagaaacaatcagagtacagagtattttaatctttaggggatcaagatgtcagatgcaaacaaagctgccattgcagcagaaaaggaagctctgaacttgaagttaccccccattgtccatctcccagaaaacataggcgttgatacaccaacacaaagtaagctgctaaaatacagaagatccaaggagcagcagcagaaaattaatcagttagtaattgatggagccaaaagaaatttagacagaacactgggtaaaagaacacctctattaccaccacctgattatcctcaaactatgaccagtgaaatgaaaaaaaaaggattcaactatatttatatgaagcaatgtgtagaaagtagtcctttagtacctattcagcaggaatggctggatcacatgttaaggctgatacctgagtctttaaaggaagggaaagaaagagaagaacttcttgaaagtctcataaatgaggtgtcaagtgactttgaaaacagcatgaagagatatttggtgcagagcgttcttgtgaaaccaccagttaaatcgcttgaagatgaaggaggtcctttacctgaatctcctgtaggcctagattattctaatccttggcattctagctatgtgcaggcaagaaatcaaatattctctaatttgcacattattcatccaactatgaaaatgttactggaccttggttatacaacatttgctgatacagttttgttggacttcacaggaattagagctaaaggtccaattgactgtgaatcactgaaaactgatctatcaatacaaactagaaacgcagaagagaagataatgaatacatggtatccaaaggttataaatctctttaccaagaaggaggcactagaaggtgttaaacctgaaaaattggatgcattttatagctgtgtttccacacttatgtcaaatcagctaaaggatctattaaggagaactgtagaaggatttgtaaaactctttgacccaaaagatcaacaaaggctgccaatatttaagatagaattgacatttgatgacgacaaaatggaattttatcctacctttcaagatttggaagataatgtcttgagtttggtggaacgaatagccgaagctctgcagaatgtccaaacaatcccctcttggctatcaggaacttcaacaccagtaaatcttgacacagaacttcctgaacacgtgttacactgggctgttgatacactgaaggcagcagtacatcggaacttagaaggtgcaagaaagcattatgagacatatgttgaaaaatataattggctccttgatgggactgcagttgagaatatagagacttttcagacagaagatcatacttttgatgaatatacagagtttatagaaaaatttctcagtcttgcctcagaaataatgcttttgcctcagtggattcattacactatggtgcgtttggattgtgaagatttgaagacaggcctgacaaataaagcaaaagcctttgcaaacatattattaaatgacatagcttcaaaatatagaaaagaaaatgaatgtatttgcagtgaatttgaagcaattaaagaacatgcattaaaagtccctgaaacaacagaagagatgatggatctgatatcttatgtagaaaaagcccggactgtaggaatcgaagagttgattttaaggatccaggaatctaaacgccaaatgagttactttttagatgttttcctatttcctcaagaagacttagctttaaatgcaactgtcctcatgtggcctaggaaaattaatcccatctttgatgaaaatgatgagctaattgagaatgctaaacataaaaaagaaaatgaactaatggccaagagagagaaacttattttggaaatagaaaaagaatcacgccgcatggaggagtttacagaatttgcagagctggagcgcatgcaacagtatgtgacagatgtaagacaactacaaaaacgtattcaggaatctgaagaagcagtgcagtttattaataaagaagaggaacttttcaagtgggaattgacaaaatatcctgaactggataaattaaaagttaacattgagccctatcagaagttttttaattttgttttgaagtggcagcgatcagaaaaacggtggatggatggagggtttttggacctcaatggggaaagcatggaggctgatgtggaagagttttcccgagaaatttttaagacactaaaatttttccaaacgaagctaaagaaagaattacaagaaaaaagaaaggcagcaagaaaacggtctttggaagaagagaaaattgaagaagaaccaaaagacaatgctactattactatgtgcagaatgagagctcgtcactggaaacagatatcagaaattgtaggctatgacttgactccagactctggaactacactgagaaaagttttaaaattaaaccttaccccatacttggaacaatttgaagtgataagtgcaggtgcaagcaaggaattttcattagagaaagccatgaatacaatgataggaacttgggaagatattgcttttcatataagtctgtatcgtgacactggagtctgtattctttcttcggtggatgagattcaggccatccttgatgatcaaattataaaaactcagacaatgagaggctcacctttcatcaaaccatttgaacatgagatcaaggcctgggaggaccgcttgattcgaatacaagaaacaattgatgaatggttaaaagtacaagctcaatggctgtacttagagcccatcttttgttctgaggatatcatgcaacagatgccagaagaagggcgtcaatttcagacagtagacagacactggagagatatcatgaagttttgtgctaaagatccaaaggttcttgctgccacttctttaacaggtttattggaaaaactacagaactgcaatgaacttttggagaaaattatgaaaggtcttaacgcatatcttgaaaagaaacgtcttttcttccctcgttttttcttcttatctaatgatgaaatgttagagattttatcagagaccaaagatccacttagagttcagccacatttaaaaaaatgctttgagggcattgctaaattagagttccttcccaatttggacattaaagccatgtatagctctgagggcgagcgagtggagctgattgcactcatttccacgtctgcagcgcggggtgctgtggaaaagtggctcattcaagtggaagacctaatgctccggagtgttcacgatgtgatcgctgcagccaggctggcttatccagaatctgcaagaagagactgggttcgagagtggcctggccaagttgtactttgtatttctcaaatgttctggacatctgagacacaggaagtgataagtggcgggacggagggattaaagaagtattataaggaacttcagaaccaactgaatgagattgtagagctggtaagaggaaagttgtctaagcagaccaggaccactctgggggctttggttactattgatgtccatgctagagatgtggtcatggacatgattaaaatgggtgtctcacatgatacagatttcctgtggcttgctcagctccgatattattgggaaaatgagaatgcccgagttcgtatcattaattgcaatgtaaaatatgcttatgaatatcttggtaactcacctcgacttgtcattacgcctctaactgacaggtgttacagaacattgataggtgctttctatttaaaccttggaggtgctccagaggggccagcaggcacaggaaaaaccgaaaccaccaaggacttggctaaagctcttgctgtacagtgtgtggtgttcaactgttctgatgggctagattatctagcaatgggaaagttttttaaaggactggcttcttctggtgcttgggcttgctttgatgaattcaatcgaattgagttggaagtgttgtcagtggtagctcaacagatcctttgcattcagagagctattcaacagaagttggttgtgtttgtttttgaagggacagaacttaagctcaatccgaattgttttgtagctattaccatgaatcctggctatgcaggacgctctgaattgccggacaatcttaaggttctttttagaacagtggctatgatggttccaaactatgcgcttatagcagaaatctccctctactcttacggatttttgaatgcaagacctctgtctgtgaaaatagtaatgacctataggctttgctcagagcagctctcatcgcaatttcattacgactatggaatgcgagcagtaaaagccgttttagtggctgctggcaatctaaaactaaaatacccaaatgaaaatgaagatatacttcttcttcgatcaattaaagatgtaaatgaaccaaagtttttatcacatgatatacctttatttaatggaataactagtgacttatttcctggtattaaacttcctgaagctgactatcacgaatttttggaatgtgctcatgaagcctgcaatgtacataatcttcagcctgttaaattttttcttgaaaaaataattcaaacatatgaaatgatgattgttagacatggttttatgttagtaggagagccttttgctgctaagacaaaagttctgcatgtgctggcggatacgctaactttaatgaatgaacatggctatggagaggaagaaaaggtcatttatagaactgtaaaccccaaatctattactatgggccaactttttggacagtttgacccagtgtctcatgagtggactgatggtattgtggctaacacttttagagaatttgccttatcagaaacacctgaccggaaatgggttgtatttgatggtcctattgacactttgtggatagagagcatgaacacagtattggatgataataaaaagctttgccttatgagtggagaaatcattcagatgtccccccaaatgagcctcatctttgaaacaatggacctttcccaggcatcccctgccactgtaagtcgttgtggtatgatttatttggagccttcacagttaggatgggaaccacttgtgtcttcttggttgaattcactgaaaggacctctgtgtgaaccagaatatcaagctcttctgagaggactttttgcctggttaataccaccctctttaaaccagcgggttgaattattccagctaaactatttgtatacaaccatagtgtctaaaattttaaaaattctaattactttccgtatttcaaattattttaaatatgtgcctctaaaaactcaatgtacatttattaaattttttctccaccaacaggcttgctttatattctctttgatttggtcgattggaggaagttgtgatacagatggccgtcgtgtttttgatactttcatacgattaatcatactgggaaaagatgatgaaaacccagtgccagattctgtgggtaaatgggaatgcccatttgatgaaaaaggcctggtctatgactacatgtatgagttgaaaaacaaaggtcgctgggtccattggaatgaattaattaaaaatactaatttaggagataaacaaatcaagattcaagatatcatagtccctacgatggacacaattagatatacgtttctaatggatttgagtattacctatgcaaagccactcctttttgtgggtccaacgggtacaggaaaatctgtgtatgtgaaggataagctaatgaatcacttggaaaaggaccagtactttcctttttatattaacttatctgcacggaccagcgccaatcaggttcagaacattatcatggctagattggataaaagacgcaaaggagtctttggaccacctatgggaaagaagtgtataatttttatagatgatatgaatatgcctgcattggagaagtatggagctcaaccacctattgaattattacgacagttttttgactgtggacattggtacgaccttaaggacacaagtaaaatcacgctggtggacatagagctgattgctgcaatgggccctccaggtggtggaagaaatccagttactccccgttgtattcgacatttcaacatctgcagtattaattcttttagtgatgaaactatggtccgaatcttctcatctattgtagcattctaccttagaactcatgaatttcctccagagtactttgtaattgggaaccagatagtcaatgggactatggagatatataaacaatctgtggaaaatcttttacccactcccacaaaatcccattatactttcaacttgcgtgatttttcacgcgtcatccggggctgtttactcattgaaagagacgccgtggcgaacaaacacactatgatccgtctgtttgtgcatgaggttctccgagtgttttatgatcgcctcattaatgatgatgatcgaagatggctgttccagttaactaaaactgttataaaggaccattttaaagaatcatttcacagtatcttttcacatttgaggaaacaaaatgcaccagtaactgaagaagacttaagaaatctcatgtttggtgattatatgaatcctgaccttgaaggagatgatagagtttatattgaaattccaaatattcatcattttagtgatgttgtggaccagtgcttagatgagtataatcaaacacacaaaacaagaatgaatcttgtcatttttaggtatgttttggaacatttatcaagaatatgtcgagttctaaagcaatctggtggaaatgctttgcttgttggtcttggaggaagtggtcgtcaatctttaactcgtctggctacatccatggcaaaaatgcatattttccaaccagaaatttctaagagctatggtatgaatgaatggagagaggatatgaagagctttattgctgtcccggtgaccaacaggatagtggataacaaatccaagattttggaaaagcgcctacgatatttaaatgaccacttcacatacaacttatattgtaatatatgccgatcactatttgagaaggacaagctgttattttcctttttattatgtgccaatcttcttctggcaaggaaagagattgaataccaggaactgatgtttcttttaactggaggagtaagtcttaaaagtgctgagaaaaatcctgatccaacttggctacaggacaaaagctgggaggaaatctgtcgggcaagtgaatttcctgccttcagaggactcaggcaacatttttgtgaacatatatatgaatggcgagaaatctatgacagtaaagagccacataatgctaaatttccagcaccaatggataagaacctaaatgaactacagaaaataataattcttcggtgtttaagacctgataagataaccccagctataacaaactatgtaactgacaaactagggaaaaagtttgtagagcctccaccatttgatttgacaaagagttacttggattcaaattgcaccattcccttaatttttgttctatctccaggagcagatcctatggccagcctgctgaaatttgcaaatgataaatctatgtctggaaataagtttcaagctatttcactgggacagggacaaggaccgattgcagcaaaaatgattaaagcagcaattgaagaaggaacttgggtgtgcctacagaattgccatcttgcagtgtcctggatgcccatgttggaaaaaatatgtgaagattttacctctgaaacctgtaactcatcctttaggctttggctgacaagctatccatcttcaaaattcccagtaacaattctacagaatggagtaaaaatgactaatgaacctcccacgggtcttcggctgaatctccttcaatcatatctcactgatccagtttctgatcctgagtttttcaagggatgccgtggaaaggaactggcctgggagaagttactgtttggagtttgtttttttcatgcccttgtgcaagagagaaagaaatttggtcctcttggttggaatattccatatggatttaatgaatctgacttgcgcatcagtatccgacaactgcagttatttatcaatgaatatgatacaattccatttgaagctatatcttacctgactggggagtgtaattatggaggaagagtgacagacgattgggacagacgtcttctattaaccatgctggctgacttttataatctgtacatagttgaaaaccctcattataagttttctcccagtggaaactattttgcacctcctaaaggcacttatgaggactacattgaattcattaagaaacttccatttactcaacaccctgagatatttggattacatgaaaacgttgacatctccaaggatcttcaacaaacaaaaaccctctttgagtccttgctcctcacccagggaggctccaaacagacaggagcctcaggaagtactgatcagattctgttagaaattaccaaagatatcctcaacaagctccctagtgatttcgacattgaaatggcactacggaagtatcctgtgagatatgaagaaagcatgaatactgtgttagtacaagaaatggaaagatttaacaatttaattataactatacgtaacactctacgggaccttgaaaaagctattaagggtgtggttgtgatggattctgcattggaggcactctccggtagcttacttgttggaaaggttccagaaatatgggccaaacgttcatacccaagccttaagcccctgggaagttacatcacagatttcctagcccggttgaactttttacaggactggtataattcaggaaaaccttgtgtgttttggctgtcaggtttctttttcactcaggcctttttaactggagctatgcagaattatgccagaaaatataccacccctattgatttgctaggatatgaatttgaggttatcccatctgatacatctgacacatcaccagaagatggtgtttatatccacggactgtatctcgatggcgcacgctgggaccgagaaagtggattgcttgctgaacaatatcccaaacttctgtttgacctgatgcccatcatatggataaaaccaactcaaaaatctcggattataaagtcggatgcctatgtctgtcccctctacaagacaagtgaacgtaaaggaactctttccactacgggacattctactaactttgtcattgcaatgttgttaaaaacagaccaacctactcggcactggatcaagcgcggggttgctttgctttgtcagttggatgactaaattggacaaatttataaaacatccaaaagtttaaaaaaaaaaaaacctgtcctacttaaaatatatacattataaaaccaag

SEQ ID NO: 128506 - DNA, 1555 bp, Homo sapiens
  Payload ID: 5153
  Gene Symbol: DNAH12
  Gene Name: dynein, axonemal, heavy chain 12
  Uniprot ID: Q6ZR08
  ENST ID: ENST00000311202
  CDS Start-End: 182-1555
gcccttctccagctactcgtttgagagccggtggcgttccggaggtttctccctcgttatccccctgcctttcacctgaggagaggctctgactgtctctctctctctctggcgtctgcgcagcggggaagtagtgagaaacaatcagagtacagagtattttaatctttaggggatcaagatgtcagatgcaaacaaagctgccattgcagcagaaaaggaagctctgaacttgaagttaccccccattgtccatctcccagaaaacataggcgttgatacaccaacacaaagtaagctgctaaaatacagaagatccaaggagcagcagcagaaaattaatcagttagtaattgatggagccaaaagaaatttagacagaacactgggtaaaagaacacctctattaccaccacctgattatcctcaaactatgaccagtgaaatgaaaaaaaaaggattcaactatatttatatgaagcaatgtgtagaaagtagtcctttagtacctattcagcaggaatggctggatcacatgttaaggctgatacctgagtctttaaaggaagggaaagaaagagaagaacttcttgaaagtctcataaatgaggtgtcaagtgactttgaaaacagcatgaagagatatttggtgcagagcgttcttgtgaaaccaccagttaaatcgcttgaagatgaaggaggtcctttacctgaatctcctgtaggcctagattattctaatccttggcattctagctatgtgcaggcaagaaatcaaatattctctaatttgcacattattcatccaactatgaaaatgttactggaccttggttatacaacatttgctgatacagttttgttggacttcacaggaattagagctaaaggtccaattgactgtgaatcactgaaaactgatctatcaatacaaactagaaacgcagaagagaagataatgaatacatggtatccaaaggttataaatctctttaccaagaaggaggcactagaaggtgttaaacctgaaaaattggatgcattttatagctgtgtttccacacttatgtcaaatcagctaaaggatctattaaggagaactgtagaaggatttgtaaaactctttgacccaaaagatcaacaaaggctgccaatatttaagatagaattgacatttgatgacgacaaaatggaattttatcctacctttcaagatttggaagataatgtcttgagtttggtggaacgaatagccgaagctctgcagaatgtccaaacaatcccctcttggctatcaggaacttcaacaccagtaaatcttgacacagaacttcctgaacacgtgttacactgggctgttgatacactgaaggcagcagtacatcggaacttagaaggtgcaagaaagcattatgagacatatgttgaaaaatataattggctccttgatgggactgcagttgagaatatagagacttttcagacagaagatcatacttttgatgaatatacagaggagctggattgctgggtggtatgggaagtgtatttttaa

SEQ ID NO: 128507 - DNA, 2613 bp, Homo sapiens
  Payload ID: 5153
  Gene Symbol: DNAH12
  Gene Name: dynein, axonemal, heavy chain 12
  ENST ID: ENST00000389536
  CDS Start-End: 182-2536
gcccttctccagctactcgtttgagagccggtggcgttccggaggtttctccctcgttatccccctgcctttcacctgaggagaggctctgactgtctctctctctctctggcgtctgcgcagcggggaagtagtgagaaacaatcagagtacagagtattttaatctttaggggatcaagatgtcagatgcaaacaaagctgccattgcagcagaaaaggaagctctgaacttgaagttaccccccattgtccatctcccagaaaacataggcgttgatacaccaacacaaagtaagctgctaaaatacagaagatccaaggagcagcagcagaaaattaatcagttagtaattgatggagccaaaagaaatttagacagaacactgggtaaaagaacacctctattaccaccacctgattatcctcaaactatgaccagtgaaatgaaaaaaaaaggattcaactatatttatatgaagcaatgtgtagaaagtagtcctttagtacctattcagcaggaatggctggatcacatgttaaggctgatacctgagtctttaaaggaagggaaagaaagagaagaacttcttgaaagtctcataaatgaggtgtcaagtgactttgaaaacagcatgaagagatatttggtgcagagcgttcttgtgaaaccaccagttaaatcgcttgaagatgaaggaggtcctttacctgaatctcctgtaggcctagattattctaatccttggcattctagctatgtgcaggcaagaaatcaaatattctctaatttgcacattattcatccaactatgaaaatgttactggaccttggttatacaacatttgctgatacagttttgttggacttcacaggaattagagctaaaggtccaattgactgtgaatcactgaaaactgatctatcaatacaaactagaaacgcagaagagaagataatgaatacatggtatccaaaggttataaatctctttaccaagaaggaggcactagaaggtgttaaacctgaaaaattggatgcattttatagctgtgtttccacacttatgtcaaatcagctaaaggatctattaaggagaactgtagaaggatttgtaaaactctttgacccaaaagatcaacaaaggctgccaatatttaagatagaattgacatttgatgacgacaaaatggaattttatcctacctttcaagatttggaagataatgtcttgagtttggtggaacgaatagccgaagctctgcagaatgtccaaacaatcccctcttggctatcaggaacttcaacaccagtaaatcttgacacagaacttcctgaacacgtgttacactgggctgttgatacactgaaggcagcagtacatcggaacttagaaggtgcaagaaagcattatgagacatatgttgaaaaatataattggctccttgatgggactgcagttgagaatatagagacttttcagacagaagatcatacttttgatgaatatacagagtttatagaaaaatttctcagtcttgcctcagaaataatgcttttgcctcagtggattcattacactatggtgcgtttggattgtgaagatttgaagacaggcctgacaaataaagcaaaagcctttgcaaacatattattaaatgacatagcttcaaaatatagaaaagaaaatgaatgtatttgcagtgaatttgaagcaattaaagaacatgcattaaaagtccctgaaacaacagaagagatgatggatctgatatcttatgtagaaaaagcccggactgtaggaatcgaagagttgattttaaggatccaggaatctaaacgccaaatgagttactttttagatgttttcctatttcctcaagaagacttagctttaaatgcaactgtcctcatgtggcctaggaaaattaatcccatctttgatgaaaatgatgagctaattgagaatgctaaacataaaaaagaaaatgaactaatggccaagagagagaaacttattttggaaatagaaaaagaatcacgccgcatggaggagtttacagaatttgcagagctggagcgcatgcaacagtatgtgacagatgtaagacaactacaaaaacgtattcaggaatctgaagaagcagtgcagtttattaataaagaagaggaacttttcaagtgggaattgacaaaatatcctgaactggataaattaaaagttaacattgagccctatcagaagttttttaattttgttttgaagtggcagcgatcagaaaaacggtggatggatggagggtttttggacctcaatggggaaagcatggaggctgatgtggaagagttttcccgagaaatttttaagacactaaaatttttccaaacgaagctaaagaaagaattacaagaaaaaagaaaggcagcaagaaaacggtctttggaagaagagaaaattgaagaagaaccaaaagacaatgctactattactatgtgcagtacagtcatggaacagataaaagcttttaaggtataaatatatataataacattttaatattatagctatcttctcaacttttctgttacctaatatataaattataaagccta

SEQ ID NO: 128508 - DNA, 12146 bp, Homo sapiens
  Payload ID: 5153
  Gene Symbol: DNAH12
  Gene Name: dynein, axonemal, heavy chain 12
  ENST ID: ENST00000495027
  CDS Start-End: 182-12064
gcccttctccagctactcgtttgagagccggtggcgttccggaggtttctccctcgttatccccctgcctttcacctgaggagaggctctgactgtctctctctctctctggcgtctgcgcagcggggaagtagtgagaaacaatcagagtacagagtattttaatctttaggggatcaagatgtcagatgcaaacaaagctgccattgcagcagaaaaggaagctctgaacttgaagttaccccccattgtccatctcccagaaaacataggcgttgatacaccaacacaaagtaagctgctaaaatacagaagatccaaggagcagcagcagaaaattaatcagttagtaattgatggagccaaaagaaatttagacagaacactgggtaaaagaacacctctattaccaccacctgattatcctcaaactatgaccagtgaaatgaaaaaaaaaggattcaactatatttatatgaagcaatgtgtagaaagtagtcctttagtacctattcagcaggaatggctggatcacatgttaaggctgatacctgagtctttaaaggaagggaaagaaagagaagaacttcttgaaagtctcataaatgaggtgtcaagtgactttgaaaacagcatgaagagatatttggtgcagagcgttcttgtgaaaccaccagttaaatcgcttgaagatgaaggaggtcctttacctgaatctcctgtaggcctagattattctaatccttggcattctagctatgtgcaggcaagaaatcaaatattctctaatttgcacattattcatccaactatgaaaatgttactggaccttggttatacaacatttgctgatacagttttgttggacttcacaggaattagagctaaaggtccaattgactgtgaatcactgaaaactgatctatcaatacaaactagaaacgcagaagagaagataatgaatacatggtatccaaaggttataaatctctttaccaagaaggaggcactagaaggtgttaaacctgaaaaattggatgcattttatagctgtgtttccacacttatgtcaaatcagctaaaggatctattaaggagaactgtagaaggatttgtaaaactctttgacccaaaagatcaacaaaggctgccaatatttaagatagaattgacatttgatgacgacaaaatggaattttatcctacctttcaagatttggaagataatgtcttgagtttggtggaacgaatagccgaagctctgcagaatgtccaaacaatcccctcttggctatcaggaacttcaacaccagtaaatcttgacacagaacttcctgaacacgtgttacactgggctgttgatacactgaaggcagcagtacatcggaacttagaaggtgcaagaaagcattatgagacatatgttgaaaaatataattggctccttgatgggactgcagttgagaatatagagacttttcagacagaagatcatacttttgatgaatatacagagtttatagaaaaatttctcagtcttgcctcagaaataatgcttttgcctcagtggattcattacactatggtgcgtttggattgtgaagatttgaagacaggcctgacaaataaagcaaaagcctttgcaaacatattattaaatgacatagcttcaaaatatagaaaagaaaatgaatgtatttgcagtgaatttgaagcaattaaagaacatgcattaaaagtccctgaaacaacagaagagatgatggatctgatatcttatgtagaaaaagcccggactgtaggaatcgaagagttgattttaaggatccaggaatctaaacgccaaatgagttactttttagatgttttcctatttcctcaagaagacttagctttaaatgcaactgtcctcatgtggcctaggaaaattaatcccatctttgatgaaaatgatgagctaattgagaatgctaaacataaaaaagaaaatgaactaatggccaagagagagaaacttattttggaaatagaaaaagaatcacgccgcatggaggagtttacagaatttgcagagctggagcgcatgcaacagtatgtgacagatgtaagacaactacaaaaacgtattcaggaatctgaagaagcagtgcagtttattaataaagaagaggaacttttcaagtgggaattgacaaaatatcctgaactggataaattaaaagttaacattgagccctatcagaagttttttaattttgttttgaagtggcagcgatcagaaaaacggtggatggatggagggtttttggacctcaatggggaaagcatggaggctgatgtggaagagttttcccgagaaatttttaagacactaaaatttttccaaacgaagctaaagaaagaattacaagaaaaaagaaaggcagcaagaaaacggtctttggaagaagagaaaattgaagaagaaccaaaagacaatgctactattactatgtgcagtacagtcatggaacagataaaagcttttaaggaatatattcctactgtctccattctgtgcaatccaggaatgagagctcgtcactggaaacagatatcagaaattgtaggctatgacttgactccagactctggaactacactgagaaaagttttaaaattaaaccttaccccatacttggaacaatttgaagtgataagtgcaggtgcaagcaaggaattttcattagagaaagccatgaatacaatgataggaacttgggaagatattgcttttcatataagtctgtatcgtgacactggagtctgtattctttcttcggtggatgagattcaggccatccttgatgatcaaattataaaaactcagacaatgagaggctcacctttcatcaaaccatttgaacatgagatcaaggcctgggaggaccgcttgattcgaatacaagaaacaattgatgaatggttaaaagtacaagctcaatggctgtacttagagcccatcttttgttctgaggatatcatgcaacagatgccagaagaagggcgtcaatttcagacagtagacagacactggagagatatcatgaagttttgtgctaaagatccaaaggttcttgctgccacttctttaacaggtttattggaaaaactacagaactgcaatgaacttttggagaaaattatgaaaggtcttaacgcatatcttgaaaagaaacgtcttttcttccctcgttttttcttcttatctaatgatgaaatgttagagattttatcagagaccaaagatccacttagagttcagccacatttaaaaaaatgctttgagggcattgctaaattagagttccttcccaatttggacattaaagccatgtatagctctgagggcgagcgagtggagctgattgcactcatttccacgtctgcagcgcggggtgctgtggaaaagtggctcattcaagtggaagacctaatgctccggagtgttcacgatgtgatcgctgcagccaggctggcttatccagaatctgcaagaagagactgggttcgagagtggcctggccaagttgtactttgtatttctcaaatgttctggacatctgagacacaggaagtgataagtggcgggacggagggattaaagaagtattataaggaacttcagaaccaactgaatgagattgtagagctggtaagaggaaagttgtctaagcagaccaggaccactctgggggctttggttactattgatgtccatgctagagatgtggtcatggacatgattaaaatgggtgtctcacatgatacagatttcctgtggcttgctcagctccgatattattgggaaaatgagaatgcccgagttcgtatcattaattgcaatgtaaaatatgcttatgaatatcttggtaactcacctcgacttgtcattacgcctctaactgacaggtgttacagaacattgataggtgctttctatttaaaccttggaggtgctccagaggggccagcaggcacaggaaaaaccgaaaccaccaaggacttggctaaagctcttgctgtacagtgtgtggtgttcaactgttctgatgggctagattatctagcaatgggaaagttttttaaaggactggcttcttctggtgcttgggcttgctttgatgaattcaatcgaattgagttggaagtgttgtcagtggtagctcaacagatcctttgcattcagagagctattcaacagaagttggttgtgtttgtttttgaagggacagaacttaagctcaatccgaattgttttgtagctattaccatgaatcctggctatgcaggacgctctgaattgccggacaatcttaaggttctttttagaacagtggctatgatggttccaaactatgcgcttatagcagaaatctccctctactcttacggatttttgaatgcaagacctctgtctgtgaaaatagtaatgacctataggctttgctcagagcagctctcatcgcaatttcattacgactatggaatgcgagcagtaaaagccgttttagtggctgctggcaatctaaaactaaaatacccaaatgaaaatgaagatatacttcttcttcgatcaattaaagatgtaaatgaaccaaagtttttatcacatgatatacctttatttaatggaataactagtgacttatttcctggtattaaacttcctgaagctgactatcacgaatttttggaatgtgctcatgaagcctgcaatgtacataatcttcagcctgttaaattttttcttgaaaaaataattcaaacatatgaaatgatgattgttagacatggttttatgttagtaggagagccttttgctgctaagacaaaagttctgcatgtgctggcggatacgctaactttaatgaatgaacatggctatggagaggaagaaaaggtcatttatagaactgtaaaccccaaatctattactatgggccaactttttggacagtttgacccagtgtctcatgagtggactgatggtattgtggctaacacttttagagaatttgccttatcagaaacacctgaccggaaatgggttgtatttgatggtcctattgacactttgtggatagagagcatgaacacagtattggatgataataaaaagctttgccttatgagtggagaaatcattcagatgtccccccaaatgagcctcatctttgaaacaatggacctttcccaggcatcccctgccactgtaagtcgttgtggtatgatttatttggagccttcacagttaggatgggaaccacttgtgtcttcttggttgaattcactgaaaggacctctgtgtgaaccagaatatcaagctcttctgagaggactttttgcctggttaataccaccctctttaaaccagcgtaagaaaaaatgcaaggaactgattcctacaagcaacagcaacgtggttgtatctctcacacgcctctttgaagtgctactttgcaatgtggtagaaaatgatcctactagcaagcacattcgtgtttggattatggcttgctttatattctctttgatttggtcgattggaggaagttgtgatacagatggccgtcgtgtttttgatactttcatacgattaatcatactgggaaaagatgatgaaaacccagtgccagattctgtgggtaaatgggaatgcccatttgatgaaaaaggcctggtctatgactacatgtatgagttgaaaaacaaaggtcgctgggtccattggaatgaattaattaaaaatactaatttaggagataaacaaatcaagattcaagatatcatagtccctacgatggacacaattagatatacgtttctaatggatttgagtattacctatgcaaagccactcctttttgtgggtccaacgggtacaggaaaatctgtgtatgtgaaggataagctaatgaatcacttggaaaaggaccagtactttcctttttatattaacttatctgcacggaccagcgccaatcaggttcagaacattatcatggctagattggataaaagacgcaaaggagtctttggaccacctatgggaaagaagtgtataatttttatagatgatatgaatatgcctgcattggagaagtatggagctcaaccacctattgaattattacgacagttttttgactgtggacattggtacgaccttaaggacacaagtaaaatcacgctggtggacatagagctgattgctgcaatgggccctccaggtggtggaagaaatccagttactccccgttgtattcgacatttcaacatctgcagtattaattcttttagtgatgaaactatggtccgaatcttctcatctattgtagcattctaccttagaactcatgaatttcctccagagtactttgtaattgggaaccagatagtcaatgggactatggagatatataaacaatctgtggaaaatcttttacccactcccacaaaatcccattatactttcaacttgcgtgatttttcacgcgtcatccggggctgtttactcattgaaagagacgccgtggcgaacaaacacactatgatccgtctgtttgtgcatgaggttctccgagtgttttatgatcgcctcattaatgatgatgatcgaagatggctgttccagttaactaaaactgttataaaggaccattttaaagaatcatttcacagtatcttttcacatttgaggaaacaaaatgcaccagtaactgaagaagacttaagaaatctcatgtttggtgattatatgaatcctgaccttgaaggagatgatagagtttatattgaaattccaaatattcatcattttagtgatgttgtggaccagtgcttagatgagtataatcaaacacacaaaacaagaatgaatcttgtcatttttaggtatgttttggaacatttatcaagaatatgtcgagttctaaagcaatctggtggaaatgctttgcttgttggtcttggaggaagtggtcgtcaatctttaactcgtctggctacatccatggcaaaaatgcatattttccaaccagaaatttctaagagctatggtatgaatgaatggagagaggatatgaagggtctgttaaggaatgtgggcatgaagggccagaagaccgtctttcttatcacggacactcagattaaagaggaagctttcctagaggatatcgacagtgtgctcaatacaggagaagtgcctaacatttttgcagcagatgagaagcaggaagtgatggagggtgttcgcccagtagctcaggctggcaataaacatgatgaactcagtcccttagctctgtttgctttctttgtgaatcgctgcaaagataatcttcatgtcgtggtggcctttagccccattggagatgcctttcgaaatcgcttgagacagttcccatccctcatcaattgctgtaccattgactggtttcagtcatggcctgaagatgctcttgaacgtgtagctgtgaaattcttagaaacactggagcttactgaggttgaacaacaagagatagttccaatctgtaaacactttcacacctccattatggatctttcagaaaggttcttgcatgagttaggacgacataactatgttactgctacttcttatcttgaactcattggctcatttcgacagcttttgacacagaagcgacaagctgtcatggaagcaaaacaacgatacatgaatgggcttgacaaattagcttttgctgagtctcaggttggtgaaatgcaaatggagcttgttgaattacagcccaaattggaggaagctaaaattgaaaatgcaaatatgatgcaggttattgagatagagtctgtacaagtggaagcgaaaagacaatttgtgaaattggatgaagagatagccagtgggaaagctgaagaagcccaagctctgaaaaatgagtgtgaaagtgacctagctgaggcgattccagccttggaagcagctctgtctgcactggatacacttaagccagccgacattacgattgtgaaatcaatgaagaatcctccatctggtgttaaactagttatggctgctgtttgtgtcatgaaagatataaaaccagaaaaaatttcagatccttcagggactggaggcaagatattagattactggggacctagcaaaaaacttctgggagatatgaatttcttaagagatttgaaagaatatgacaaggacaacattccagtgactgttatgcagaagattcgtagtgaatacttaatgaaccctgaatttgatccccctaaggttgctaaagcttcttctgcagctgagggtctgtgtaagtggatcatggccatggaagtgtacgacagagttgcaaaggtagtggctcctaagaaagctcgcttatcagaagctcagaagtctttagctgagacaatggagcttttgaatcagaagagagcagaactggcagaagtagaacatcatctggaaaatttacaaatgacatttcttgagaaaacagaggaaaaggctgctttagaagaccaggtggaactctgtgctaagaagcttgaaagagcctcacaattaattggaggactgggtggagaaaaatcaagatgggcccaagctgcagatgaccttcagataacatatgaaaatttaactggcgatgtcttagtatcagcaggagtaatagcttaccttggtgctttcacttctggctttcgacaaacatgtacaaaagattggagcatgttgtgcaagaagaaaaaaatcccgtgttcagaggagttcttgttgagtaaaaccctgggtgatccagtaaaaattagagcttggaatattgctggtttaccaacagatacattttccatagataacggagtgatcgttaacaactgtaggcgttggcctttaatgattgacccccagggtcaagccaataagtggatcaaaaactctgaaaaagaaaatcagcttagtgttattaagctatcagattcagactatatgagaacattggaaaactgtattcagtttggaactccacttctattagaaaatgttggtgaagaactggatccatctttggagcctttactactcagacaaacttttaaacaaggtggcattgattgcatcagacttggtgaggtcattattgagtattcctttgatttcaaattttatatcaccacaaaactgagaaacccgcactatatgccagaactggctacaaaagtgtctttgctcaatttcatgataactccagaaggacttgaagatcaattactaggtattgttgttgcaaaggagagaccagaattagaagaggaacgaaatgccctgattcttcagtctgcagctaacaagaaacagctgaaagacatagagaaaaaaattttagaaacattatcatcatcagaaggaaacattttagaagatgaaagtgcaattaaagtcttagactctgccaaaatgatgtccaatgaaataacaaagaaacagcagattgcagaaaaaacagaactcaaaatagcagagtctcgagaaggctatagacccatcgccaaacactcgtcagtgttattctttagcattgcagacctggctaatattgatcccatgtatcagtactctctcacgtggtttgtgaacctttatatcaactctattcatgacagtaacaaatccaagattttggaaaagcgcctacgatatttaaatgaccacttcacatacaacttatattgtaatatatgccgatcactatttgagaaggacaagctgttattttcctttttattatgtgccaatcttcttctggcaaggaaagagattgaataccaggaactgatgtttcttttaactggaggagtaagtcttaaaagtgctgagaaaaatcctgatccaacttggctacaggacaaaagctgggaggaaatctgtcgggcaagtgaatttcctgccttcagaggactcaggcaacatttttgtgaacatatatatgaatggcgagaaatctatgacagtaaagagccacataatgctaaatttccagcaccaatggataagaacctaaatgaactacagaaaataataattcttcggtgtttaagacctgataagataaccccagctataacaaactatgtaactgacaaactagggaaaaagtttgtagagcctccaccatttgatttgacaaagagttacttggattcaaattgcaccattcccttaatttttgttctatctccaggagcagatcctatggccagcctgctgaaatttgcaaatgataaatctatgtctggaaataagtttcaagctatttcactgggacagggacaaggaccgattgcagcaaaaatgattaaagcagcaattgaagaaggaacttgggtgtgcctacagaattgccatcttgcagtgtcctggatgcccatgttggaaaaaatatgtgaagattttacctctgaaacctgtaactcatcctttaggctttggctgacaagctatccatcttcaaaattcccagtaacaattctacagaatggagtaaaaatgactaatgaacctcccacgggtcttcggctgaatctccttcaatcatatctcactgatccagtttctgatcctgagtttttcaagggatgccgtggaaaggaactggcctgggagaagttactgtttggagtttgtttttttcatgcccttgtgcaagagagaaagaaatttggtcctcttggttggaatattccatatggatttaatgaatctgacttgcgcatcagtatccgacaactgcagttatttatcaatgaatatgatacaattccatttgaagctatatcttacctgactggggagtgtaattatggaggaagagtgacagacgattgggacagacgtcttctattaaccatgctggctgacttttataatctgtacatagttgaaaaccctcattataagttttctcccagtggaaactattttgcacctcctaaaggcacttatgaggactacattgaattcattaagaaacttccatttactcaacaccctgagatatttggattacatgaaaacgttgacatctccaaggatcttcaacaaacaaaaaccctctttgagtccttgctcctcacccagggaggctccaaacagacaggagcctcaggaagtactgatcagattctgttagaaattaccaaagatatcctcaacaagctccctagtgatttcgacattgaaatggcactacggaagtatcctgtgagatatgaagaaagcatgaatactgtgttagtacaagaaatggaaagatttaacaatttaattataactatacgtaacactctacgggaccttgaaaaagctattaagggtgtggttgtgatggattctgcattggaggcactctccggtagcttacttgttggaaaggttccagaaatatgggccaaacgttcatacccaagccttaagcccctgggaagttacatcacagatttcctagcccggttgaactttttacaggactggtataattcaggaaaaccttgtgtgttttggctgtcaggtttctttttcactcaggcctttttaactggagctatgcagaattatgccagaaaatataccacccctattgatttgctaggatatgaatttgaggttatcccatctgatacatctgacacatcaccagaagatggtgtttatatccacggactgtatctcgatggcgcacgctgggaccgagaaagtggattgcttgctgaacaatatcccaaacttctgtttgacctgatgcccatcatatggataaaaccaactcaaaaatctcggattataaagtcggatgcctatgtctgtcccctctacaagacaagtgaacgtaaaggaactctttccactacgggacattctactaactttgtcattgcaatgttgttaaaaacagaccaacctactcggcactggatcaagcgcggggttgctttgctttgtcagttggatgactaaattggacaaatttataaaacatccaaaagtttaaaaaaaaaaaaacctgtcctacttaaaatatatacattataaaaccaag

SEQ ID NO: 128509 - DNA, 2254 bp, Homo sapiens
  Payload ID: 5153
  Gene Symbol: DNAH12
  Gene Name: dynein, axonemal, heavy chain 12
  ENST ID: ENST00000466540
  CDS Start-End: 1-2222
ttcatgacagtaacaaatccaagattttggaaaagcgcctacgatatttaaatgaccacttcacatacaacttatattgtaatatatgccgatcactatttgagaaggacaagctgttattttcctttttattatgtgccaatcttcttctggcaaggaaagagattgaataccaggaactgatgtttcttttaactggaggagtaagtcttaaaagtgctgagaaaaatcctgatccaacttggctacaggacaaaagctgggaggaaatctgtcgggcaagtgaatttcctgccttcagaggactcaggcaacatttttgtgaacatatatatgaatggcgagaaatctatgacagtaaagagccacataatgctaaatttccagcaccaatggataagaacctaaatgaactacagaaaataataattcttcggtgtttaagacctgataagataaccccagctataacaaactatgtaactgacaaactagggaaaaagtttgtagagcctccaccatttgatttgacaaagagttacttggattcaaattgcaccattcccttaatttttgttctatctccaggagcagatcctatggccagcctgctgaaatttgcaaatgataaatctatgtctggaaataagtttcaagctatttcactgggacagggacaaggaccgattgcagcaaaaatgattaaagcagcaattgaagaaggaacttgggtgtgcctacagaattgccatcttgcagtgtcctggatgcccatgttggaaaaaatatgtgaagattttacctctgaaacctgtaactcatcctttaggctttggctgacaagctatccatcttcaaaattcccagtaacaattctacagaatggagtaaaaatgactaatgaacctcccacgggtcttcggctgaatctccttcaatcatatctcactgatccagtttctgatcctgagtttttcaagggatgccgtggaaaggaactgttatttatcaatgaatatgatacaattccatttgaagctatatcttacctgactggggagtgtaattatggaggaagagtgacagacgattgggacagacgtcttctattaaccatgctggctgacttttataatctgtacatagttgaaaaccctcattataagttttctcccagtggaaactattttgcacctcctaaaggcacttatgaggactacattgaattcattaagaaacttccatttactcaacaccctgagatatttggattacatgaaaacgttgacatctccaaggatcttcaacaaacaaaaaccctctttgagtccttgctcctcacccagggaggctccaaacagacaggagcctcaggaagtactgatcagattctgttagaaattaccaaagatatcctcaacaagctccctagtgatttcgacattgaaatggcactacggaagtatcctgtgagatatgaagaaagcatgaatactgtgttagtacaagaaatggaaagatttaacaatttaattataactatacgtaacactctacgggaccttgaaaaagctattaagggtgtggttgtgatggattctgcattggaggcactctccggtagcttacttgttggaaaggttccagaaatatgggccaaacgttcatacccaagccttaagcccctgggaagttacatcacagatttcctagcccggttgaactttttacaggactggtataattcaggaaaaccttgtgtgttttggctgtcaggtttctttttcactcaggcctttttaactggagctatgcagaattatgccagaaaatataccacccctattgatttgctaggatatgaatttgaggttatcccatctgatacatctgacacatcaccagaagatggtgtttatatccacggactgtatctcgatggcgcacgctgggaccgagaaagtggattgcttgctgaacaatatcccaaacttctgtttgacctgatgcccatcatatggataaaaccaactcaaaaatctcggattataaagtcggatgcctatgtctgtcccctctacaagacaagtgaacgtaaaggaactctttccactacgggacattctactaactttgtcattgcaatgttgttaaaaacagaccaacctactcggcactggatcaagcgcggggttgctttgctttgtcagttggatgactaaattggacaaatttataaaacatccaaaagttt

SEQ ID NO: 128510 - DNA, 665 bp, Homo sapiens
  Payload ID: 5153
  Gene Symbol: DNAH12
  Gene Name: dynein, axonemal, heavy chain 12
  ENST ID: ENST00000494758
  CDS Start-End: 1-165
gatttcgacattgaaatggcactacggaagtatcctgtgagatatgaagaaagcatgaatactgtgttagtacaagaaatggaaagatttaacaagactggtataattcaggaaaaccttgtgtgttttggctgtcaggtttctttttcactcaggcctttttaactggagctatgcagaattatgccagaaaatataccacccctattgatttgctaggatatgaatttgaggttatcccatctgatacatctgacacatcaccagaagatggtgtttatatccacggactgtatctcgatggcgcacgctgggaccgagaaagtggattgcttgctgaacaatatcccaaacttctgtttgacctgatgcccatcatatggataaaaccaactcaaaaatctcggattataaagtcggatgcctatgtctgtcccctctacaagacaagtgaacgtaaaggaactctttccactacgggacattctactaactttgtcattgcaatgttgttaaaaacagaccaacctactcggcactggatcaagcgcggggttgctttgctttgtcagttggatgactaaattggacaaatttataaaacatccaaaagtttaaaaaaaaaaaaacctgtcctacttaaaatatatacattataaaaccaa
